United States Patent Application Publication US 2020/0377945 A1 - sequence listing, part 3

SEQ ID NO: 337 - DNA, 38766 bp, Unknown
  gut microbiota DNA sequence
aaagtcatagtgtccttgacaaagggtacactttattttctcttttcaggataatattcatccaatctttactttataatatttttttgccagtcaggaacacctctgttataagtatatcttctggcgttgttgctttaatattagtatactcagataatgtcatttttaccttagtattcatatatttttcagcaaccattgcatcatctgttattccttttttatcaatatcacaatataacttatcatatgcttctaaaataagttcactttcaaaaacctgcggtgtctgtatctgccataaagtgcttctatctggtgtattaacggcaattccttcagcatcaacaaccttaattgtatcttttaccggaactgcagcaacgcatgcattatatattttaacatcatgcatgcatgcatttattatactatctgttacgcatggtcttgctccatcatgtataaacacataatttttatctttttgcctgccctgctgcgcttcgttcactttttctcttatacaattcaatcctgaatatacagaatcgtatctctctctgccaccttcaactacagcaataatctttttatagccttgtgagcgtattattttttccatatacccaatatagtctgctgatgtaacaactactattctgtctatattatcatttgcctcaaatgtttctattgaataacatatcatcggaatatcattcagcttaagaaattgctttggaatatcacttttcatccttgaaccttttccaccagccagtattattgcataattcattatacatacctcacttcatcgttctttaacagatctaaatatagcagacacaaaactgtttcagcaaaaggaatcacactctttctccaagcttaagattaggtattgcattaagatcatatccatgtcttgtacctgatatatattcataatatgctgcaaccccaatcatcgctgcattatcagtgcagaatataggtgatggtgaataaaaagtaattgcattcttatcgcattcttctttcaatgtctttctaagtgccgaattagatgctactccacctgccaatgcaagcttattcattccactttctttcgtgagacggatagcacgtgatacaagagcatcaactacagctttctggaacgaagctgcaagatctgctttgtttacagtttcacccttcatttctgccgaattaatatagttaagcactgctgattttattccactaaacgaaaagtcgtaaggtgcatcatctacatgtgctcttggaaaaactatagcttcaggattaccctctttagctatcttatctattttaggtccaccaggatatccaagtcctatagctcttgccaccttatcaaaagcttctcctgctgcatcatctcttgttcttcctattatttcaaacttaccataatcattaactttaacaagatgggtatgtccacctgatacaacaagtgatacaaaaggcggctcaagttctttgttttctatatagtttgccgcaatatgtccctctatatgatgcactccaacaagaggcttgcctgttgcaaatgcaatagctttagcctctgccacacctacaagcaatgcacctacaagacctggaccataagttacacctattgcatctatatcatcaagtgtaactcccgcctcatccaaagccattcttataacaggatttatattttctatatgcttccttgaagctatctccggaacaactccaccatattctgtatgaatagcaatctgtgaattaataatattagataatattgttcttccattctttacaaccgctgccgctgtctcatcacatgagctctcaatagccagtatcagcacatctttttgttcttccatttattctccattctgcagacattaattataatatcaatagatatatacttactgctttatcatgcctgctctacatataaagccaatcaacttgttattcagcttaaatctaccgaatcaactaattcccagtataatatcttccatttgcctgaattatcttttcttaaagtaaacttagtacctgatgttctaaggttgcttccttctcgtatataatacacaagctgcaatgatgcatattctctattattaaatgttgtatactttgtatcattagcactctgaaggctgaagctgctgattcgggcatcgttatttctatatatgcttatatcttcttttaatgccctcatgaactcttcatcagtctgcgtatttttaagttcatcatcaaacaacaatcttgcctgatgtccaagcttttcaatatcctcttctgatatatcactctcatagtactctttcgttattcttgcataaagcttaacaacatcccttacagattccggatagttatcacttatatttcttgctacaagatatgcaagctcgtcattctggaccaccttgtctgtagcatccttttttgatggtttgtttgcaagataataataatatccaatacataataccgcacataatattacggctaataccattctccaatgttttttcataggctgctccttttttctcacgctcaatacaacttatgtaaccttattctactcttcatcttcaaaattaagtgtaacactctgcccatctttcgctgcacgtacatttttaaatatattttttatattccctacatagtcagctggtcttataagtgatggactataatgtgtgagccacatttccttaacatcagcatttttagcaagctctgctgcctcatagaatgtcatatgcttatattctttcgcctttgactctttatccttttccccatacatgccttcgcatataaaaagatctgaattcttcgcattatcaactatagcctgtactggtcttgtatccgtacaataagtaagctttataccttttctaggtgctcccataaccatatccggcgtgtatgtaacaccttcatgctcaatttcctgtccatgctgcagcttattccatatacgacatggtatgccaagctcttttgccttatcggcattaaactttcctattcttggtatacttatagtatacccatagcatgtaaccgcatgatttacacggaacgcatctatttcatatccttttatcgacaaatgttcctgctgcccattaagttctatcatatttatttcaaaaggaagctccggtgctatcacccttaaagcattcaccactcttgaaagacccttaggtccgataagtgtaagcggctcttttctgtctgaattgcccatcgtaagcagtaatcccggcagcccgcttatatgatctgcatgataatgcgtaaagcacactacatctataggattatagctccatcctttttcttttatcgctatctgtgtcccttcaccacaatctataagaagactacttccattatatcttgtcataagtgaagtgagccatctgcctggtaatggaagcatcccacttgttcctaataaacatacgtctaacatatcggctcctttcttttttcgttattttacatgtagttcattatataattcacatacatcctgcctataagcagtcttgcatcataatatctttgacataacaatagcatcttctacaggtctttcataaaatcttttccttgtacctataggactatacccaagtttttcataaagtttttttgctgcttcattgctttgtctgacttcaagaaaaaagattgttactgatttttctttcgcccttctttccatttctttaagaagtgcttcagccacaccttgtcttctatatgatggatgcacagcaacattagttacattgccctcacccataacagtccacataccacagtatcctgctatttctcctgtatgctcgcatacaagatatatgttatccggattacatgcagcatctatgaaagatttttcagaccatggcagtgaaaatatttcattctctatctttgacacataaggaacatctctttcttccattgttctgacatggtattccataatcctttactcctattctaagcattaagctttcattagtatattcatgtcttcatatgctcataactatctgctgatttatttattatgttctctttctgcctgtgatgggcgtaaataatccggcttcataagatccgaattaatagtctttccttcctgtgccatgtatatagccgcaagtgcaacacttgatgctctctgtgtctttatatgaggtttactaaaactatatctgcacttaagattatcttttatataatctcctgcaacatctatgccatctccgacaaataccacttcttcatcctgtgcattaagtatatctaccagttcctgatacgatataagacattgttcatgtataatttcaagcttttctgcatcaaatctgtataaaccactgtaaagatgctgtcttcttgcatccatgacagggcatataagtcttttgtctcccataagattataagccatagcttcaagcgtaggtacagccaccataggtttatccttagcaagtgctatcccttttcctgtagccgctccaatccttaatcccgtaaatgaacccggaccatcagacactgcaactatatcaatatctgacacatctgtttctgtcatacgacatatttcatctatcatcggaagtaatgtctgcgagtgtgttttcttgtaattaatcgtatattcagcaataagcgtatcctctgtcataatcgcaacagaagccgtaactgctgaactctcaatagctaatactttcattttgttacctcgattttcctgtagtcaaatcccttggataaatccttactaatcttaatgtatgtcgcattttcaggcataatttcacttataagattgccccattcaataagacacacaccttctgaatagaagtattcttcatatcctatctcgtccatttcagttatatcacctattctgtatacatcaaaatggtataatggaagccgtccatcatgatattcctgaacaatagtaaaagtagggctgttaataggctcatttataccaagccccttcgcaaacccctgggtaaatacagttttcccaacaccaagatcaccatcaagacaataaacatctcctgccctggcatttttacccatgttatatcctagttcatatgtttctttagaactacgtgtttctgtaatcatattatcacccatttctgcggattaccgtattgtttaagatattaagaaagtctgtcagtattcacctttacctggaatggctttaaatgcttctttgcaagtgctataaaatcagccgctttcccgttaaaatcccttacaggtattatgttggcatttactgttgtcatataaacgtcaatgtttctgccgtcgaactttatcttgtatatcttgtcccataaaagagtctctgttatatctccaagacttactgttataccagaatcatctatcctgtaatggactttttccttaaatgtaacaacactcttcatctgtcttttggctctaagcttcatatcaactgatggaaatataagaaaaaatattccaaacacaccaaccatgagtgtataagagacattaacctttcctgctgatataactgcaagcactataagtataagtgcaagcagaatctctgccatacccgatatcgtatgatacttatgatagaacttaaatctgagcagatctttctctgtaaccttactgtcaaactcgataacactatccattaccattattccgcctttctgtttttcctaatcctagtgcatgaacttctctaagcctcttaagttaagcccctgtggctttttcttttttctgttctgatttctgtcctggctgttgttatcttttgtatgctgcttattgcctcctttgttattactttcttcctggctgtttcttcttcctctgttagctgctgccttttcgtcaagaatcattgatagtgatattcttcccttgttaacatcaacatctataacccttacatcaacaatatcaccaacactgacaatatcaagaggatgctcaactcttctttctgcactcatctgtgatatatgcacaagtccatcctgatgcacccctatatctacaaatgcgccaaaatctatgacatttcttactgtacctttaagtatcataccagaagcaagatccttcatatcaagtacatcttttcttaatatcggcttaggcatctcatctcttggatctctgcctggcttttcaagttcttttactatatcttcaagtgttattgtacctataccaagttcatcagcaagtctgctcatatcttctatcttagactttagtcctataagctcaccagagcttatggaatctatatcataccccataacttcaagaagtttctttgctgcttcatagctttcaggatgcacacttgttgcatcaagcggattatctcctcctgatattctcataaaccctgcacactgttcaaaagcttttggtcctagcttagctaccttaagcagctgttttctgttagtaaatctgccattagtttctctgtaatctataatatttttcgcaactgcctttgatattccagatatatattcaagaagtgaagctgaggctgtgttaagatctacacctactttgttaacactatcttctacaacgccaccaagtgtctcacttaacttcttctggttcatatcatgctgatactggcctacacctatagactttggatctatcttcacaagctctgctaacggatcctgtacacgtcttgctatagatactgcacttctctggttaacatcaaaatcaggaaactcctctgttgcaagcttactggctgaatatacagaagcacccgcttcattggttataacataatccacattcttaagttcatattcctttatcatatctgagataatctgttctgattctcttgatgctgttccgttaccacatgatataagattaacattgtacttcttaataaggtctgcaactattttcttagtttcctcgaccttgttaaatggttctgttggatatacaacctttgtagcaagaacctttcctgtagcatctactattgcaagcttacacccatttctaaatcctggatcccatccaagtacaacttttcctgctataggtggctgtaaaaggagctgctcaagattcttgccaaacaccttaatagccccatcctcagctgtttctgtaagagtattccttatctctctttcaatggctggtgcaataagtctgtcgtatgcatctgctatacactctttaagatatggtgttgtatactcattgtcgtttgttattatctgcttttcaagatatctgagtattctttcttctggtgcttcaactttaatcgtaaggaacttttcattctcacctctgtttattgcaagaattctatgtcctggaatagatgctattgcttcattgtaatcataataattctcatatactgattcagcttctgcatcctttgctgctgctacaagctttccctctttaaatgttatatctcttatatatgttctgtagtctgctacatctgatatctgctcagctataatatcaagtgctcctgcaatagcttcctttgcactctttacttccttgccttcctcatctgatacatacttttctgcttcaacaaggacatcttcctttgcatcctgtcctttgatatattctgcaagctgctcaagacctttttccctggctattgttgcccttgttcttctcttctgcttatatggtctgtaaagatcttctacaagcaccatggtttctgctttaagtatctgttccttaagctcatctgtaagcttaccctgttcctcaatacttgcaataacctgtgtctttctatcttcaagattacgtaaatacttaagtctgtcatcaagttcacgaagctgttcatcgtttaacgcccctgtaacctcttttctatatctggcgatgaatggtatggtacagccttcatctataagctttacagccgcatccacctgtgatgtttttacacttaattcttctgcaatcttcttaataatatccattgtgaaactccatttctattattttatcaatgtttaattataccaattgtaagctttattatcaagttactgttttatatgcaatatataacaaacaatcgcagcacatacataaaaaggccaggtagtataatcaatcaatactacctggtcattcattattgttacttgatattctttttcatcttttcaatctcatcatctatgctttttccattggaaaatgtatctttatagcctttgtttttatcttttccagatgcctttttctctctgtaagatgttccgctgcctgaaaacagcacctttccaacaagtccggcacctccaaatataagcaccaataataatatccattcgtataatgtcatcacactaagatgaatatgtgttgacattataactgatactattattaaaagcacggataatgctgtaaatacttttgatgcaaagcaagcccctgtcataaacatccatacaatccctataataagcggaataataataagccctgatgaaaatcttcctccaccaaggaagaaaaatccatatcctgaaaatactataaccttctgtgaaaatatatacaatccaactgcaagcataactacacctgctacaaactgcataagctcatttttcgcatctttcataagcttcccccttctttctatcctgcctgttatacagaatatttcatgtcttaccaaaaaaacgctgcattaatccactactttgattctggcacaaacactccatagattgttctgattgcatcctcaaaatatctgtttcttacacctatgatgatattaagctcacttgaaccctgatcgatcatcttaatattaatcttagatttagcaagtgctgagaagatattgcccgcaagacctgagttatttctcatgcttcttcctacaaccgctataagtgcaaggtctgattcaagctcaatagaatccggattaactgctctatgaagctctgcaagaactttctgttccttttctacgaattcatcctgatggacaaatactgtcatagtatctatgcctgaaggcatgtgctcaaaggagattccattatcttcaaacacctgaagaacttttcttccaaatcctatctctgaattcatcatatccttatctattgttattgatacgaagcccttcttacctgcaatacctgttataatgcagtcaggtctgttacatgttgtctcaacaatcatagtacctttatcctgtggtgcattagtattacgtatatttattggaattccttcctttcttactgggaatatggctgattcgtgaagaactgttgcacccatatatgaaagctctcttaattccttgtatgttatgacatctattggtcttggattgtctactattcttggatctgctgcaaggaaacctgatacatcagtccagttctcatatacatcagccttaatagctcttgcaacaatagaaccagttacatctgaaccacctcttgaaaatgtttttacagctccattaggcatagctccatagaagcctggaataactgctgactcaacattcgctaatctgtctcccataaccttgttagtcttttcaccatcgaattcaccgttagcatcaaaacatataacactggctgcatctataaactcatatccaagatagttagccataattataccattaaggtactcgcctcttgaagctgcatagtctgtaccagcctttgcttcaaagttctttctgattgtttcaaactgttcctttaatgaaagctttaaaccaagtccctttataatctcgttgtatctttcttctatagccttaagctgcttatcgaagtttttacctgattccgcctcagcataacacttataaagcatatcagtaaccttcgtatcatctgaaaatctctttcctggagctgaaggaactacgaatcttctgctttcttctgctcttattatatttccaaccttcttgaactgctctgcactcgcaagtgaacttccaccaaacttaactacttttaccattactgtttttacctttcatcgtatttattatattttacttaattcaatgacactattacttttctattaattaagctttgtatcatctattctgattcttgatataacatttatcttagctgctgccaaagcaaacttttcttctgtcataacgcctgttataaagccgtactcagcatcaagaccttcagcgttaactatcctaacatcaccaaaaagctcttcaagctgtgattctttcacatcctttgatacccttacaaagaatcttctttcttcttctgctgtatctgcaagtgtaagcttctcatcgtcccagataaccataacattagttcccttatgcttaacacagtcgattatatctccaactactgcacttgctgtaggaagcttacctgcaccagcaccaaagaacataacatctccaaccatatttccgttaacatatattccattaagtactccgttaacattatataacggatgtgtcttatctataaggaatggtgatgttatagcatatactttaccattttttctataacttgttgctaaaagcttgattacacatccaagcttatctgcatacttaaaatcctcgtttgatatctttgtaatgccttctgttgttatctcttcaaagttaactgtcttaccgccggcaagtgatgtaagaatagctatctttctgcatgcatcatatccttctacatctgcttctggattacgctctgcatatccaagctcctgtgcttcctttaacacttcctggtatgaacttccctccctgctcatctttgtgaggatatagttagttgttccattcataatacctgtaatcttagttatctcgtctgctgtaagcgcctggttaagaggtctgataataggaataccaccacctacagatgcttcaaacataaagttaagatttcgttcctttgccatggcaagaagctctgctccatgagctgcaacaagtgccttgttagatgtacacacactttttccagcctccagcgctctcttaacaaatgtaaatgctggttctacacctcccatgacttccactacaacatctatatcatcatcatttataataaggtctatatcatgtactatcttttcctggataggatctcctgggaaatctcttaagtctaaaacgcttttaacctctatagactgtcccgccttttttaatattgaatcagcattcgtgttaagtatctcaacaactcctgatccaactgttccataacctaataccgctacttttgccatatcatcctccatgtaattttcactttattttataaaattaaagtgatgcatcactgcttaagattttaaggtatcttaccccaccaagctgttctatttcctcaatcatcatagatgcatctccggtcgttggaaggatctcaacactcaatgttaatgatgcaataccattaaccggtatagtctggtgaatcgtaagtatgttagccttaaactcagctaccttgttaagcacaactgatagaagtcctggttcatcctccatagacaggacaaatgttattgtcttacctttagaattatctctgaatggaaatatatcatctttatacttatagtaggagcttctgcttatccctactttttcggtagcatctgctatagagatattcttattctctataagtctgtttgcttccgctacctttaaaagcacttcaggcagagctttctgcttaacaacataatatttaatattatctttcattttaataatctcatgcctttccgcatatttaaagtatataagtatgtcaacgcctttttgtgtattccacagaaagacagttgtactcagtacaaagaatagtagcacatgttctatataaaagcaagtgttttatgtctgtttaaacaataaaaaaccctcgcacaacgggagaggaatgcgagggttatatataaaaacaatgtcataaatacattgtctttatcaatattaaacttgttagtactatataacatttatgcatgttgcaaaatagcactttggtactatttgcaacattattttctttcacggtcgaaaacactggccagatatctcatcgcattaagatgttcccaattcagctggtttttcttcatacgccatttccagttatttccaagacttgaagggaaattcatacgggctgaattatcaagctttaatatgtcctgaacagaaaaaatagtgagtactgcaatgctggaatatgctgcacggaaaaccatatcaaccatacggcacttatctcttgtatccagataatcatatgcatatcccagttcaccatcatttctttcattaaagtatccaagaagtgtttcattatcatgagttccaccatagcatacacaattatgtgtatagttatatggaagatggggattctttctgtctccaccaaaagcgaattctaacactttcatgcctggataattattatattcaagcactttttcaacctctggaatacttactccaagatcttcagctattatctttttattaccgatggattcattaactgcatccagaagcttctgtcctggtccctgttcataagaaccctgtattgcatcaggcatatcatatggaatcgtatagtacttaataatcccaagaaaatggtctattcttataacatcatacaatcttgctgaattcttcatgcgctttctccaccacaaaaatccatcagcttccatcttatcccagtcatataaaggattgccccatttctgtcctttatcagaaaatgcatcaggtggtactcctgcaaccttaacaggtgtaagattctcatcaagttggaactccttctgtccggcccatacgtcaacactgtcatatcccatgtatataggaatatcacctattatttctattccctgtgagttggcatattttttcaggctgtcccactgtttataaaactcatactgtataaaacaccaatatcctatatcatcttcaagttctttttcatacttttccatagcctgcggacgtctgaactttatgtcttcgtcccattcgccccatgatttctggtcaaaatgttctttaagtgacataaacaaagcataatccttaagccagtctttgttatcatttatgaaattttcaaactttttataaacaggaagtcctttatcaagcgttgactttgctttaaggcactgctctttaaaacgctcatatgcttttcttagtatggtaaatctttccctatacattttttcgtaacttacatatctgtcatcaccaagatacccatcatagttaacaggatacctgttactaagagcctcctcctcagatacattgaccggaacaaagccatctccccagtcaactgcaataacctctgacttaagaagcagtccatcctctataagcgtatcaaggtctacaaaatatggattacccgcaaatgctgaatatggctgatatggactatctccatatgttgttggcccaactggcagaacctgccaatacttatgattagtatctcttacaaaatcaatgaattcataggcttcttttccaagtgttcctattccatatggtgatggaagagaacttatagccataagtattcctgcatttcttttaaaaacattgccccttctcatacaatctccattccgggtgcatataactgcactcattgtgttattagttattcttcatctgctcagtgaattccttaataccctgtgcttcttcttctgataatattttgttaatatcaagcagaataacaagtttattatctatacttgcaactctgtcaagatattctgtattctctgtttttgccagctttggcataagtgatatcttatctggctgaagttcacctatctctatgacctcatcaacctcaagtgcgatcttcatatctggaagatttactattactgtattgtcacctttagactgatcctccatgttgaacttttccttaagactcataactggaataacttcaccccttaaattcactataccacttatatacttcattgaattaggaaccggtacaacattaacctgcttttctattgactgtacaagattgatatctactccaaactcctgatctccaagtctaaatacaactggtctgatataatctgccataattgctcctttctgcttatatatgtaagttatgcttcttctccttctttcttacctgttgatatccagttaagatatgcattaataaatggatctatattgccatcaagaacgcttgcagcattgccaacatccttgttcgttctatgatctttaaccatagtgtacggctgaagtacataacttcgtatctgattaccaaaattaatatctttaacatcacctctgatatctgatgatttctgtgcattttcttcctgcttcatcatgtaaagctttgcctttaacatctgcatggctttgtctttgttctgatgctgcgacctttcgttctggcactggacaacaatacctgtaggaagatgtgtgattctgatagcagaagatgtcttgttgatatgctgtccaccagcaccacttgatctgtatgtatctattcttaaatcatcatcattgatctggacatctacgtcttcatctatatctggcataacatcacacgaaacaaacgaggtctgtctcttaccagctgcgttaaatggcgaaatacgtacaagtctgtgaacaccatgctctgattttaaatgtccatatgcattttctcctgatatctcaactgttacagacttaacaccagcttcatctccttcaagataatctattatctgtgttgtatatccatgcttttctgcccatcttgtatacatacgaagaagcatctgacaccagtcacagctttctgttccacctgctcctgcatgtaatgtaagtattgcatcacagctgtcatattcaccagaaagcaatgtttctatcctgatttcttccatcttttcctcaaacgaagtaacctcttgttctatctctgaaactagagattcatcgtcagattcatcagccatctctataagaacattaatatcctcaaggcctgactttaaagaatcatatccttcaaacgaatccttaagtcccttaagttccttcatagccttctgcgacttatctggatcatcccagaatccgggtgcctccatatcggcttcaagctcttctatacgcttctgcttattatcaaggtcaagcgacttttttataccttccagctgcttatcataacctgatattctatatctgaactgatctaactctaccacaatacactccaatctgtatatatcaacactacattatctatacttaatattagttctatataatctgcactttatcagcccggaagacacataaaaagaggatatccctctatgtattcttccaatcaatgatactatcatatcatataatcgcagaatttcatagtatgatatcctctgtctttttaaatcttttaaatatatattctatgcctttcttccgcagcagttcttatacttcttgccacttccacatgggcagagatcgtttggatatatcttcttgtctgtacgtttaacaggtccctttaccgatggtccttcatccttgtttgtacctgtaaccttagctacctgttctctttctaccttttcttcaacctggatatgcataaggagtcttactgtatcctctgtgatagcctgtgtcatctcatcgaacatatcatagcccatcatcttgtactgaacaacaggatccttctgtccatatgcctgaagtccgataccctgcttaagctgatccatatcatcgatatgatccatccactttctatctataaccttaagaagtactactcgctctatctctctgatagtttctggctctgggaacatagcttccttatcttcgtataacttaactgccttttccttaagcacatgagtaagttcattcttattcttaacattctcatcatatactactggttcaacagggatagttggaagaagaagctcgttaatctcatcatagttccactcatcagcattcttatcatcacttacgcagcgattaacaacaccttctacgaaatctgtaatcatcttcatgatagaagaacgcatgctctctccgttaagaactcttcttctctcaccatacatgatctctctctgctcattcataacctgatcatactcaagaagatggcatctgataccatagttgttagtttctatcttcttctgtgctgtctctatagcattgcttaacagcttgtgttctatctggtcattctcgcctacaccaagcttgttaaatgtattcataagagtttcctgtgcgaacaatctcataaggttatcttcaagtgagatatagaatcttgattcgcctggatcaccctgacggcctgcacggcctcgtaactggttatctatacgtcttgactcatgtctttctgtaccgataatcttaagtccgcctgccgctcttgcttcatcatcaagcttaatatctgtaccacggcctgccatgttagtagctatagtaactgctccatgcttacctgcctcagcaactatctgtgcttcaagctcatgatacttggcattaagtacattatgaggtatccctctcttcttaagcatatcacttaaaagctcagatgtatcaatgtttatagtaccaacaagtactggctgtcccttctcgtgggatcttacaacatcctcaataaccgcattgaacttacccttcatggtcttaaatactgcatcattgtgatctattctggcaactggcttgttagtaggaacttctacaacatccatgttataaatccctctgaattctttctcttctgtaagggctgtaccagtcatacctgccttcttatcaaacttgttaaagaagttctggaatgtgatagtagcaagagtcttgctttctctcttaaccttaacatgctccttagcctctatggcctggtgaagaccatctgaataacggcgtcctggcatgatacgtcctgtaaactcatctacgataagtacttcatcatctttaacaacataatccttatccctgaacataagataatgtgctcttaaagctaaagtaacattatgctgtatctcaaggttctctatatcagcatagttatctatgtggaagaactgttcaaccttgtggacaccttcttcagtaaggttaacaaccttatccttctcattaacgataaagtctccatcttcctctatctcttcctgcatcataacctgcatcttagttctttcaccatgatatgtacctttaacaagctgtcttgcaagcacatcacacagttcatataacttagtagactttccactctgtcctgaaataataagaggtgttcttgcctcatcaataagcactgaatcgacctcatcaataatacagtaatgaagatctctaagtacaagctgctccttgtatatagccatattatcacgaagataatcaaaaccaagttcattattagtaacatatgtaatatcacatgcatatgctgctcttctttcatcatccttcatatcgtgaagaacaatacctactgaaagaccaaggaaattatggatctgtcccatccattcagcatcacgctttgcaagataatcattaactgttactacaagtacacctttttcttcaagtgcattaagatatgctggaagtgtacataccaaagtcttaccttcacctgtacgcatctctgcgatacgtccctgatgaagaataataccaccaataatctgcactctgtaatgctccataccaagcactctcttgccagcctctcttactgttgcatatgcttcaggaagtatatcatcaagagtctcacccttagctaatctttccttgaattccttagtcttagctttaagttgctcatctgttaatttaccatattcttctctataactttctactttgtcagcaataggagctatcctttttaactcatgctggctgtgtgttccgaatattttatgaactaaacccatattactctccattcctgccagattctggcattttcaatttctttgtgcaaatcacaaaataagctgaaatcttttaaattgtatcactatttgtatatttaggcaataacagttatgtaagcaatgcctaaattttattaaaaacatataaaaaagattgtcgctttagctatattgttaaacatagtcaaaacgacaaccttaattaaatcactttataaaatcttttatgtactagtcaagctctggttcaataagtccgtatgtattgccttttctcttgtagacaacattaacttcctctgtttctgagttaaagaatacatagaagttatgtcctaaaagctccatctggacacatgcttcctcagggtccattggcttaatgccaaatctctttgttctgataatcttcacttcatctgttggttcataatcattatctataaactcctttgcaaatgctgcttcattctgatgtttatcgattatcttgttcttatacttcttaagctgtctttcgataacttcctcaacgaggtcgatagatacatacatatcactgctgacctgttcgcttcttataatgttaccctttacagggattgtaacctctatcttctgtctctccttctcgacacttaatgttacattcacttctgtttctggagcaaagaatctatccagctttcctaacttttcctccactgctgatcttaaaccttctgttacatcaatatttcttcctgtaataataaaacgcatgatgtccaactccttctatcactttattatcgtgttgctaacctttaaggattatataaggaatatagccaactaaatgtgcctcacgatttttgatactgttattataacacaattttacatttagacaagtatgttcacacaatttactctaattttataaagttattttacacttcacagtgatttaattttgtcaagtaagattatacatttttttaatattccttttattttcagtgcttttaacaaaacatgtattctgtttaatcttgtaaatccacagactgttttatacacttttttgtggatattgtggataacttagtgtataagtcaaaatgtggttaaaatcaaggtgttttgatgtggataacttcttgatttcttgtcaatttgtgtcgaataactttttaagattgtttcttttatgttttcatttgtaaatgatgcacaagatttaaaaagtcaaggttgttttatatatttttttgatatagaatctaggcaggtgttaactatatacttttttgttttaaacatctcataatcaatactttaacaaaatatggtttgctgatgatatattttatgtatattattttctcctgcaatccatattttatatattaaaaagacacggaggcagcatgaattcaagcttttataacaacaataatactattaacagattaaacctgattaattctgacaattttaattctgacaatcccaattctgaacgtacaaccataatcgttacaggcgcatcccgcggaataggaaaggctatagctacagctcttgcttcacctgctgctaatatagtcataagctgttctaaaagctcagatgagttaaaagaaacatatgatgccgtaacagccaggggagctttatgtacagcctatgtcggcgatatgggaagcttttcagatgtccaggaaatgtttgacttaactcttagcctctatggaaaaactgatgtacttataaacaatgctggaattgcatctatagggctttttcaggatatgacaccagatatgtggaataacatcatatccgtaaacctcaattcggtatataactgctgccactttgcagttaatgatatgcttcgccgtcactgtggcagaatcatcaacatatcatctgtctggggactgtatggtgcaagctgtgaggttgcatactctgcttccaagggagctgtcaattcatttacaaaggctcttgccaaagagctggcaccaagccatatacaggtaaatgccatagcctgtggtgccattgacacatctatgaacggacacttaagtaaagaagaactagatgaacttgcctgtgaaattcctgccgggacactgggaaaaccagaaggggttgcaagacttgtcaaactgatgcttgagtctgatgactacctcacaggacaagttatacaatatgatggtggatggatataaaataaaggtatgtataaaacaatataactttgttttatacataccttcattttattatagttttatatgcggcatgctccaaacacgccatcaaactcgttgaaataagtttcttccagcttctttaaaaatactgatgcgtatttatcacgatatgaaagtgatacataaagattaccgactgccgaatcaattatctgtatctttataagcaggttgttatctgctttccatgctcctgaagcaacgcatctgaaattgtatacaggaaatactgattctatattgtatccaaagccgaattttatgctgtgctttcctgtattgttagtatatgtgagtatgccatatctgctatcttcatcaacaatctcaacgcatatatccttcatattacattcgttatcatcgcatctatatgtaataccatttattatattctcatatgatgatgtaatgtctgtagaaagtgcgaaaatcttcctgctttcaagatattccacgtactgtttcttatcctcctgtgtttcaggctggactgttatgctatcgtcaagcttgttatatatttcttcccagaatgcatcatatatacactgtacaccaccctggcgtccctgtgtatctgctgttgtcaccatatatatatctttatccggcacatataacgcaagctggcctgccattccgtaaagggcataaccaccatttcttgtcatccatatcttatatccatatccctgcatttcctcaatagtgccactcttgccatatggatcactctgctttgtatgtgcttttctgatataatctgctggtataagctgctttccgttccatgcaccatcctttgatataagatatattactttaagcatatctgatggacgtgcacataaaccagaaccccccataggtactccatatgggtcatctattataaatgcctcctttgaaaatccaatctcatcaaggaagctttttcttagatactctaacagattcattcctgaaagcctttctataagcgctccaagaacatgtgtagatgatgtatcatatgaaaactgtgtacctggtgcatgaactggttttgttgtaaaaaatgaaccaacccagtcagtcactccctcacctttatatgttgtcttgtcatgacacgtgcgcatagtaagcatatctcttatggtaagcatacttgtatattcatatgccccttcttttggaagcttgtccttaaagtaatcaactatatggtcatctaaggataattttccctctccatacagctttcctatgccgagtgatacaagtgtctttgtcatagagaacatacgatgcaaagtatctttttcatatggtgcataataagtttccatacatatcttgtcacctctcatgattgtaagactatgcataggtatatcctgattctccagacgttttgcaaagttcataagattgtgatagtctatgttacattccgatggtgccacgtgcttaaataaatcactcataattactctcctatcctgcgaaaaatataatatttactatatcctttatactacagcttcaatacgaaagtatctacttaaaattatattcaataataatcttattacatatttttcacactgtttttctgtggttacgacattttaccaattacatctaatatatattttaccctgtttatgtagctgtgcttcttacttacaagttcatgtcctttagcagcaatctgccttcgtttatcttcgtgtaaaagataatactcggcttttttacagcagtcatacatatcctcataatacacaatactttcttcatttttaaaataatctgtaagttctatctgataattagtaagaagaaaacctcctgcaccaagtatatcccatacacgcagtggtatgccagtacggatatttcttatcgtcatattaaggttaatggatgaattattaaacacctttggcatatcattcatgtagtcaaccgtccctttaaaatccacgtttataagtgaagtatcctgctcatctgtatataaagcaactttgtttttctttgccagaaggttaagcgttcttacacgttctatattggcaagcttaaagccaagaaatgtagactcaaaaaccagccttatatcagaaaacgccctcttatcctgcctgaaatccacaaactctgataactgctttaatatatccactgtcaacagctcatcaattatattatctccgtatatattaagctgtgcaagcatagctgcatcaaaataaccccttaaatatggaggaagcttatcttttatatcatcatatgaattcttatgatacatactccctacaaatgatatatcagcactgaatcggtctttttcttccctggtctggctgttaagctggctgtttagcctgtctgtattcacagccagcggaagatagtatatattcttaactcccagctgctttaattcataataaaaaaacttatcaaatataaatatattgttgcagctgttaaatacagactgatgataaagcgatataagcggactatccactgtccatgccacatattttcttcctgtctgttcacatatatcagaaacgtgaggaaaataattaagtgaaaatatcacatcatattccctgaatacatcagcaagcattacataatcatgttcttttatgccagttatgctgtcacttgacagcggcttttcttcatacatatctactgaatgtccgaaatattcaaaagccgacttaacatctgcctgattaaacaccttccacttgtatataagaatattcataataatccccagttccttaaccaataaataatatgaagtcaaagatgaatttgaatttaatcaaacaactttccctactctcttgttgcagcttcaagtacctcgaaataattctcaaatgtttttgcacaacactcgtaatcatctattatgatgccatccaccttaagtccaataagtgcaaatgccatagccattctatgatctgaatatgtcttaactacaccaggctttacctttcctggtaaaatctcgattctgtccctgccctttttgatatctatgcaaagactgttaagctcattagcaacagcctcgattctgtcagattcctgaaatctgatatgttcgatatttcttatgatagtcggagtcttagcaaatggtgcaatagctgccagcgtcatggtctgatcagaaaaatcattcatatcaacatccacgccatcatattcaccttctgcaggtcccgtaacacttataccttcccgctcctctgtaactgtacagccaagctgctttaatacatcaagaaacttcatatctccctgcatagatgttcttcttacattctttacaaggcaatatccacctgtaagagccgctgctgcataaaaataacatgctgctgatacatccggttctatctggtatgatcctgcaacataactgtcatctgcaggtatcacatattcagcgccctcatggtctacttcacagccaaactgtctcatcatattggatgttattcttatatatgagccatctgtctttttacttgttatattaatcttcaagccactttcaagcataggcgctgtcatcataagtgcacttaagaactgtgtgctttcacttatatctatagatacctccgcctttggctttttaccaccaaaagctgctcctgttacttctactggaagatgtccctttttttcaaggaacttaaaatcagcacccatatctgtaagtgcttcaaacaacggaagcataggtctttttttcatctgttcagatgcttctattgtatattttccatctgatagtcctagcatagctgtaagaaatcttgctgctgttccagcacttcctacattaatagtgccttccttccttggaagatctccgccatgaccttctatgatcacatatttttcaacttcgttcacctggattatatatccaagcgatataagactcgtaagaaaatatcttgaatcatcactaaacaacactccgttaagcctgcactctccgttagataatgctgccataagaagcgccctgttagtgatacttttagatcctggcacctctacaacgcagttaattggcttatttaacttccttaccttatactgtgacatcttgattattacctctgttattatcttattagcagctttataaatgttgcaatatatgtaatgattcatacctgcaagtattgtacaaggcaacacttatactggctgctgcttctttctgctatagtataacaccactactgtacagcttaacaataaatattgctgtcatataattttcttatgttgtaaatatcgattcaattatacttaatatttttaagtgtaattgaatattcgcttattattattagtgtaacaaaagttgtaccacactgaatatttccctgatacagccctgtttttactatctatcttccatcttaggatagtctctgtgccatccaacatatttgtaagctggacgtataatcttaccagcattaacaagctcttcaagacgatgtgcacaccagcctgatatacgtgaagttgcaaacataggtgtgaacatttcttctggtattccaagcatagaatatacgaaaccactatagaaatccacattggcacatactggcttaaacatctttcttttctccataataagctgtccagcctctttttcaactgtctcataaagtgcatattccttctgcatgcccttctcatctgaaagcttctttgcgaaattcttaagaataacctctcttggatctgagtttgtgtatacagcatgtcccattccatatataagtccagcatggtcaaatgcttccttatcaagaatcttgttaagatagccgcatatctcttctttgttattccaatcactgcaatgttccttaatatcagcaaacatttcctgaacctttaagttggcaccaccatgcttaggacccttaagagatgcaatagaagctgccatagctgaatatgtatctgtaccagaggatgttacaacatggttagtaaatgttgagttgttaccaccaccatgctcagcatgaagcacaagacatatatcaagaacctctgcttcaagttctgtgaactgtccatcatctcttaacatataaagaatattctcagctgttgaataacctttcttaggattctttatcataagagttccatccagcttaaaatgtctgtatgactgataagcatataccgtaaggagcggcatcttagctataagctgaagtgactgcctgagtacattaggaatagatatatcatctggattctcatcatatgaataaagacttaatatactcttcataagagagttcataaggttagtacttgttgccttcatgatgacatcacggataaatgcccctgaaagctcctgaagatctgcaagtattcttaaaaagcttcctaactgcttttctgtaggaaggttaccaaataaaagcaggtatgtagtttcctcaaaacggaatctgtcctttgtacagccttttattatatcctcaacattgtagccctgaaaatataaacgtccatctacaggaatctttctaccattgacattctcgttaccacagacatctgatatctctgtaagacctgtaaggacaccattaccattactatctctaagacctcttttaacatcgtattctatatataaattctgatcaatagagccagatcttttacactccttaacaagctcttcaaactcgctcttatcaaccgttgtcagttccatcatttcctgattattcattgtaatcctccgtttctgcacatatatgtatgccatgatgtattaatatgcctgttgatagtcataccttaacattattcttaagtatatacatgtacacatagtatttatattcatatacaataatcacatactgcatatttatgcatagcgcatattgattattatgcactttaattatatctcttgtcaattaatacttatttgtccgtaaaacactatattaccctgtataaaaacatatcagtgaaacactacattcgcatctacaaaagcatctccaaaaaaatctctgtatacagtatccgttatcttatcaagctgtgatttatcctcaatctcatcgcctgcataaaatatcctgtattcattttcaaagaaatagcagcttgtgtcactaagattcattccattctttctataaaaacctattctttttaacatatagtcccttgcaggtccctcatcagcataatccggattctcaacttcaagtataagtaactttccatcatctttagcaagcttctttagctgctgtaaaaatcctgagccaaggtgctttgaacgcttatcttttacgattgcaagatagtcaagaagatatacatcctgatttctgcattttataaagtatgcatatcctgcaagctcatcatattttcttccacaggagtcttctctgttttcatacatgccataaacaaaatactggtcattctctcttttttcaagcatctgttttagtggcttaacttctgatgctggaaaatcagtcactatatgctcattgtatatttttttaatctcttcaatatctaacaatcttatattatatttttgagtattatatatatcgttatctggagtattgttatttatattattatagttcatattatcctgccctttcgtaattaatcatccgctaaactgcttattgttcatcatcttcgtctcttacggcaaaaaccgcagctgcaagctctttcaggtctttcgcagttccttcggtaaaaccatccttatttataacaagacaattatgtgctgaaacaaaaagatatatattatctttgtcctctgcccactttataacctcatcccacttgaaggtatcactgtcattctcttcatctgtaacaataatatcctctgaatctatctcatatgtgaatgttattcctatcattttagaatatgtattgtgatatcttcttttgttacttttatccattcctaccatacctatatacaggaatatggctgctgccaatccataaaacacaaccatgaaccagtcagcctcttctcttcccaatgcctggaatacaagatatcttacacatcccataccaaacagtaatccaaacatattataaactatcttaaaaaacttgtatttgttatcatcaaaattagcagcatgcatagccgcttcaacatattccttctggaataatgttttattttttatcaccatgactatctccattcctgttacactttataaccatattgcctgttacacttacagctatcctgctttgaccaccggcttcatatatgataatatgatatgataccagggtcaaaaggtctaaacccacatgagcttgctcataggtgggtgaaagaccttgggactcgccccgatatgagcataaaagtgggatgataatcccacgatatgcgaatattggggagaattgtgggagtgcgtagcacggagcaattcgtaggtatcaaagtcgggggcttttgaccctgatattttattattatactataaattcaaagcattgtaatgcacaaaataatatttttagtctgtgtccacgcgcatcatacacggcttattataaaaatgtgcgcagaaatgaggattaatatgaaaaaacgtactgcatgtataactggtgccagttccggcatcggatatgagatggctaaaaaactcagtgctcttggatatgatcttatccttgtagcccgcaatacaaaggctttaaaaaagcttgcttcatctcttgacactgattgtgaaatatacacctgtgacttatcagatggaaaaagctgcataaagcttggaagaaaactgtcaaaacgaagtgacatacacatatttataaacaatgccggattcggtgatattggtgattttgaaaaaacaagtatggcaaaagatatttcaatgataaatgttaatatacgggctatgcatattcttacaaaatatatgctccgttcatttaagaagctgaaccgtggttacatcatgaatgtcgcatcaagtgccggacttcttcctggtggaccatatatggcaacctattacgctacaaaaagctatgttacaagtcttacaacctcattaaatggagaacttaaggctgcacatagcaatgttcatatatgtatgctctgccctggacctgttgataccaactttaacaacacagcaggtgtggaatttgcactgccaggaatatctgctgaatattgtgcatcctatgcgcttttacagatgtttaaaggcagggttactatagtacctacatttacaatgaaggctgctgtaatagcctcaaagctggcaccacgcgagtttgcggctgccattgctgcaaaacagcagatgaaaaaaagaaaggatacacataaccgatgaaagtatatatggctcccatggaaggattaactgattatatgttcagaaatgcatatgataagttctttggtcataataagattgataaatattttatgcccttcatctctcctaataaaagtgaaaaatttcttgcaaaggaaatgagggacatatcaagagataataatcatattaactctatccctcaggttatgactaacaattcctcagattttatatggactgcccatatgctttatgatgaattcggatatgatgagattaatctcaatgcaggatgcccatctggaactgttgtttcaaagaacaagggagctggcatgcttatctgcctggattctcttgaacgcatattatatgaaatactgtctgacagatatatctgtgacaatcatattaaggtatctgttaaaacacgtattggtgtcgaaacacctgatacatggcatgatatacttgatatttataataagttccagcttgaggagcttatcatacacccaagaatacgtactgactattacagaggtgatataaacaaagaggctttcctgtatgctatgaaggaaagccgtaatccagtgtgctataatggcgatatttttacaagacgtgactttattaatatcatacatgactataatccagactgtataatggcaggaagaggtcttgttgctgatcctggacttatcaatgtccttttaagtgacaaccccgaaacatatgtaagaaatcttgaggatgacaggcttaatatgaagcatctgcatgatatggtatatgaagaacgtcttaaaatcatgtctggtgataaacatgccatacaccgcatgaaagaaatgtggtgttatatggaatattcattcgctgactgtaagaaagaagccaaagctatcaaaaaatcccagaatatgagtgtatataaagatgctgttaatgtattctttaccaactgccggcttgaagagaagccatacatatcattttcaaagaaattctgatagcaatactcattgctgctgatatggcagcagctttaaatgcccatattaaaaaattccatcaatgcctctatcatatatgtagtatctttaactcctgctgtttcatatgccgaatgcatggcaagctgtgcaagcccaatatctattgtattgatagatacatgtgagtcagatatgttaccaagtgttgaaccacctgctatatctgacctgtttgcatatgtctgatatgggacagcagcctttttgcagatgctcttaaacactgcagctgaaacagcatctgttgcgtacttctggttaccgttatacttaataacaattccaccattcatatatggtctgtttgttggatctgccttttcctgatgattaggatgtactgcatgtgcattatctgcagatatcataaacgatgatgcaagtgccatcatatattcttccctgtccatatctgatgctatgcttatacgttcaagtacatctgataaaaaagtggaatctgcaccctgttgtgttgtgcttccaacctcctcgttgttaaatatgcagcagacattaacgcaggaatcatttttttcctttttctcatttctgttaatataggcttctgtaaatgcctttactgatgagtatgcacactgtatatcatcaagtcttggagctgaaataaactcatcgttatacccccatatagtacccttttccctgttataaagaaaaagatctgttgatatatcatatgactcaagttctttaatacctataagcttcttaatgtattcatcaaacttcccactggcagcttcatcaccaaacaaaggaagcatatccttctgtgcattaaagctgtatccatcattaatctttctgtccatatgaatagcaagattcggaataacgacaagatccttgtctgcatttacaagatattccattatatttcttccatctgctgctatagcacggccagctattgaaagaggacggtcaagccatgttgacataatcattcctccatatttttccacattaagacttatataatgattatctcctggcatctgtgggttttcttttatcttaaaggatggtgaatcactatgacttgccacaatattatatgccttatatttatattccggcatagtaaaagcaattattgatgaggctcctcttaaaacataataaccctgtcctgctttaagcttccatttatccttttcacttaactcctgcatgccaatatcagacagcatacttcttatgttgtcaataacatggtatggacttggactcttctctatgaattcaataagttcatatgaatccttataataatccctcttatatttatcagctgctatactgctgccttcatgcccattcatcataataatctccattcttcctcttttataattatttttttcgtcttatatatcgtgttataaaataatatgcactaatggcagctattgcaatcactattatgatagctgcccttgctgcctcactgattccactaaaaagcactcttcttccaaacttaaaaccaggcttttcttcctgtctggcattatcattaactccttcaatgagttccccagacgatacactgactggattatttccctttgtttctgatatagcagaggcttcactgctctcatatggattatctactgtatatagctttctttcatagttttcaggcttaagcacctgtgtataatcatatatctcatttcttgtaaaattatctgtgttatcccttgatgttgtatacacattcattctttctcctgctaatgccctgcaatatgcccttctgtctgcattatcttcaaagaatgttatcatgccattaattgtattgcctgctatatcggcaacatagcttcctgatacaggatataatatataaagtcctgcaattccgccagagtgtacatagcctctttctgatatataaccatctatgtttactgtacagtccttaacatctatataaccatctgcatatatgccacccataaactgttcgtctctgtctgtaacatccgggtctgcatctgtacatacaagcgttacatctgatgtcgtattttctataagtccatttccaaagccggctatgcctgctgttccccacattttagaagctgaggtaagagctgcatacgaagcttccaccttacagttacttatagttgtattgttcatgtatcctgcaagtacagctgcaaatatacttttttgtgtctgttcctgctgttctccaagctctatatatgctcctgttatattaaggttacttataaccgctccatctgttattccaaaaaaacctgcaaaatatgtatcatattccttaagattgccatcatatgtcttagctgtaatatctgtaacagtatgtatgtccatattgtataaagtatgtccattaccatcaaatgtaccattaaaattccatggcttccagccatctgctcctgcccttgacatatctatgtcagacataagaatataacttccatctgtgtgagtggctgcttccaaaagatcgttatatgtctttatctgtaatgcctcactgcttttgtctgtaacattttcctgtgctgcatatgccttattcaccatagatactgatacacccggtattttccctgatatcaaagcattgcataatacaaatatagcagcggccacacatactattgttttctttataagactgtctgccttgttcttcatctttctttaatatcctcccattattcacttttgcttttcactttataattgtactacttttcacaattctgtcactactttttattcttttagctttgtcacttttagcactatcatttttaactctgtctcttttaactctgtcgtcataaaaaaataatacgaagaaatgttttgtataaaccaaacactccttcgtactattattttattattcctgtccaagcttatatttttcttcaaactcatctactggtataggttttgagaaataatatccctgaaacatcttacatcccatcatgctaagcatatcaagctggcttttcttttccacaccttctgttattaccttcattccaagcttattagccagttctattatactttcaagtatatcctggcccttgacttcattctctgaggcacgtaaaaagcccatatcaatcttaagtacatctgcacttatatccttcaacatattaagagaagaataaccacttccaaaatcatcaatctctatatcaaatccataatcctgaagcttcttaataataagtatattcttatcaaaatctgacataagtgctgtttctgtaatctcaagctttagaagtttcggacttatatcatatttttctacaaggcttgtaaatgtttcataaacatctataagataaaaatcttttgtagatatattaactgaaatatgatacttttcaataccacgcttcttccattcactaagctgtttagctgccttattccacatatatatgtcgagtctgtacacaaagccgtttttctctaatgcatctataaatatacctggcgaaagtaaccctctcttaggatgctgccatcttacaagtgcctctgctccatatggatatccctcatagtcaacctgtggctgcaaaaacataacaaactcttcattatcaagtgccctgtcaaactctcctatgatttttctttcctctaatgactttaacataagatgttctgtgtagtatgcaacattaatcttatattcatttcttatagtttcaccggcaaggtttgctttatcgcacataatactcacacgttcattaacatcctctatatcatacactcccgaaaatatatgcatatgaaacaaactatttttaaaagcatcccgtattccacttatagccttatcaataagtttctcatcaaatctgacctttggcatacacatggcaaaacggtctccacggagtcttgccgcaacaacttcttcatctacaaagtctttaatgtactccgcttgttttcttagtatttcatttcctttttccacaccaaacaattcattgacaaacttaaaatcttttatgttactgcatatgatacaatactttgtatctatgtgttcctttatcatcttagcagtttctatataaaactgttctttgtttaaaagacctgtcagcatatcatgtgttgccctgtacttttcatacttaagcagttcaacctcttcagtcctgtcattaaaaagaaaataatcacatacctggctttttttatcatcgtacgttcttttataggctatctcataataccgcttaccactatcgctgttaatagaagtctcaaacttcatactgtcttttctgttgtcacctattttctcaagccatgccatgtatttatgctccatgtgttcatagtcatagcctatattatactgctctcttaaaatatcattacaatagatacatttgccatgaatatcaaagcatacaataccactattcatatctttaataataagcgataatgtattctctataagctcattaggtatatagcttaatgtaagataatatataatcatggacataaagccatatatcagagttgaaatatcatatattgactgtgaccttaccgttgcaagatcaagaataaaaccgacaaataatgttataaatataacctcatatctgaagctgtaaaactttgatgcctttgctatcataaatataaatgatataaggataactactataacaatataattatacaaaaaatgcgcacgatagaaaaatccatctttgacatattctattattatatcactgttagttatttctgatatcgtaaataccttgtgtgtccatacgttagcaatcataacaaaagaatctactgctgaaaataatatcattactatctttactgcacggatttctttaaacaatcctgtataatactgcgtataatacataagcaaaatcacaagccagtcataacatgcaagctctgctcctttgcagagtgttgtcaccttaatatccggataaaaagcatataaccagaaaaatattccgcatacaaaagcaactgtctcataatacagaacaatttctgcaagctttcctttcttaccaaatgacttaaccgcacatattcccataagaacaatctctattataatcagaagactatacataaatttcataatgttcttctcccatttgtaaaaaattaaacacgttttttataataattattatacatatatatggaaatttttgcaatttttattcactttaaatttaataacgtatcaattcattaaatatctctattgcatatctgtccgtcataccagatatataatctataattgcctgggcatatataagttctgtttcaaacaatccatatattctgcggttcttatattcctcttttagccttccttccaaagcttcatcctgacaggtatccggatatagccttgaatatacatcattatatatctctgatggagtatcagaatatataagaagatgtttcacaaaatttttaataagctgtggatatgatttttttctctttaaaagcctgtatattgtgtttactccgtctgttgaatcataagattccataagtgtatcatatatgcttcttatgattaatgctgcatagttacgatatacattaaactttggattcatatatatagtttcatagttaaacttcttaatagaattgagcatttcgttgtgttcatcactaagtcttattcctgattccggtgtactgttagcacatatgctcgttataaaattatgtattataactgttgtatttattgtttttaccccatatgttctggatatttccataagtttttttatatctgaatcctctatgaactccatacggatggcatcttctatatcccttcccagataagctatcttatctgctatttttaccacacatccttcccatgtataagcctgatattgtcctgatattttaaatgtatcaagatctattttttcttttcttggcttgattccgttttcatcaacttcaccacaatgtgagattattccatcccttaccgcatatgtgagattaagattctggtagtttttattattatcctgaagtagttctatcttatctatcatccttaaactgtttctttcgtgccagaaggcatctagtccaagctcgttacgaatattggtaagttcaacttctccctcgtgtccgaatggagcgtgtccaagatcatgtcccatagcaatagctcttgtaagatcagtgtttaagccaaggaattttgagattgtacagcttaccgattcaacatgttgtacatgctccatacgtgtacatatatgatcattatctatattaaaaaatacctgtgttttatgcttcaatctacgatatgcaagtgaatgaagtatacgtgtgtaatcacgctcatattcagaacgtatatcatccttgcgcttatataatggtgcctgcctttctatgtgtctttcccagtctgcattgttttcgttggatgcataatctttaaatatatttctctccatacacacctcccaatgaacatattcactattttaaatttcacgattataatggataattttatattatggctattccaaaaatatgtcaaatacattttaacaattattttttagattgtatataaaatgtgccagagattaaatatataatctaatctctggcacataaacttaaagtttaaatatttttaatcaaagctgctttaattattctcataattaatgctttcattatccctcaatagcaattctttttgtagcttcaacctgcttagcttctttcttaggaatagaaagtcttagtataccactttcatacttagcctttatatcttcctgtgtaagagcatcaccaacatagaagcttctgctcatagcacctgcataacgctcttttctgatgtacttaccttctttattcttctcttccttatcaagtcccttagcagcacttattgaaagatatccgttatcaagctgtacatttatttcatccttcttaaatccaggtaaatcaatatctacttcataacctgaatcagtttccttaacatctgtcttcatctcatggctcgcatgcttaccatataaagctttgtcaacctctggaaatccaaagtccatccaatcatcgttaaataagttttctccaaaaatactaggcattaacataagtcatctctcctttttaataaactatctgttcggctgaacctttcgttcattcggacctgatataacaactctgtatcaaatccaaaggattacatattcatctgaactattaccttgttttttggaacatcaggtaaaggatattaactattcaatctcttaattctttaactcctcttcctttgttctgactatgttatagtctttattgttagcaatgtaaagaggtgagtgctaaagtttataatttgttaataattaagatgccagtggtacatgtttatacaagcagctttgtatatgctgatttatatacggcagttcacatcagctgtatattgtggtatgcttttatcaaaatcgtgtttttttgaccaagacatatatttctattcatctagggatttgatgcctgtatgctgccagtcaggccaatggcagcagatttccacatatggcagatgggggactttaattatgaaaaatatcaaacaagtgaaaacagttataatatcaataattatggttattatagcatatggaattatgcaatatatgggaataacctgccctataaaatatataacaggcatatcctgtgctggctgcggtatgacacgggcgtggattgctttacttcattttgatattaataccgcatttatgtaccatccactttttttccttccaccagttgcacttataatattcctgctaagaaaaaagcttaacaaaaagctgtattatacgctttttgcaatcattcttgccgcatttataattgtatacatatatagactatttaactgccacgatggtattgttgtattcgagcctcagaataacataatacaccgcatatttgataagatagcaattaaaaagcagacagcactttttaactaatgtgatatgtacccaaaatcctggacacatatttataagttaggcggacatcatggatgcttctctgtattttactggaagcatccattctgtttttacctgaatccttttgttattataataatcaatatattcatctatagcaactgcaaattcttcaaaggatgcatagtctttttcgaatccataatacatttctgtttttattcttccaaagaatgtttccatgatgcagttatcgtaacaattcccttttctagacatagattgaattattccgtgttcctgtagccgttttcgaaaataaacatgttgatattgccatccttggtctgaatggaaatcaaaccgtttacagacgaaaacttat

SEQ ID NO: 338 - DNA, 217 bp, Unknown
  gut microbiota DNA sequence
agatgagtatgcgcaattatagtatatatacattaaaaacaaaactagaattcaccaatttgtatcaatatctcagtgaaaaagattataaacaacttgagcaacagatattatgtcattcctatcacacccccatctgcacatggaatggtattgtcattaatggtatagaagcatatgaattatttcgtaaacacagtattcctttccgaataaa

SEQ ID NO: 339 - DNA, 429 bp, Unknown
  gut microbiota DNA sequence
gtaattcccttttcatatcatgataactgagatgttctatcttttcggcaagaaggtagttatttagacttaaaagctgctcttttgataatcctgaaagttcaataatattagcttgggaaatccaaagctgaccagaacgaactcgtttgacaagatccggaactttttcatcaattatatctagtgcactactgtaagcagaatatttgtaaacggtagccattgctacattacattcttcggatattttttttgctgcgatgcttgcaccggaaatatgagatttattcgtagatgaaagttgtcttgaaactaaaattttttcagcatcatattttttcccaatcaggtattttttattgatattggttaaatcctctcgtttaagttggtcagtacatatccatgaaattacatcttctttac

SEQ ID NO: 340 - DNA, 201 bp, Unknown
  gut microbiota DNA sequence
ttttcccaatcaggtattttttattgatattggttaaatcctctcgtttaagttggtcagtacatatccatgaaattacatcttctttactggaaaaatggagtctttttattcggaaaggaatactgtgtttacgaaataattcatatgcttctataccattaatgacaataccattccatgtgcagatgggggtgtgat

SEQ ID NO: 341 - DNA, 25048 bp, Unknown
  gut microbiota DNA sequence
ctcctgttgccacaattacttcatcgaatgaattataatcttgggatgtgaattcctgaccaagtctgaaagtaacatctaattcaggaagtacatttgtataataattaatgcttctcatcatttcttcttttcttggaggtacactagcaataagtaactgaccaccaatctgaagtgatttctcaaatatagttacatgatgtcctcttaatgcggaaacacgtgcagcttcaagtccagcaataccagcaccaataattgctatattctttgttgatgctgcaggagtaatctgacgagatccttcgtaaccattttcagcattaagtacacaacttaagaaagcacgattctgaatattatctgtacatcctttattacacatcatacatgttctgacattacagcaatgtccatctgcacatttgtttgcaaagtcagggtctgtgagaagagaacgacctaatccaataatatcagcagaaccatttgcaataactgcttcggcagcttctggtgtaacgatacggcctactacagatacaggaatagatacaagctctttgatttttttagaataagaaaccataaatccgtatggctgtgttcccatggcagggattgtatcacccatatttccagtatggttagcctgtgcaacatgtaatgtgtcaacaccgcaagcttctaattctttagcaaaaatgcaagcttcatcaagtggaagaccaccttttcctctaaaactattttctccaagaggagtaactataggaagcttgtagtcgataaccatgtcaggtacgattgtttttaatctttttacaagtgttaatgcaaaacgtgtacgattagccaggtcaccgccatattcatcagttctatgatttaaaataggagagcaaagagaaccaacaagacggtctccatgtacttcaatacaatcaacaccagcttcgtgtgctaagatagcacagttttccatatgctttattatttcatcaagttcttctgcagtaacttcatttacaaagtgctgcatatcatggtgaagtttagctcttgcttcctgcattttgccctgatgaaacaaatcgtttaaagctttaacattgtagtcaggatggaataactgaattccaagttttgcgccattttcatgacatgcgtcagcaagtcttttgaagctttgaacctgctcaggtgaataaagctttggtgtaggagagaatgttggaagtggtgcaacatctccaattactatatatccgacaccgccttttgcgagacgctcgtaaaaacgaaaactttgttctccaattgaaccatctttttcctcatatcctgttgtaagtggtgggaacataatacggtttttaaactcaatatttccaacttttatagactctaataatttcattgttcatacttcctttcaaattgaatatactatttaagtggtgttaaaaactctaacattaatttgtctaattctgctcttgcaaaagcactggcaaaattgtggttagccccttcaattgttttataattgcattttccattgtaaagtgactcatatctatggcatgttgcatcatctaccaaatcatctgcagttcctcttataaggaggactggtccgttgtatccttctgctgacgagaatggctcataattaaataaatcataattaaaagatgttgggaaagtgagtccttcaatatcggccttggtgatccccttagcttccatggcttcagcacgatccttacatccaaaccacattccagcacctggacacataagcatgagagcataaggattaacaataggagcggcagtagcagctgcgtatcctcccatactctgaccagataagataatcttatctggattggcaaaatcttgtgttttagtccagtttataatatcctcgatatcgtgtaggatacctgtaaaggtcatgtcctcgaattcaccatcactttcaccatttccgtataaatcaaaacggacactggcaaatccatgttcagctaataatctggctgtgtgcgtataaatacttttgtaaccgcttttattccctgtaaagccatgtacatttacaatagcaggaaatcttgtgccatcttctggaatgttaactattccgcgtaagatgtgtccatcacggtttgtgatttctacttgttttgtcattttaaaatacctcaatttctaattttattctgcagtagtagcatttcgcttgtcagctaaatcctgtaacatttcagctgttttctcttttgtaagagggtagataaattttaataccagaacagctaataaatatcctacaacatataaacctgtatatgttttccaaagatgtcctgagaatgcttcattctggacagcttcattaacctggaatccagcaattgcaagtgcaaaactactcatacttcctgatacagcattagcaagtttacggaagaatgtatatgccgaatatacaattccttcattacgttttcctgtctgaagttcttgataatcaattgcatcatttacaagtgcccaaactaatacttggaaaccacttactccaagatagcagattccgttgatgataataaagagcaaaggattttcaagtgggaagaagaataaaatagcataaacaacaactgagaaagttgcactgtacataatccattctttctttccaaatttcttagcaacaaattttgtgcctacgaatgcaataagtgaccagagtacacttaacatacctgaaactgccatgatggcaacatttccaaaataatcgcggaataaataagtatttaatccgttaaccatacctgctccaacaataccgataaagcttgataacataactccgagtaatgctttgtttttagtaatatctttaattacctggaagtagttaaacttttcttttttctcaacaactggctctgtaataatacgctctttacaccaatgagatgtaaacataagacagattaatccaataactgcacagattgctgacataataaggaaatggctaggtactggctggttatctttatataagaataatggtccagcaataacgataactgtcataaaaattgtaccgccaagacttctgaaacgagaaaggtcagtacgttggttaacatcatcagtcattacacttgaaagactaccaaatggaacgttgacacatgtgtacataatttcgtaaacaatatatgtaatgaacatataagcaatacgtgcaccataagcgaaattgcttacgttaacaaatcctaatatacagagtactgcagttggaaaagcaaagaatttaatccaaggaataaattttccttttcctttgtttttgtggctatcaacaagtgcaccaattaaagggtcatttatagcatcccaaaactttgtaataagcataaggattcctacgtgtactggattaacttttaataccagtgtataaaaaatagcaagatacatggcacggaactgctcagtacagcaacatcccaaatcgccaagagtgtaaccaattttgtccttcatggaaaaaggtcttgtttctttcataataatttacctccaaacatttatattgttttagtagctacaatcttattatattggggttatgctgatatccatatacaaatattgcttgcaaactacgaaaaattgatatattgtatattttgacgaaattaacaaaaaatataataggaaagtgtacaaaatagacatatgaaaaatcaaggctacaaaatggaatatttgaaaatattggatagtacccagcgaagctttgggcaaaagaagatctatacaattgtatttatagctggtgggatagggtatatgcaccaggaggacgataatattgtatgtactatggaggatttgatatttattaagccaggtaataaagtaaagcttgaatatcgtaaaaataagtatcctcttgaagtttatgttctttatataggtggagaacttttaaggaaattgtcagatgaagaaacaagacttgatgaagcgtttgattttgttccgtatcaagttaagattgttcattctgagactgaatcggctatgcttataaagaatatatcaaaaaagctctattcgatgaataatgagtcacctaaatttgcccgctcattatacgagaaaagcctattaactatgattcttgtacttgcacttcgctcatctgttcaggaggatgtacagattaagacgaataagaaaaaacacggtgtaatggatgatatttttatttatatcagagaacatttgacagaagatatctcgttggagtgcttggaaaatgaatttcatataagccgttatcatatagtaagagagtttaaaaaattgacaggtgagacacctcattcatacattgtaaagagcaaacttgatttatgccgccattatatagagcaggggaaaagtattcatgaggtatatgagcttggtggatttggagggtataatcatttttttagagcatttaagaaagaatatggtgttactccaatgcaatattacaaagatttaaagattgacaggaatgaaaagtaatgattgtgtttgtagaataaagcaaataaggggctatcgctttaacgatttcttagtgcgacagcccccacgagggtttagaccttttgaccatggtatcataagatagtattttgattaaaatatagtgagaggtaaaagagtatgcagtataaactttataatgacgattttgatataataattgattcaaaaggatgtgagataatatctgtagtaagaaagcaggattcaaagcagtatatatggaacggcaatccggatgcatggaaaagacatacaccagttctttttccacttgtaggaagatataagaatgatacttctgtatataaaggaaaagagtatcatatgacacagcatggctttgcaagagattctgaattcacattggttcataaggaagataatgtgataataatgagtcttacatcaagtgaagcaacaaagcaaaagtatccttttgattttgaactgatgataactcatagacttagtggaaataatataagcacaatatgggaagtaaagaatactggtgatgatgttatgtattttagtataggtggacatccggcatttgtatgtggtgataatgctataggagcacagttaaggtttggcactgataatgataatgtggcttacaagctgttatcagaggatggacttcttatgccagaggaacattatctcacgcttgtaaacaacaatgttacaatcacaaaggagttttttgataaagatgctcttattgttgaaaacagtgggattaagaaagtaagcttaagtaaggattgtgaaccagttgtagaagttatgtttaatgctcctgttttcggactatggtcagcagcaggaaaaggagtacctttcgtgtgtatagaaccatggtacggaagaacagatgccatagattcagacggcagtcttgataccagagaatggggcaatgagctggcaggaggtgaaacatttacagggggatatagatgtaagtttctataatgtatatttaatgataccagggtcaaaaggtctaaacccacatgagcttgccaaatagttataataagcaatcaatccccaatctgccgcccggttccatccatatggaagttttcacggatgataagctgtgatactggaacaatctcatatccttgttcttcaaggcttgtgagtactgtatcaagggcttcggcagtgaatttcgcaccattatgcataagaattatagaaccgttaccaagagctttatgtctggtgacggtttttattatgctgtcaacaccgtagtctttccagtcaagggagtctacatcccactgcacaggatagtggttacagccgtatacggtgttgataagcagtgaattatagtcaccataaggtggtctgaatagaaagcagtcatatcctgtaagttctttgattttattatcaactgcggttatttcttctttctgttcagaggcattcagtttgctcatttccttatgattctcgctatgattgccaaggtcgtgacctctgttatatatttctttaaccatatcaggatatgtagaaacccagccgcctgtcataaaaaatgttgtcttgacattgtgcttatcaagaatatcaagcagctttatcgtatcatcagcaccccaggcggcatcgaatgatatagatatctttttttcatcagtctgtatacagtatataggaagtgctttcttgccagcgacacagtttcctttgatagaacccccattaataccatccgaaccagagttataactagaattagaaccagaatccgaactagaattggaatcagaacccgaaccagaatccgagtaaacagcttttttagaactggcagcagtgtctttagggttaaagcttgcgtagataaaaaaagcaaaggcaagcatgagaagtatggaagataagagtacagacagcttaaggtgagttatatttttaatattgctgacagcattgctgctgtttttgcgattgattatattcataaggtttctccgttatataaaatgacatatataattggtataatatatgcacatataatggataataattacttaataatattagtttttttagaaagtatgtatacaagtaaatgtattctgtagtatatttatcttagtatgtgtgagtacagcaggaaaggatggttactatatgaaatatactaagcaggatatatttagaatggtagaggaagaggacgttgagtttatcagacttcagttcacagatatgtttggagtgctaaagaatgtggctattacttcaagccagcttggcaaagcactggataacaaatgtatgtttgatggttcttcagtagagggcttcgtaaggatagaagagtctgatatgtatctataccctgattatgatacatttgaaatatttccatggagaccacaacagggaaaggttgcaagacttatatgcgatgtatatacaccaaatggtaagccattcgagggtgatccaagatggatacttaagaaagtgattaatgaagctaaggatatgggatatatattcgaggttggaccggaatgtgagtttttccttttccatacagatgataatggacttccaacaacactttctcatgaaaaggcaggttattttgatttaggacctacagaccttggagagaatgtaagacgtgatatggtgcttactcttgaagatatgggctttgagatagaggcttcccatcatgaggttgcaccagcacagcatgagatagatttcagatatgatgaagctttaaagacagcagataatattatgacattcaagcttacagtaaagactattgctaaaagacatgggttgcatgcaacatttatgcctaagccaaagtatggtattaacggctctggaatgcatgttaatatgtctcttgctacagaggatggaaagaatatatttgcagatgatagtgataagcttggattatcagaggatgcatatcatttcatagcgggtgtcatgaagcacgcaaagggtatgacagctattactaatccacttgttaactcatataagagacttgtgccaggttatgaagcacctgtatatatagcatggtcatcaactaacagaagtccacttataagaataccagcatcaagaggaaatggaacaagagtggagcttagaaaccctgatccttcggctaatccataccttgtacttgctacatgtcttgcggcaggtcttgatggtattaagaataagctggaggttccagccagcgttgactgcaatatatttgagatgacagaagaggaaagaaaagcggcgggaatagaaatactgccagataatctttatgatgcaataaagtatcttaatgaggataagtttatatgtggtgttcttggagagcatattacaacaaagtatacggaagccaagctaaaggaatgggatgattacaagactcaggttacgcagtgggagcttgatgaatatctttataagttttaatatacgaggttagaatatgtctacattgattgttgcatttccgaagatagaggaggcaagggctgtaagaagtctcctggttcgtaagggatatgatgtggcagttccttgtacaagtggggcacaggttatcaatcaggcagatgcattgtctgacggcatcattataagtggttataagctttcagataatatgatttattcagaattatgcgaatataaacctaaaagctttgaactgctgctcgttgcatcacagaatctgtgggaggactgtcaggatagcaatgttgtatgtgtagctatgcctatcaaggtaaatgatctgttatctaccatagagattatgctgcagtctcagataagaaaaagaagaaaggctcgtacaacaccaaggcagagaagccccaaagaacagaaaataattgataacgcaaagcatctgcttatggaaagaaataatatgacagagcaggatgcgttcaggtatatccagaagtgtagtatggatagcggcaatactatggttgagtcagcaacgatggtgttaagtatatatgcagatgtgtagggacagaagagtagttaaggtatacatcagtaaggcattgaatacctcctgaggctgacattacagcagaatatagaaatattatattaggtgtgagaagaattatactcaataggataatcattttcacataaagaaatggagattgatatgaagtttacaaagatgcagggtgcaggcaatgattatgtatatgtggattgcactaagttgcctctggcaaacccatcagaggtggctgtaagggtaagtgacagacattttggaataggttctgatggacttatacttataaagccatctgataaggcagacttttttatggagatgtataatgcagatggttcacagggacagatgtgtggaaatggaataagatgtgtaggaaagtacgtatatgacaatggccttacagataagacaacagtcaatgtagagacattggcaggtattaagatacttaagttaaatgttggagatgatggcaaggtagcttctgtagtagttaatatgggaaaacctgaacttgaggcttcaaaggtgcctgtagatgttaatgctttagtagaatataaggcagcttacaggaatacatataagaatgatgccaaactgtgtccgcttgctgttaaagcacttgataatgtggaaaatgcagttattaatgaagcaatactggtggatggaaaatcatatgatataacaggtgtatctatgggcaacccacatgatattgtatatcttgataacgatatagatataacaaaattcgatatagaaaaggttggaccatactttgagaatcataaggcatttccagaaagaatcaatacagagttcgtacaggtattagacagaaagactcttaacatgagagtgtgggagagaggttctggtgagacattcgcatgtggaacaggaacatgcgcgacagttgttgctacagttcttaatggtatgtgtgacagtaaggatgtaacagttcaccttctaggaggagaccttaagataacatgggatgaagaaagcggggatgtatatatggaaggtccggcagctaccgtgtttacaggagagattgaattgtagttaaataaaatgatacatttcagatactggcagaataatggtctgtaaaggagaaagagatatgatgacagatatgaatatgaacgaattccttaatgtgctttcatcaaaggaaccagttccaggaggaggcggtgcatgtggttatgttgcagcagttggcatgtcacttggtaacatggttcttgcacttacaacaggaaagaaaaaatatgccgaatatcaggatgaaattgaaaaacttatagtacgtgcaaatgacctgactaaagaactggcagaatgtatggataaggatgccaaagctttcaagcctttatcggaggcgtatggtcttcctaaagatactgatgagcagttaaagcatcgtgaagaggttatggaaagagcgcttatagcagcaagtgaagcaccactttcaatgatggaggttatagttgaagctattggacttatagacaggatatctgttattggaagcaggttagctataagtgatgcgggagtaggtgtacagatgtgtaaggcagcactcaacggagcttcacttaatgtatacataaacacaaaacttatgaaggacactgatgtggcagatgatatgaataccagggcagatgaacttatcatcagaggtaatcagatggcagatgaggtgtatgacagagttatggattgtgtgagatagccagacatatacttttcttgcgccattaacgaacgaacagccatgcgaagcagggcgagatagcgcacagcgcgggttcgtgagtgtatgggttgagaaagagtaaattaagatattatcacaacaaaataaaatatatggagataaataatatggagatattaaaaggacttccagtagctaatgccattaatgaaaagcttatggaacaggttaaaagtatagaaggtccgcttccacatcttgctattataagggttggtgaaagaccagatgactgctcatatgaaagaggagctgttaaaaagatggataaggtaggagtcagatgtacaacatatacatttgatgctgatatagataatgagacttttcaggctgagttcgataagattaacgagaatcctgacatagatggtattcttatgttaagaccacttccaaagcagcttgatgaaaagcagattgaaaacaaaatagatccaagaaaagatcttgatggaatatcacctcttaacttagctaaggtatatgctggtgatgagagtggatatgcaccatgtacagcagaggcagtcattgagatgttggattatgctggtattgatataaagggtaaaagggtaacagttgtaggaagaagtcttgttataggaaaacctgtttctatgcttcttatgaagcgcaatgcaacagttacagtatgtcatacaaagacagttgacatggaaggtacatgtaagaacgctgagatacttgttgcggcagcaggttctgcacgcatgattaagaaggattatgtagctgagggtgccattgtagttgatgttggcattaatgtagatgaggaaggaaatctgtgtggagatgttgattttgacactatcacagatattgcagcaattgcaacacctgttccaggtggagttggttcagttactacatctgtgcttgcaaagcatcttgttaaggcagctatggcacgttagttgtatgtatgagttgtgcagaatatagcgatgaatattgtgcagaatatcatacggaatatatgtatgtcgaatatacaaaagttaatattggaggttttgttttgaaagaaagagaaacgtttggatcgcgactaggtttcatccttgtgtcagccgggtgcgcagtagggcttggcaatgtatggaagtttccatacatatgtggaattaacggaggagcagcatttgtactgatatatcttgtgttccttgctattctaggttttcctattgtgtgtgctgagtttacggtaggacgaggaagtggaaagggtgcagccagagcatatgaggtactagagaaaaaaggcagcaagtggcattattttaagtgggtatcagtagttggaagttatattcttatggctttctatactatggtagccggatggatgctttattatgcattcaaggaagcaagcggtgcgcttacaagtgtcagctcagagcagataaccgcggagtttggcaatatgttaggtgatcctggagtcatgattgtatggatgatgatagcgatattgttgtcctttggtgtatgtgcacttggactggaaaagggtattgaaaagataacaaaggtaatgatgacatgtcttatagtgcttattattgttcttgcgatacattcgcttgttttaccaggtgcatctgagggtgttaagttttatcttgttcctaatcttgatactattaaggcaagaggtataggccctgttatatttgatgccatgacacatgcattttttacacttagtgtaggtattggtgctatggagatcttcggaagctacatgaagaaggatagaaccataggtggcgaagctgtcagcatagtagtacttgatacattcgttgcacttatggctgggtttattattataccagcatgtttttcatttggcgtacagcctgatgcaggtccttcactgctttttaagacactgccgaatgtgtttaacagcatggctggtggaagagtatggggaacagcattctttatatttatgtcgtttgcggcgctttcaacggttatagctgtattcgagaatattatttcgttttacatagaccttaaggggtattcaagaaaaaatgtcgtgttgtggaatattgtgtttatgtcattgctttcacttccagcagtattaggttttaatgtgctttcaggttttgaaccacttggtccaggaactggtattatggatcttgaagacttccttgtatcgtataatcttcttccacttggaagtatgatattcgtgttattctgtacaaagaagaatggctggggctgggaaggcttcagacaggaagctaatacaggtaagggcataaagttccctgaatgtttcagattctatatgagttatatacttccggcgattattgtaattgtatatcttaagggatattacgatacattcgcaaagcttggaacatcatatcttgtaggatggatgatattcgcatgcatattgttatgtgcgatatttggtattgctaattataagaaaaaatagattgtaaaaagatgtcggattaagttattaaaccccggtcacagatgcttagtgcatatgtggctggggtttaacaatttttaatacgataatatttataatctgtatattaagagtatttttcaagctcttttatataagatgagctgtttgttgatgaagtatatacctgattgtttaaaaagtaatccagagcagctcttctacattcctcgatatgagttctcatggcagcctcagcttcagcatatttatcgttaatcagcaagttaaggatttccatatgttcatgcttggcatcatgtatatgagcctgattctgtttacttgaaattattatccttgtattttcctcaaaaacgcgctgcatcatgtcaattatatatttgtttccacaatgttcaataataaaaagatgcatagcagtatcaaggcggaagctgttatgtatatctgtaacaggttcttcgaacttttgacagaatagggtaagcccttccttaggaagatggggagcagcaagcttaagagatattggttcgatttctagtcgtgtctggaaaacctgtattacatcattgaaagttatattagtaacgtatataccttttttaggcagaatttggacaaagccttccatttcaagcttgcttatggcttctcttattggtgtacggctgagattaagatcagcagcaagttgtgcttcgttaataagagatccaggtgggtatacacaatcaaccattctttcttttagcgtgaggtatgtttgttcttttaatccctttttggacatattttctgtatttgccataataattctccgtttctacgtagatttttctctattcatgttttacgtttaatataaatgcatgttagagaatgataatgtgttaaaatacacattattgttttataatgtatcgcgtttaataactgatgtatacatctattatattacactaatataagctgattagcaacagataaattgttaaaacatttagaaaaaagctggtgaggtagctaaagaattgatgtgtatctaaaaaataatgtttatttttatggattttaatataattcgaaaaggacacttatatgaaattacatgtaaaatcaaaacaatgtattggcgaaaatgcacaaaaatataatgaaaaaattatagaaaattaagcattgcgcaaacttaaataactgttgtatactacagttacacaagaggtatgcaaataatgcaagtaataataagcgcgcatattatgaaagcatggatttagcatttcttaatcaatgacagatttgtataaaagtatttagtacagatccaatagcgtgtaaatataatcaatcatacgctataagattaaaaggaaattgtaggaggacaatcatatggatatgataatcattctcgtaggacttgcattgttactagtccttacattaaagaaagtgccggttgtatatgcagcggcaatcagtgttatatttatagcacttttcagcagacttccagttgtatcaactatgacaggtgattatatgactggatttgcaaactttgttaaatcatcatggcttatgctgttgttaggtgccattctttcaaaggtcatggatattacaggagcagcaaggtcaatagcttcatttattattggtaagcttggtgttaagtttgccataccagctatcgtaatcgctggtggacttttaacttatggtggtgtatctgctatggtttcatgttttgccctttatccaatcacacttgcggtattcagggaagctgatatgccaagaaaacttatacctgcaacaattggtgctggtattttcacatgggtaacaatgttaccgggtaatcctcaggtgcagaatattattccatcatcatttcttccaactaatgctatggcagctccagtagttggcgttgtatgtggtgtttttacacttgcacttattctggtttatcttatgtgggagtcaaacagggccaggaaaaatggagaaggctttattgttgatgaagaaacatccaaagttcttgcaaagacagatgagatggaagcaaatggaaagctgcctaatgtagtacttgctattcttcctatcgtatgtgtagcagttgtactgaatgtattaaagcaggatatatcagttgcacttttatcaggaattgttctttgctgtatattattctttaagaatattacaggagtacagaagctgcttacagatgcagtcagcagtgcagcagttacaactatcaatgcatcagctatagtagccataggttcagtggttaaagcagcaccgggatttaaccagattgttaatggaattcttaactttagtacatcaggtggtaatccacttattatatttggtattgctactacattattatgtggacttaatgcatcaggtatgggaggactttcaacaacactttcagtacttgcagaaccatttatggctatgggagttaatccagctataatgcacagaataggtgttattgcatctgtaggtcttgacagtcttcctcatagcggcggtatcgttgcagtccttgctatatcaggagtttcatacaaggaaggctataaatatttattcgtagtaacagttgttattacattacttgcactcgcacttgccttagtacttggcaacattatgtatcctatagcagcttaaagtgttataaaatatcagtaaaaaactataaacatatcagcagaaaggaataaagaattatgaaagaagagtatattaagaaagaaacaacatcatttaaggaattagtaaaaaacgagcagatctttgcaccatgtgtatgggactgtagaactgcaagagcagcggaactcacgggctttaaggcacttatgttaagtggtggacagcttgcagaaagtgttgcaggtcttccggatattggtcttataacagcagatgaccttgtacagtcaacagaaagaatatgtaactattcatcacttccacttatagtagatgcagatgatggattcggagatactccacttactacatatagacttataaaaagacttataaatgcaggagcaaaaggctgtactatcgatgatacaacaggcatcagaggctggaacagatggggttttgcaatgatgaacggatataaggatggagatatcaagcatgaagttgtttcaagagaaaaatggcttgcaaaagttgcagcaagtcttgaggctgcaaagggaacagatttcttagttatagcacgtacagaatgtaagcttgaatatggtatagatgaggctattgaaagatgtaaggctgctgaggctatggcaaaggatatgggtgttgatgttatgacacttattattggtcttaagactatagaggaagctgaaaaggtaagtaaggaagttaagggctggaagatgtggccggatgttatgagtaagaatggcaaggcagatattaaccttgatgatgttattccttatggatttaactttgtaacatgtcacgtatttgagaaagcatctatgtttggtatgtatgtatatggtaaggaaactttaaaagaccgcaatactgtattccatgatgaacacgatatgggtggcatgccaaaagaagatatgccaaagtggattgacatggggcttaactactatattggaatagaagaagaattcaatgatatggctaagaaatataataaataatattcccccaatagatacagtaaattaataaggtgtataagtgtattgataaaaatatagtaagaaaatactgtcagagcagatgtctatgctatgtaatgttgattatataaacatgagtctgcactgacaggaaaggagatatgtatggttcgtaaaagagatgataaaatatatgataaaaaaccgagtcccttcaatggaactggagaaatacttgtaagaagtcttcttaatggagaggatgagatgtataaaacaggcagagtatttgtacatacaacagtatatccaggttctgctataggataccatatccataatggtgagtcagaaacctattatatattaagcggtacagcaaagtataatgataatggtgttataaagacagttacagctggagatgttacatttacaggttcaggtgaaggtcatggaatagaggcgataggtaacgagcctgttgagatgattgctcttatcttatatgataaaagataagaaggtttgattaatatgctgataacttcaaggcttatcagaagatttgcccataatacagaaccctccataatataaaccctgatatatgttgatttaaggttctgtgaagttattaaaccctgctatagttgattagttgtaatcactatagcagggattttttagtatatgcttttaatatattgcatttagtatattgttatcagtttattatagtatcagtaaacagtacataagcgctatattgaaaataagcataatgcgtggaataattggcagtatacaattaaccagcaataaatctcataagaagttcaactatgaatacagcagcacagctaaacatagcaacctgaaaaagactttttctcatccaggcaagtacaatagctatcacaaatgcaatagcggcggatataacactgtttgtagattcaagtatggcaggaaacgtcataactgccagtgttacataaggtacataatacaggaaagacttgatggttgtattcttgatttcttttctgataagtgtaagcggcagtgttcggataaggtatgttacagctgccattataagtatgtatatataagtattatgtaaaagcatttattttagctcctttagttttaacattcgttttctttaacaggaaacaatacagcagccgctagtgaaataactactgtaagaataataatacgtgttccagatgatatcaaactgacaataggtgcataagagaatatgcagcttataatcatagatatagcaacaacgcaagctacaattttgttctttcttgctggtggaatgatgatagcaataaacattccatatagtccgacacttagcgcacttacgatgcttgctggaagtatgtttccaaaaagtacaccaaagtaggttccaagtacccaggctggggatgcaacaagcaccataccatacatataggctggattaagcttttcaggaacagatacacataatccaaatatttcatcagtaacaaaaagtcccatgatcagtctgtgaaaaaaaggcattttgttgtcaagcttctggcttaacgcacacgacataagaaagtatcgtgcattgattataagctccatgacagctatttctgtatatgtggcgagtgcggctataagcgtgaatccggcgaattctccagcagatgcgtggcaggttatacttgccagggcagcctgcagtgctgttaatccagcatttttggcagctataccaagagtgaaggatacagcaagatatccaagggctataggcataccattatgtataccttttttcagccagtaagatgtagaagtattcataaatattatatctccatttttgtaaaattaaatctatttaatccaagatgttatgttacatgacttaaaaataaaagcaatatcatatattacaccatataaaataaagtgtcaaaaagtgtaaattttttaaattccgttattctatttctgcgatttttttcttttgttctacatatgacattatgatatgacattgatatttatttatcaaacttatataaaaatccaagcggctatttatataaagtatttttaaaacaacgctgtattgtttaaaatgcacaaaaaaagagatataactttatagaaatttgataattgattatataccggtatactggtatactgcaaatgtcaaaaacaaagacaaaaagttaacaaacattttaaaacacaatcaataacaaagtttaaggaggaaaaatattatgaatacaacatttgatttaggaaacggattaaaggtgatcgatcttacaaagccattagacccaaagacagagtcgagaagatgccatcttatcagatataatacaggtggaccaatccctgatttccatacagctatggatcttacaagccaccttggaacacattgtgagtgtccttatcatcatgatgataactggccatcagttgcagagcttccacttacaacatttatgggaagagcaatatatgtagatttcaaggaaacacttcctcatagaaagcacatcagtgcagcagaccttgataaggcaacagagggctgggttaaggaaggagatattcttatcatagattcttcttataagattgatccattcacacctgatactaatacagataaggatcagagattattagttaatggtgaaacagcacagtggtgtgtagaccacaagattaagtgtgtaggctttggtgatggagtttcaattgagaattgcaacgaagatgttaagcctttccacgatatctgtatggcagaaaacatagtattccttgaagtattaaagaatcttgataagctttcacaggatacattcttcatgtcatattcaccacttccaatctatggattagattcatgccctatcagagcatatgcaatcgaaggacttgctgaatttacgagataatatagaaagataccaggggcaaaaggtctgaacccacatgagcttgctcataggtgtgtgaaagaccttgggacccgccccgatatgagcataaaagtgggatgataatcagccggtaagtctgtaaaagctgatgagtatgctttataaaaagtatattgtataataagaagtattacggttcagaaatggaggattagtgtgaaaaataagatttttcacacgcaagatttgtacttcgcacaaacttgagatgcgcaaagaagcagcgcaagaatggaggatcactatgaagatagcagtacttggagctggtgctatgggttctatatatggaggccatctttcaataaacaatgatgtttatatgatagataagaaggaagagcttgttgaaaagattaatgcagatggattgaagctatatgagaatgataaagatgtcatatatcatccaaaggcattgcttagcagcgaaggaataggtgaggttgatcttgttattatatttgtcaaggcattatattctagagctgctcttatggaaaataaggctataatcggcgataatacttatgttttaactcttcagaatggtgccggacacgaagatattattgaagagtttgttcctaaggaaagaattattataggaacaacagaagataatggagctattcttgataacggatatgtaagaagaggcggtaagggtaagactaacattggcatgcttgtagaagataagaagggtatgcttgataaagtaaaggaatgttttgatggatgtggttttgatacacacatttacagtaacatacagcagcttatatgggataagctttttacgaatgtctcacttagtgcattaacaggagtgcttcaggtgcctatcggttttatcgcagaggatgaatatgcatggaatatgacagttacacttataaaagaagcaatgcaggtagcaaaggctatgggacttgagtttgatgaagatgagatgattgagagagtaagaaatacatctatcaactcgccagaaggaaggacttctatatatgcagacttaaaggcaggaagacttacagaggttaatacaataagtggtgcagttgtgaaggcaggagacagacttggaattccggttccttcgcataaaatgatagttaatatggttcatgctatggagaataaaagtaaaaacaatgtccagtaaataagcatttaaagagtcattactggattgaatactgaattaaatacgaaatgtctgcatgtgaaaggcagacagaagggagcagagatgatattttcatcaattcacacacaggatgattattctaattatccaaaggcagtacagagagctatagaatatttaaagagcaatgattttactaaaatgcaaacaggtgtatatgaaatagaaggtaaactgttatatgcgcaggtattcgatgctatgacagaaccagtaagtgacagaaaaccagaggttcacgagaagtacttagatgtccagttccttgtaacaggaagagaaaagttaggctttacaccagatacaggaaattatgaggtggatgaaagattcgatgaaagagatcttatattctacaagaaggtagaaaatgaaggctttatcacctcaacaccaggatgtttctgtgtattctttccaacagatgtacacagaccacaggttgcagatggagaacccatggaagtaagaaaggttgtagtcaaggtaagcttagagcttttaaagtaatcaggcagatgcataagagcaaagctgtcagttgtttatcagggtttatgactgatggttgaaatgtatcagatatggaggaatttatgggcaggaaaataatagcattagtattatgcataacaatgctggccagtcttacacttacagggtgttcaactgacagtgcagacggtcaggaagtaaagattataagagtagcatttaaccagaatgagaatcatccacagtataaagctatgaaggaacttggtgaaaagttcgaaaaggcgactaatggaagatacaagatgactatatatgccaatggtgtacttggcgagcagggttccatggcagagtttataagaacaggagctcttgatatggctatcgtaccctgttcagttccagaaggatatgattctgattttgctatcgtaggtgccccttatctttataaggatatggatcacttaagaagagcaacagaaactggtgtgtttacagatctttttaagtcaacaagaaagtataattttgaggttcttacaatatatacagctggtgagagaaatatatatgcagccaagcctattaactcagcagaggatcttaagggtatgatcgtcagagttaatgatagtacaacatatcttaacatggttaagtatatgggtggtacaggtacagcaatgtctcagtcagaggtatatacagcacttcagcagggtgttatagatgcaggtgaaaacagtgaacttgtatattcagatttcaagcattatgaagtggctaagtattattcatatacaagacatattgtacatccagatgtagtagtagcaagtactaacttccttgacagtttatcagcagaggatagaaagatattcgaccagcttgtcatggaatcaacagattatgagttcgatacatttaaggatgctgtagaaaagggcaaggaagaagcagaagcccatggagcaatctttgtatatcctgatactaacgaattcagggaaaaatgtcagccattacttgatagtatcgctaatcagtcagatatgacaaaggatatatataataaggtagaagctctacgtaatcaggattaatgaggaggtgtacttatatgaaaatagttaagaatatactagataagataacttcgtatgcaagcgtattcatatttattatgatggtgcttatggtaacttaccaggtagttgcaagatatatcttctcttcaccaagcagtgtgacagagattcttacaagatattcattcgtatggttgataattatatctgcaacttatatgtttggccagagagaacatatcaatatagcagttttaaaggataagcttccaggaaaagcaaagacagtggtaaacattataattgaatgtgtaactatagtgtttgcaggacttataatggtattcggcggcttcaagattacacagatgaattttgtacagtacgattcaatattacatattccaacaggtattatatattctataattccaatatgtggcgtgattattatattctacagcatatataatatcggtcttgagcttaagaagaaggcagaataggaggtaaatatgagtatagcattacaggtagctttagtaatggttacaatactggtagtactgcttgttatcggtgctccaatcggtgtagccataggtatgtcatcagcagtttcaatgatatgtatgattccagcagatgtttctttcgcaacatcagcacagagaatattcgcgggttctaactcgttttcacttatagctattccatttttcattcttgcaggtaacataatgaataatggtggcatagcacagagacttgtaaactgtgcaaaggtaattagtggacgtatgcctggtgcacttgcacagtcaaatgtagtagctaatatgttattcggagcaatctcaggctcaggtgcagcagcagccgctgccatgggtggtacaatcggaccacttgaagaaaaggaaggatatgataagaactatagtacagcagttaacgtagcatctgctccagtaggtatgcttatcccaccaagtaacactatgatcgtttattcaagcgttgcaggcagtgtttctatagcagcactttttatggcaggttatattccaggtattctctggggtggtgcagttatggtgcttgcaggtattatggctaagaaacgtggttatcaggcagagtcaagagtaccgcttaagatagcacttaagaccttctggcaggcaataccaagtcttttacttatcgtaatcgtaatcggaggtatccttggaggtatctttacagcaacagagggttctgctattgcagtagtgtatgcaacggtattatcacttatatacagagcatttaagattaaggatattcctagaattgtccttgaagcagctaagacaacaggtattatcacattcatgataggtctttcatctattatgtcatgggctatggcatttacaggaattccagatatgatagctaaggcaatacttggtcttacaactaataagttccttatattacttcttataaatgtattattacttgtagtaggtacatttatggatgtaacaccagcgatactgatatttacgcctatccttttaccaatctgtaagtcacttggcatggatgctatccactttggtatattactatgcttcaacttatctattggtacaataacacctcctgtaggtacaatcctctttacaggctgccgtgttggtggaacgacaatcgagagcgttataaagacactgcttccttacttcggagtaatccttatagcattgttacttgtaacatatattcctcagatatcaatgttccttccacatatacttggtcttgtatagtgttggataatgtttaatgattatcagataagattgatttattggactggtacaaatgtgaatcacatcacatttatataaacttttttcctaatataaaacaccatgaaagttaaaaggctttcatggtgtttttgtagttagattgattttcatgtaattgattatgatgtgtagatagttatataatatagtacttatgtactaaaaaaaagacaaataaaagatgaaaaaatctgtagttgatatataaaataaaaaaaatttggtggtgtaaaaatagtgcaggttgtattcttaaataaaaatatgaggcatttttttgtgtaagattaacatagagtatgacatgtattagaacaatcaaaaatcttatttttcacactatctcttgttaatagtgttacattatagtattttatgccgggaaagggagaaaacatgaagaaatcagtaaggaagaaaggatggtttaatagaatatcggctgtgattatggctgttgctttaatcttgtcgggaatttctataccagatgggctgtttgctgttaaggcaaaggcagctgagaattcaagtgcatcatggtcaatga

SEQ ID NO: 342 - DNA, 4969 bp, Unknown
  gut microbiota DNA sequence
aggcagaatcggctgcaaattcaaaattttattattcaaaataaataaaaatggattccaccaaaatacccatcaccaaaaatgtaccggacacttctattcattatatttgcaccaacaacttgaagttatcttcctgcttacgactttccaacaacataaactccaaatatcattttgataatataaagatacttctttcttaccccagagcaagatccacctgtgtttaacaatattgtctttccgacaaatgttctttcatcaagtttttatcttgctggggattccccaaacccattctttctatttatgccgaggttactgtacacattagagcaagatccaccccggtaataccatatcgctattttagcaatacggcatttttcggatgttggaatcttgctgaggattgtgctccccagttcctcacattcagcataaatatataattggttcctcgaatttcttcggtcacagcacagggagaaaaaataggctaaacagccctatatccctgtgaaatcaccatgtgattaaaaaatagcaaggacaggaagtgtggatacacttccgcaaaattgccaatttcggagccatatccaaaattgaaaaatacataaaaatcaaaaatccgaaaccttactcgatatccaaatttataatttttacagattacaaaaaaaccaatatgaaaattttacaaattttgtaacacatgtaaaattcccatattggttttcattcatcttttatggatttggaatattctatgttttcaaatattttactttgagcaaaaaacagctctataaacttttatcattgcattttctggtataatttcatcaactctcccacacaatctgcttccgtcatttttgtactaaagccatacgcagccataacagctttatcatttgcagtatgtgctcgtcgtaactcggctggcattgttaaaggatcatataaagccgcaagattactactaggatataatgttcttgctttcaaaatttcctgtgccgatttttcaatttgttcccgattcttctccgttactacaggccacggaaaattgttatacactattgtgtttgaataactataatcactttttaatcttccacacactgctcgcatccatgccatgtgaacattcgacatcaatacaccaaattcataaaatgatgcattgggcatagtgaataatttgtctcccggaataatttcaccatctaaataatccattggaatatatctacgattctgagaagaaactttgggaatcgcaatatattgatttttatgttcaagtattgatgcaaataaagttggattctcagccgctttttttgtgttcgctcttgtactactaagtctaaattcacgtactttattcactcgttctaatatcatcggacatttttttaataatccaggatcagctccaacaagccaaatacaatatctcggctttcgatcaataaaatcttttcccatcatataatgtctaaaaaacggagaagcctgtggttctttttccaaaaactcttccttttcctcttccgtcaatattaaaaatccaccatcaattgcttgcccacctaatgctatttcaggaacattacacaatggtttcattcttttttcaatgaatatattttctgcatcaagcaaatatccattaatattattcgccggaattgcgttctcacctgaataaattattttctgcttattatttacagctctgctaaagccaacaattacacaatgaacatgcgcttttattgacgcttcactatcccatataaatgttctgtatgcaaaatcaatgtgtacacctgattcaaaaagcggtttccagagaatcgaaacactttctccctgtgtaattgaattagttgataccaatgctgctctgatattataatttcccatatagtcagccgcttttttataccagcaactaacataatcaagatttcctatactcttccatccttcaaatatcttctcaacatcttccttctgctccgatgccatccaacgtgctcctacaaatggcggatttcccattataaacgataatttttctgcaggaattacatcattccaatcaattcttaatgcatttccttctgtaatatttacatatgtctttaaaggaagaaaatcgtcattaaatccatacacaatatttttcgtttcttccaacatttgagattctgcaatccataaagccgttttcgcaactgtaactgcaaaatcgttaatctctattccataaaattgctgaatagaaactctaattggattatttacctctaccaatgtcatttgtccgccaactttttcctttatcacctcattctccaaacgacgaagcgacaggtatgtttctgtaaggaaatttccggaaccacacgcaggatcaaaaaatgtaagtgatgccaatttattttggaattcttccaattttttatctctggtacgcttcacttgaattgctctaatactatcaaattccttctgcaaatcttccaaaaaaagaggactaataactttatgaatattttcaatagatgtataatgcattcctcccgaacgtctggtctcaggatttaatgtagattcaaataccgctccaaatatagttggagaaatatcactccagtcaaaatcttctgacgcttttgtaagaagtaattctttaattttctctgtaaaaggtggtatctcaatagtttcatcagcaaataacccaccatttacatacgggaactgagcaagttcttcctctaaatactcgtctcgctctgatacaggtgtatccaatatcttaaataattctattatagctctccggcaatcctttacttcatatgtttccaaataatcatggaacatatttctctttccaaaaataccagcatcttctgcatacaagcaaaaaacaattcgcacacataaagcattcaggctctttagtttatgctctcttttttctctctgctcaagtgtttcatccttttccttaatatctggtatacgatattgttttaaaaacgcatcataaataagcccaacaatacctcctgcttttattgatacttccatttcatgcgatattgtctttacttcctttttcaccaagaagtccaacaatggatatttgctttgtaattcatctaaagcaatctttgtcggttctggctgtttctggttcatatcataaatccaaatttcagcaaaatttgacgtaacaatccaccgagctctttcatcaaaagtcagctttccattatatctgtctgcctgttcaaatggagtaagatcaacatctcctgaattcctgattttctgatccaatgcttttccaagactcttctgttcaataattactcgtgtttcaggaatatacacatcaatacgttttgtatttccatcaattacaactttcttttcaaagttcaaacgttctgtcacattatccattcccaaaacattcgtcaataaatcaatccaataagaacgtccatcttcatcttctttcccttttcccatccatcggtttacaaattgacgggcagcctctctttgttctgcatctgtcatgcttttttcctcctaaataatcgtgcattcacaaatctttctccgactatttttacatatcatatccacagtatatcataaaattattacagaacagcattcatatatcattatttgtattgtgtctgcacacaaggaacttctaccgccaaatcataataatattgatacatgatcatgttatcttttgcttctatatacactctctgagcttctttcagcaagttattccaaatatctttccattcactaggagccgaatctaaaaaccacatattattaaatgacatttctatcgtcccccataaatcatcttctttacgctcagtttttatattcatctgcatatttcgtgcaatttccaatgcatctttttgtaaaaaagtgaatttcactactttttgaggatctggaactttcttaaaacgacgcatatgagcttctgcctttttaataattgtttccaattgttcatcatgccattttttatcctctagtatctcttcttctgacatttgcgctttttcttcattaatttctctttgcatttcttccaattcatgctgtgcaatatcataatatttcttttcaatcaccataatctctcaactccataaaaaaagaaacagtcaacattttcgttacaactgtttcctttatttttgaagtccccggagcatttgtatcactacattctgttctttttcatcaagattattccaaatattcagaacctcttgttgtgattctgataagcttactggaacatccattccggcaaagaattgtgccattgttactcccagtgcatcacatatcttttctacagtaggcatagttggtaaactttctttagcaataatttttccaatcgaagattgagatataccagtcaattgtgacagccgatatttactcatatcacgttttttacataaagctataatattgtccgcaatataatcctctgtacgcaagtaaatacacctctttccgatagtagttaccttaattgtaactagaaatccgcaaaattattagagatgtatcttacaagtatttactaagggaaacagtagtattaaaacaaaaaaaatagaactatataaagttgtattccattaatgtcagcttattatctaaatgctcatattctctttgtatttcttcaattttatcatatagtttcagcactgtcgaaccctttatcattttattctcttggcacatctgccggaatttttctttgtactcccgcagtactcttcctttttcctctaattcctccagtgttttgatttcctctttatctgccatgtattttcctcccagacataatttttaa

SEQ ID NO: 343 - DNA, 963 bp, Unknown
  gut microbiota DNA sequence
aagaggaacaggagatattgtacgacaccatggagtcggaggcttgtaccccaagtcatgcacaggcaattaaaatccgcaaattttcagcagagggcagattgaatgaagatgttttgttgtcgattatggcagaggaaaagccaaatcaggtagagcaatggaaaatcccaaagaatcgactgaagaaatattttccatcggggacttcacaacaaaaaatggaagaaaccattatcaaagcactggaattataccgaagacgggaaaaaagcagggaacgataggaattttgacaccaagggagaagtctatccgttggcggttaatgagaaatcagcctatttctgttttcccctccccataccctacccctttggtttaccagcagattaccagccgaaaagacaataaggagccgggaacatcttctctttcggcaggtcagagattcccataccctgcatgacagcaggaagcaaacagcacaaagcaacaacaggcgttccagacggacgtcttttttattggattgaaaagaaaggaattgtagaaaatgaagaagatatggaaacgagtgtgtacagggattcttgccctgaccacgattttaactgcattaccgactacatcggttcacgcagcagaaacacagtattggacagagtcctcagagagagtcggatatattgaacatgtgatgaatgatggaaccattcattcgacattcaatgaaggtcacatgaaagtagagggcgaaacagcctattgtgtagatattaacaccggatttaaaaatggatataaaaccagacacgatgcaagtgccagcatgagtgctgcacagatcgaagatgtggcattgtcactggaatatgtaaagcagtataggggcagtcacagtaacctgaatgcgaatcagggatatctgctggaacagtgtgtagtatggcagagactcag

SEQ ID NO: 344 - DNA, 37564 bp, Unknown
  gut microbiota DNA sequence
actttgtaacacaatataaaccagttcgataatccctcaaggataaagataaactcttggcaaactgtttgatcaatacagattattatggtgttcgtggcgttgttattaaaaaagaaccggataagctgatattagagaatccaggatatattcgtaccggtaaagaacagatgagaaaaggtggtgaatcggattctagaaacaaagcattggtgaagatgttcaatctgattaatatcggtgagcgtgcaggcagcggtgtgccaaatatttttaatgtctgggaagatgagggatgggttgatccagttattcaagagaagtttgatccagatcgaacaattttgacactggagtttaagaaaaaaagcagcgataaaaaagtgacaaaaaaaacgtaagagcgatatgaaaagatacttgggtttatggagtttgggaaagaatataacatacaggatttttgtcaatgcttgacttaaaggaaagcagaacaaaggaaatattagctcagatgtcagattatattgaaacagttggtggaaataaaaatcggcgatatgtaaggaagaataaatagtaaatagtgcaataaagcgttgcgctattttgaaagttaaaaacaaattatcattataaattgtttctggaagttagtcaatcaggatattagcaataagtatcgtcaactaaaagaaattgtggaaaagtctgaggcaaagattatcatccttgatatgatctgttttgagtatttcattttggcatagtgtaaatatataagcgtgacattcataaaagagtgtcccgcttattaacatattaattgttggcaccttccttgatgccgtggcgttctgcatatccggtgaggataagagttagcgcaccgtcgccggttacattgcaggcagttccaaagctatcctgaagtgcaaatattgtaagcataagagcagttccagtgtcgttaaatccaagcacaccggttataagtccaagcgaagccataactgttccaccaggtacgccaggcgcgccgattgcaaatattccgagaagcacgcagaacagaatcatagttccagctaatggaatagtaccatacaaaatttttgacacagtcatgcagaaaaatacctctgtaagtactgagccgcataaatgtatatttgcaaacaaaggaattccaaatgagaccatgtcctttctcaaaacctttgatttgccggcacactggagtgcaactgcgagtgtggcagcagatgacattgttccaattgatgtcaagtatgcaggcccataatgtctgattacttcaaccgggttcttcttagaatacaatcctgcgattgtgtaaagcagagccatccaaatgtaatgtccgattaatacaataataatgattttcaggaatacaggaacctgctttgttattgaaccttcgtatgagagtccgcagaaagtaagtccgatgaaaaatggaagaatcggtatcatgattcttgaaactatcgcaagcacgattttctggaattcttcaagaatatttgaaatcaattctgcttttgtccaagcagcagcaagtccaatcataattgagaacacaagagcactcataacgggcattatctgtggaattgacaattcgaagaccgcattgggaagctctttcaatccatcagtagtagaggatattgacaaatgtggtatcaaaatatatccagatgctgtagagaaaagcgcagcaccaattgatgatgtatatgcgattgtaactgcaatcaaaagaagctttgatgcatttttacccatctgagtaatcgaaggcgcaataaatgcaataattatcagaggtatgcagaaattaattatctgattgagaatatatttcagagttacaacgatattcaaaatggcacgtgaaaatgaattgccatcagttgaacttaatagcagtcccacaaggatgccggcaataacaccgaccagcaatttaaacggcaggctgcgaaaaaaactatttttcttcattttataaatctccttcgtttgtttagttaataaaaattataatataggctggtagaaatgacaatggaaaggtttggcttgagtttccatatttttctccacacaccactgcatacagttggaaaagtttaaaattatggtgatatatggttggaaaagttgaaaaataaagaaatatatggttggaaaatattaaaaaacgcaatattaaggttggaaaaatggataaaatatagttttctaagtatagaaaagtagaaagatgccaaataacttattatgaggctgagtatagttgtagataaaccgctggaaaaaggccacacaattattttaatcgatgaaatacaggaatgagaattactccgacttctataagtcggagtagttcacgtccatacagtattcttcaacatcatgcaaaatagtaagaaatccaatttagcctcttgttggattcagttttagactttcagagtttctttgtctactcagcaacagtcccacatcataaagaatgtcattgagttgctttgaccttaaagaaatattggttgcaagatgatcattttaatggtttttccatcgaagacatgattaaaattgttctcataattttgtttgtcttgaattatttttgccctgtcataaataaaaaaaacaatattactgtctttgtaatgaacaatatctgcctctatttcttctgttaatttttttaaagacatattttctcttgtacactttgcctcaatactaacttttaaacatggaattttcaaatctgctctaactgttccaacgcctgaatcctctgaaacctctttccttatatctggatataatggttttaaaacagcatacataaaatgttgaagatcatattcattctttattttaagattctgaaaatcctcaagttttatcgtcgaacatttatctatttttttttctgttaacgcttccaaaaacatatagaaatctattatccattcattcttccccatcttaaatagaataaaaacagcgggtctaaaacgtaaattgtctcatctttccattcaattgcacgataaatttcctcttttccatctaacacactttgtaaatatttcagatgattttttactgtttgcttttctatttttatttgttgattctttgtatcaatagtgcaaagaatcctttcataaaatgtctcaaaatcaatttccatgagaggtggattttttgccaaaatctccaccatcacaccatagagatccaaatcttttccatctattgttttatataactttctttgctgccctctcgggtttggacctttggataatacatttacaacatctgcataattaaagttcatcgtagtgaatttatatgctctttctaataaattagcatcgacttgtgttttctcttcgtcttccaataaagtacagatactcaaacaaatatactgcatcatccgcacgatgtggaagtgagactactaccactttaagttctcgtcgaattgcatctttcagctgttgtgccatcttcatctgcatttcaggcgaagcataatgaaaatcatcgattactaagactttacccttttcaatataatattgaataatcttatctttagataggatgtatttttcactcttgctgtctcgtgcctcattatttccttctgcagctgaacgttctgttgtaatctcacccatatagggtaatcctacttttgcagcaattgttgccccaaaatctgtatgttcattaaaatctgcaccagaaacctctacaatattatctaaacctatcacttgttcacataatatcgtttttcactcggaaattacgatggcataaaagttgtgaatgtcatcgactggcttttgggatgaggaatctgcgtatgagtgattaactttaaattgtattttccccattaatcagctatactactgataaagagcttatataagtgatggttttataaaggggataaatatattatgaagaatctaaagcttccggtaggaattgaagattttcaggaaatccgcaggaatggtttttactatattgataaaacgggactgattgaacagcttcttgacagtttggggaaggtgaatctttttacaaggccctgccgttttggcaaaagcttaaatatgagtatgctccggtacttttttgaaatcggaacagatatgacattatttaatggacttcacattatgcaaagaaaagatctttgtgatgaatatatgggaagatttccagttgtgtttcttacgcttaaaggtgttgatgggctgacgtttgaaaaagcaacgaacaaattaataaagattgtcgcacttgaagcagaacgattcatttttctgaagaatagcgataagctaactgacaacgaaaaacaaagatactgtgctcttgttaagatgcaggatggaaaatatgcaatggatgaggatacattggaatcagcacttcagacattgtcggagttgttgtaccgccactatggacagaaggtagtcatccttgttgatgagtatgatgttcctttagacaaagcatatcaaaatggatactataaagagatggtatcaatgattcgttcactgtttggagaagctctgaaaacaaacgaatttttgcagtttgctgttttgacgggctgtctgcgtgtttcgagagaaagcatttttacaggtttgaacaattttaagattttttctataacagatgcaagatttgatgaacagtttggttttacagaagatgaggtcggaaagatgctgaaagattaccatttggaagagcatctggcagaaatgaaggaatggtatgatggatatcattttggagatgctgatatttactgcccttgggatgtgattaatagagtagatgatctttgtgatacaccagaagcaaagcctaaatgttattggataaatagcagtggcaatgctttagttaaacgatttgtttccatagcaaacagaacgacacaggatgaaattgagcacctgattgcaggtgaaccgattgaaaagtctgtccggcttgatttgacatatgatgagattgataagagcatagataacatctggagtgttctttttacgactggatatttgacacaggctgatatgacggaacaaggagcatataagctggttattcccaataaagaagttagaactgtttacatttcacagatacaggaatggtttaagcaaaaaattgctgataatacggaacagatggcacatttctggaaagctattgaagatggaaatgcagagataatagaacagtatttaaaccaaacactaagtaatacaatcagtgtttttgatacaaaagcacctgaaatggaaaaggaaaactcatatcatacttttcttgcagggatgttgacgggaaacacagattgggtggtaaagtcaaatgtagaagctggagaaggatttgcggatattatcattaaaccgcagaatccgaatgatggtattatctttgaacttatgtattctaaggaagcttcagggttagataaagcctgtgaaagagcaattaaacaaatcagagatcgaagatatttagagtatcttaaaaatgatggtcatcacaatatgatattttacggcattgctttttacaaaaagagatgtaaggtagtagtcgagaaactgaattaaaataaggaacagacataatgaatacagataatagcatgaataatatgtgttacagtacatctggcaacagtatctgtgttgaagccaaaggtggcatatgtactcctatggttcatataagaactgctctagtggatgatgctaaagagcttctttccatatatgctccgtatgtcatgaatactgcgataacatttgaatatgatgtgccatcgttagaggagtttcaagggcgtatagaagctacattaaagaagtatccttatatagtggcgttatataacgaaagaatcgtcgggtatgcgtatgccggaatgtttcatgaaagaaaagcctatgacagatgtgtagagacttctatatatgtggataaggatatgaggcatatgggtatagggcgaattcttcatgacgagcttgaaagagaacttaaggacagaggtattcttaatatgtatgcatgtatagcatatcctaaagaggatgatgaatatcttgataagaacagtgccatgtttcatgcacatcttggttacagactcgtaggtgagttctatgactgtggttataagtttggcagatggtataacatggtgtggatggaaaagcttataggtgagcatatttagtatagcgcgtcaggcggtgttataagtggcatgtataatagtataatggaattatatggagaatcgaaggtggcagaaacagtgaatatacagaatagcagcgggaatgataatattacagacaataatgttataaacaataatattataaataataatgataaaaagaataatcataataatgagttaaaagacaatgaacttacaggcaacgaattcatagaaaatgccatagaagctttacagaaggaaccatcagaggagatgttagcacacactcttactgttataagaagacgtatgaatgataatggtcagctcataatagcggttgaaccacctatgccaggacagccatcagagcatggtaaaatcagcagtcagcaaggttatggacttaagttaaaagcagtgaagacggcggatgaaaagctatggtggatggcgtttacaagctttgatgagcaaatgaagggctcagacagtgtaatgtcaacatttatgacagatataagaaagctttttgatgcggcgttgaaggtggatgaaatagaaggtataatacttaatccatggaacaggacgattatgcttgataagaagcttataaagataatcatcggagcataagatgtttaaaaatctgtatattagaagctgacacaaaggatgagttttattgagtttcatggcagttgttattgacaaatataaaatcatctgttaacattacaaggcaattaaagatatacgtaattaaagatagacagttcgtttgtaccatcctgtctctaaataaaaccaggactattatatttattacaatagcttatatatttagaacgattatatcaaggcatgggtacgcagtatctatgcctttttttgcgtatatgatgatttattatggaattattgcaagcaatgataaagcaatgataaaagtataataaaaccataataaaaaaattaataaaagaggattatttatatgtatattttaaaaacagaagcaagctttgattcagcacattttctttctggatatgatggaaaatgtagtaatcttcatggacacagatggagaattgttttagaagtgcagacagatgagcttaaggatgatttgcagcataaaggcatgtatgttgattttggggaactgaaaaaggatttaagggatatagcagattctatggatcatgcacttattattgagaagaattcacttaagaaaacaacacttgaggccttaaagagtgagaatttcaggattattgagcttgatttcagaccaacagcagagaatatggcaaagtatttttatgaaaagataaaagagcttggatatagcatgaaatctgtaactgtgtatgaaactccagccaatagtgcagcttatatggaatgattctagaaagcatgctgaatcataaaagaattagatacgattaaagaattatggaggagtatatgagtgtattagaggttgttgaaaagttcgtaagcatcaatggtgagggcactaaggccgggcagcttgcggtatttatacgttttaagggatgtaatcttaactgtaaatattgtgatacgaagtgggctaatgaggctgatgccacagcacagcagatgactaaagaggatatccttgaatatgttctatctacagggattaagaatgtcactcttacaggtggagaaccattgttaagagatgggattgaagatgttattgaatgtcttgcagataacaacctgaatgttgagatagaaactaatggaagtattccgcttgataatatccgtaagcttcataaagataatgtaacatttacgatggattataagctttcatgcagtggcatggagcaggctatgaggatggagaatttcagtgtattaaacaaaaatgatacagtcaaattcgttgcaggctgccatgaggatcttgtgaggacaaagcagattatagaaaaatataatctgtatggaaaatgcaatctttatataagtccggtatttggcatgatagagccagaagaaatcgttgattttatgaaggataatactatgaacgatgttaatatgcagatccagctgcataaaataatatgggcaccggataaaagaggagtttagtgtattaatgtatacaaagggctgatgcagacctttatacaggttagcagggtgcagaaatgaggattttatggaaaaacacaaaaaaatagatactaaggcaatcgaatatcatatagccggtattctcaaagcactaggtgatgatcctgagcgtgagggattaaaagatacacctaaaagagttgcgaaaatgtatgaagaagtgtttgagggaatgaattataccaatgaagagatagctgaaatgttcaataaaacatttgcacttgataaacatgctgataaggaatgtgcatctggtggcggtgcttcagatatggtagttgtaaaggacatagatattttcagttattgtgagcatcatcttgcacttatgtatgatatgaaggttacggttgcatatattccaaaagaccgtgtgataggacttagcaaaatagcgcgtatagcagatatggtttctaaaagactgcagctgcaggaaagaatcggaagcgatattgctgatattatccagatggttacagggacagatgatgttgcggtgcttattgaaggctgtcatagctgtatgactgcaagaggaataaggaaggctgacacaaaaacatatacacagacattaagagggagatttaacaatgaaagcaatggttttattcagtggtggaatagatagtacaacatgtcttggaatggcagttgataagtatggtgcagaaaatgttatagcattatctatatcatatggtcagaagcatacaaaggagatagaggcatcagataaaatagtaaagtattataatgtagaacatatttatcttgatcttgcaaaaatattccagtatagcgactgttctcttttatcacattctgataaggagatacctaaggaatcatatgatgcacagattaaggataccgatggaaagccggtatctacatatgttccgttcaggaacggtttgtttttatcaagtgctgccagcatagcattatcaaagggctgtagtgaaatatattatggtgctcatgcagatgatgcagcaggaagtgcatatcctgactgcagcagtgagtttaatgctgctataaatgatgccatatatcttggaagtggaaagcagataaaggttgtggctccatttatcaatgccactaaagcgcaggtggtaaaaaaaggacttgagcttaatgttccttataaatatacatggagctgttatgaaggtggtgaaaagccatgtggaaggtgtggaacatgtatagacagagcaagggcatttgaattaaacggaatgaaagacccggctatggaataaaagcatagcataaagtgaaataacagacagatagattcatatatattaggagatggaatatgacaggaagaagtaaggaagaaacagaaaacattacattattaggtaaccagaaaacaaagtatccagatgattatgctccggacgttcttgaaacattcataaataagcaccaggataatgattatttcgttaagtttaactgccctgaattcacaagtctgtgtcctataacaggacagccagactttgccactataactatatcttatgtaccagatataagaatggtggaaagtaaatcattgaagctttatttattcagcttcagaaaccatggtgattttcatgaggactgtgtgaatatcatcatgaaagatcttataaagctcatggagcctaagtatattgaggtatgggggaagttcacaccaagaggtggtatttcaatagacccttactgtaattatggaaaaccaggaactaagtgggaagagattgcatttaaaagactggctgagcatgatatgtatccggaaaaggtggataacaggtagctaaaagaccacatataatgattgtagataacaggctgtagaagcaagtagttaaatgtttgcataaaatttaaaaaatgtatataattatctttatatgcctgtaaagttggactattataaatgtcaagtaatattgcagcaggaaggataggatagttatattatgaagcagatgattaatacagtggtgacggacatgcttacggcattgtatcagccttttatgtttgctgtggtcttagcaggattttttatgtttttatatatgtatgccaattgtcccaaagaagctggcagaggttacaaggcagctatagtggcatggttaaggcagtttaagaattcgagcttttttagaagattgtttgtgcttgtgctttatacttcacttgtgcttttcaggacattcttcaacagaaatctatggcttaatccgttgtcagatgtatgtggtggatggagaatgtggacttacaatgccaatggtgtccgtgtatacattacagatagtattgagaatattataatgctttttccttttattatattgcttatgtgggcggctaaggataagctgttaaaaaatgtgacatttcatggcattgtcggtaagtcacttcaggtttcctttttattttcactgtcgatagaactttttcagttgtttttcagggttggaacattccagctttccgatcttttttataacacattgggtggtgtcatgggcggtatagtatatgcaatcatatggagaactggaagccataattcttaaaataaagtcttgttttctgcgtaaagttatgattatgtcacacaagattgtacaagattataaaatattaaaatatgagaataatatagattatgtatatcagttatgctatcatatgctttggtataaaatgcatacagaaatgaggattagtgtgaaaaataagatttttcacacgcaagatttgtgcttcgcacaaacttgagatgcgcaaagaagcagcgcaggaatggaggattattatgtcagatattaaaggtagaattcattcggttgaaagttttggttcggttgatggaccaggtgtaagatatatagtgttccttcagggatgtcatatgagatgtaagtattgtcataacccggagacatggaaagaagaaggcggagaacttcagacaccacaggaggtgtttgataaggcatatcgttatcataattactggaaggataaaggtggtataactgttagcggtggtgaagccatgcttcagatggagttcgttactgagctttttaagatagcaaagcagcataatgtccacacaactcttgatacatctggcaatccatttactatggaagaaccatttttaagtaagtttaacgagcttatggcagttacggatctttttatgttagatattaagcatatagatgatgaaaaacataagaagcttactggctggactaacaagaatattttagagcttgccagctatttatcagataacggaaaagatatgtggataagacatgtccttgtaccaggtgtaacagatgacgaggcagatcttaacaagctttcagagttcgttaagtcgcttaagacagtaaagaggttcgagatacttccatatcatacacttggcgtgtttaaatggcatgatcttggagttaagtatgaactagaagatgttatgcctccaactaaggagcagatagaaagagcagagagcatacttcatacccgtgattatacagggtataaaaactaagtttgtgtgattacaatgtttatataataattattcatagatagttgagtatttaacatatataattaaacaatctctcattaaatggtttatgtaataatcatttaatgggagattttattattgttgaatatttaatttttaaattatcctactataaaaaagaaaatattaatgaacatgaccacatatttttttcatatttttatattaatccactttccctgcttgaatcgtacagtggctaatataaatcttgacatctggtcggcaagcacgccaagccatatgccgattattcctccaccaagtgcatatccacacagataagaaacaatagtacggataaatgttacacttatcatagatgctatagcagtgtaaagagtgtcgccggctccacgtaggcaacccatgtagattacctgacatatctggaatataacaacgaatataataacatgcattatattaataccaatagctattatatgctcttctgtaaagaataatctgtacaatccccttgcaccaaagaagtaaacagcaactaaaaatacagctataaatgctccgataagacggcaggttctgccatattcctttgcaagctcaggtttcttttcaccaaggcttcgtccaataagtgcaacagcagttgcctgaagaccatcaccaaatgcaaatgaaagtgacataatgttcatacctacttggtgtgctgccatggcatctgttccctggttagcagccatgattgctgtaagcatgaagccgatacgcataagcacctgttcaaagaatacactgtaaccaacctttataaggtcgataaaagccttagaggctggttttatttttttatttattatataaggtatacttaaaaagttatccttttttgttacggatattatgctcatgatacagccgacaacagttcctgatacggttgcaagagcagcaccctgtatcccaagagcaggaaatccaaggtgaccattgataaaaagataattaagtataatgtttattgtattggaggttacattggtacgcatagtaatcttagtgttaccagctccgcgctgggcagcgttaacgcccatctgtatacagttaaatatcataccacccatgattatcctgaaataagtaacggcgccatcatgtgtttctgctgtggaaccacagaaactgatgattggtcctgcaagagtaacaaaacatatactaagaataatggcagatactatgataaaaagtatagctgtaagcatgatctcattggcagaatccttacgttgttcgccacgtcttctggcaacaagtgctgatatagaaacattcagtgcaaaaaacagagccagccctaaaagcttaggctgtgtggtgagtccgacagcagcaacagaggcagaaccaagggagcttaccattagcgagtcgattaatcctgcaaatgctataaagaaagattcaattatagctggccatgccatattgatagcaatttttaaagtatccttatgatacttgtttttaaaagttttatttatagtgttacttatataattcatatatacctcgtgacatatatcctgtgcatttattgtgactataaaaatgtctgtaattttgtgattataatatgttatttttaagaaatatagcatataaacattttacgatacattaatcagctatattgttatagcacttttattataaataggcaaacatatattgcttgtaagcaaagaacattcttgtcattcagcattgttatgaagctgcaggttgttattatccataagtgttatagcattatctataagctgtatattatttataagatattgagaggtgtcttctttaacattgtaatatgcatcacattcacaggtgcagtcctgcattgtaatgttgttaatatatgatagcaggatgggaggtttatcgttgccgttttttaaagaagcttcattcttaatattgctgaattgtgtccagggattaatgtttataaagcttgatacttttccagttacatttttaataagtatatgttcataaagctgaggtgtgtcaggccgcattttaagccacaggagattataaccattatttatgcgtatgtttcgcataataatattacgattgtggatagcttctgaaccacaggtaaggcagccatgacagaagtcatatatgcagtcttcaattattattctttcatttagtccgttatcagaatcagctttggcatttattcctttaccacctttaagtgcaactgcatcgtcattgacattaatgtgacatccctttatgtgtacatcagaacatgcatctatatcgattgcatcggtacttggggctttcaccggagtacgtgggcttgatattgtacagtcatagattgcggtatgtgtacatttatatatgtggcatgtccagaactgggaatctttcatatgaataccatatatagttacgttgtctgaatgtgcgatatataaaaggcgggcacgctgttcatccttgtttgtacagtcaggattccagcttcttctctgccagaagcatttccaggcatgcagaccgttgccatctattgttccttcaccatatatagtgaagccatctgcatggctgacattaataagtgctgcataatacaggcagctttcgccttcaatacgtgtttttattattggatagtctgtaatatcctgacttccttttaatatgccgtttttttctatatacagattaactcctggcttaaaaaaaagagcacctgtcatatatgttccgtcaggtattataatataacctccaccattgtcgtacacagagtttataagcttctggaattcttcagtatatatgttaccatcatcttttattccatagtctgttataatatatgaactggcagtagctggtggtgattgcaaagctgacttgattttggtataattcgaataaaaccagctatttatgggtgtaccatcaggaaagataccatagctggatgatgatttggatgaggatttatatggtgagcaggaatcaggattagattgtgtattggtatttaattgggtatttaagttgtctgctttgatgtatgtattagtatgcttcattagatttcgctttctgtatagattaatattttatgagagtttgaggtgtttaaggattgcgggaattgcatggcaatgaagcaatccggttacagcagtaagaggcataatttactctttctcaccccgtacactcacgaacccgcgctacgcgctatctcgccctgcttcgcatggctgttcgttcgttaatggcgcaagaaaagtaaatgtctgcttcgcagccgcttccttttcttttgcgctcattatatcataatataaaagcaaaatgtgcgtaaaagatacgcaggaatggagattaatatgtcagatacaacgaatcttggagaaggaagtataggctcacttcttgcaaagctggctgttccggcagttgtagcgcaggtagtcaatcttttatacaatatagtagacagaatatatataggtcatattcctggcataggtgcgagtgcattaacaggtgttggattattcactccgatacttatgttaataaatgcatttgcaatgttagcaggttcaggtggagctcctagagcagctatatatatgggaaagaaggataatgaaactgcacagaaaataatgggaaactgtttttcgtttcttatgatatgcgcagttgcacttactgtcatattctatgtggcagcaccaacacttcttgtatggtttggcgcaagcagtgcaacacttacgtatgcggtttcatatgcaagaatatatatactgggaagtatatttgttgttactgtattaggaatgaatctttttataacaacgcagggctttgcaaagataagtatgcttacaacagtgattggagcggttattaatataatactagatccaatatttatatttgtattcgaaatgggagtgaagggtgcagcgctagcaactgttataagtcaggcggttggtgcaatatggatattaagatttcttaccggtaataaaacaatattaaagcttaaaatgagtgatttaaggttaaagggcagtataataggtccatgtcttgcacttggaatatcaagctttgttatgttgtcaacagagagtattctttctataagctttacatcaagtctgtcaaagtttggtggggatatggcagtcggtgccatgactatcattacaagtacaaaccagcttattgtcatgccggtacagggaatatgtcagggggcacagcccattataagttataactatggtgccaataaaaaggatagagttaagaaagcattttttctgcagtttaagatatgcgtaatatttacatgtataagctggcttgtaatgatgttgtttccacagatattcgcaggaatgtttacatcagatgccagtctggtaagctatacgtcgtgggcgttgcgtatatatatggcaggaatatttgcacttggattccaggtcagctgccagcagggctttatggcacttggacaggctaaggtaagccttgttatggcatgcttaagaaagctgattcttctgattccacttatatttatgttaccattgctgttttcagataaggtgtttgcagtattcttagcagagccggtcagcgatatcatagccgcgatagtaacaacaacagtatttatggcgaagtttaacggtatacttgaacataagatgtaacaaatatattaaatatatcatctattatgtcctgacagaacaaaaaggagcagcataacttgttaaaacagtataaaaatcttgtcaccagtgcacaaaatcttgataagaacatagtataggattatattctggtcataaagaaacaacaagaattttcgggcttaagacaatataatgataccagtgtccaaaggtctaaacccacgtgagcttgcttatagatgggggaaagaccttggaacccgccccgatatgaacataaaaaatgggctgttgctttaacgattgaaaatcgttgaggcggcagtctctttttatgtgcggaatgcatattgtcgtgaacaatctggacaggattaattgaaaaagaatgattgaaaaagaataattaaaaaagaatgattgaaaaagattgattaaaaaagattgattaatgaggatatgatgtatacaaaaagtcttaaatgggtataattatacataaaaatcataaataaccatgcaaaattatgcaagttgcacaaatgcatttgtgaatgtttgtgaatgatggcgattgaatatgaacgaatatggagttattataataataacttgaagatacgtgaacagaagggagggataaaggtgatatatacagttacatttaatccatcgttagattatatagtttcagttgatgatttcaagcttggcatgactaacagaacaagcagcgaacagatgttagcaggcggcaaggggattaatgtttctatagtacttaagaaccttggcttggagaatacggcttatgggtttattgcaggattcacaggtgatgagataagtagaagacttgatagagctggtgttaacgctgactttataaaagcagatagtggaatatccagaattaatcttaagttaaaatctatagatggaacagagattaacggtgcaggaccagatatttccaaaaagaatattgaaagtcttttagacaggcttgaaggtcttaaagcaggagatgtgttagtgcttgcaggaagcatcccagcctgtattccagatgatatttatatgaatatcatgaggatgcttgatgataggaaggttaggattgttgtagatgcaacaagtagtcttcttatgaatgttcttaagtataagccttttcttataaagcctaatcaggatgagctgggcgatatatttggtgtaactcttagtacaagagaggaagttataccatatgcattaagattaaaggaaatgggagctgtcaatgttcttatatctatgggtggtaaaggagcagtgcttgtagcggatgataataaagtgtatatggcagaggctcctaaaggtactcttaagaattctgttggtgcgggggattccatggtggcaggattcataacaggatggcttaaagaacataattatgaggatgcatttaagatgggaatagcagctggaagtgcaagtgcattttcagataatcttgcaactatgcaagaggtagatagtctggtaagcgggattgaagttgtacaggtggtatagttatttacgaaacgatgtactagatagtgattatgtaaatcacataacaatgcagcaatatgaatgtatagattaaaatcagatgattggaggaataaatatatgaggattacagaacttttaaagcctgaaagtattgatcttaatgcagcgcctaaagataagaatgatactataaagcaggcagcagcccttatggcaaagagcggaaacataagagatatagaagcttatactaagcaggttatggcaagggaagaggaaagtactacaggagtaggtgatggtatagcaatcccacatggaaagtgtgatgctgtaacaaagccaggacttgcggctatgattataaaagatggagttgattttgattcacttgatggtgaaccagtggatgttctttttcttatagcagcaccaaacactaaagataacgtacatctagatgttttaagtaagttatctgtgcttcttatggatgaagatttcacaaatgcactcaaggcagccagaacaccacaggaatttcttaaagttattgatgaagcagatgaagaaagtgccagcataaacgaaaggcttgaagaaactgccagtaagccggctaagatacttgctgttacttcgtgccctacaggaatagcacatacgtatatggcagctgagggacttgaaaaggcagctaagaagcttggttgtacagtaaagattgaaacaagaggctctggtggtgcaaagaatgtcctgacagaggaggatatagaagcagcagactgcattatagtagcagctgatgcaaaggtgcctatgacaaggtttgaaggtaaaagagtgatagaatgtcaggtatctgatggtatcaataaggcagaagagcttataaagagagccatgaagggtgacgcaccattatatgaggttcagggagcgagtaaggatggaaacgatggaccaacagcttcggttaaaaagggaaagtcaggtggtataggacatcagatatatatgcagcttatgaatggtgtttcacatatgcttccatttgtagttggtggtggtatccttatagcgatagcatttcttatagatggacttaatgttgatatgaacagcctgtctgaggcggaaagagctaatttcggcacaattacaccagttgctgctatgtttaagactataggtggagcagcctttggctttatgttaccagtgcttgcaggattcatagctatggcgataggtgacagaccagcgcttgcacttggttttgttggtggttatatagcagctaatggtaagtcaggttttcttggtgcacttgtagcaggttttgtagcaggttatgtcatcgttggattaagaaagctgtgtgacaagcttccagaagcacttgaaaagatagcgccagttcttatatatccagttgtaggtattctggttatcggacttggcatggcatttgttatagaacctgttatgggagctatcaatacaggacttaattcatttcttgtaagcatgggaagctcaagcagagttatacttggttttatactggctgcgatgatggctatagacatgggtggtccattcaacaaggcggcgtatgtgtttggtacagcagcaatagcttctggtaactacgatatcatggcagcagttatgataggtggtatggttccaccttgtgctatagcacttgcaacgctcctttttaagaataagttcacaaaggaagaaaagcaggcaggacctactaactttattatgggacttgcatttataacagagggtgctattccttatgcagcagcagatcctctgcatgttataccagcatgtatcgcgggttctggagtagcaggagcaataagcatggtatttaagtgtacacttatggcaccacatggtggaatattcgtgttcccggttgttggtaatccattatattatctgcttgcattagctgtaggaactattgtttcgacattccttttaggagtactcaaaaagaaagtagaagattaaaaataaaaatataaaagcgtaagcggaaagaggctaagtatgaaagaattcaattacacaataacagaccctgagggaatccatatgagaccagcaggtgagcttgtgaaggcggcaaagcagtttgagagcaggataactatatcaaaggatggaaaaacaggtgattgtaagaaggtgtttactatcatgtcattagcagtaaagaatgggcaggaagtaactataagtgtagaaggtgcagatgaagaggaagcagcacagaagataaaggaattctttgaagaaaatatgtgatgatggtattagtgtgaacatatttgatacagacttgcggaaaggaggtttttatgaaagaatataagggcaaaagcgtttttggtggaatcgccataggacggataaaggtatataataagtcagagcagcaggttaaaagagtgcatgttgatgatacagagcatgaaaagaaaagatattatgctgctattgataaggcagccagacagcttcaggaactttatgataaagcagttaaagaagtaggagaagctaatgcagctatattcgagatgcaccagattatgcttacggatgatgattataaggaatcagttgaaaatatcatagaaagccagcatgttaatgcagaatatgcagtagcacagacaggagataattatgcagctatgtttgcagctatggaagatgagtatatgagaggcaggtcagcagatgtaaaggatatatctgagagacttataaatatactcagcggttttaatgcttcatctatggtatcggacgaacctgttattattgtggctgaggatcttgcaccatcagaaacagtccagcttgataaggacaaaatattgtcgtttgtaagtgttaaaggttctgttaattcacatacagctattcttgcaagaactatgggtataccagcacttataggaacgcctgttattcctgacaatgatatagatggaaaaatgggaatagttgatggtaatagtggatgtttatatgttgacccggataatgaaaaacttggatattatagaaaaaaacgggatgaacagctaaaacaaaaggaacttctgcagcttttaaagggcagggaagatataactattgatggaagaaaaataaaattatatgccaatataggaaatgttaaggatgttatgactgttaaggctaacgatgctgctggtataggattgtttagaagtgagtttatatatcttgaaagggatacatttccaacagaagaagaacagtttaacatatatagaacagtagctgaaaatatggctggaaaaccagttataataagaacgcttgatataggtgctgataaacagtgcgattattttaatatggataaagaagataatccggcacttggcatgagagcaataaggatatgcctgacaagaacagaaatatttaaaacccagctaagggcattgtacagagccagtgcatatggtaacattaacataatgtatcctatgattgctaatatgtgggaaatcgacagaataaaagaaattgaaaaagaagtcagggatgaacttaagcagcaggggattgatacaggaaatgtacagactggtattatgatagaaactcccgcagcggttatgcaaagtgatgagctggctgaaaaagtagatttctttagtataggaactaatgatcttacacagtatacacttgctgttgaccgtcagaatccaaagcttgacagtttctttgacccacatcatccagcagtacttaagatgataaagatggttgtggataatgcacataaagctggtatatgggcaggaatatgcggagaacttggcgcagatacatctcttacaagagagtttttgaaaatgggtgttgatgagctttcagtatcaccaggaagaatacttccaataagaaagattatccttgatacagatgtttcgcagctttcataaaatatcgtggttatggcattttataggagcatgaagtaatattattaatattctaaatggagtgataagatatgctgacagagaaaagacatgagattatattgcagctacttagaaaaaaaggcagcataactgttaatgaaatcaaggatgaactagggatatcagagtctacaataagaagagaccttaatacactggatgaagaaggcagacttgttaaggtgtttggtggtgcagtgtcggttaactacggattttctggaaaagaacctacagtatcacagaaaaaggagattaatctggagactaagaagagtatagcaaggtatgcagcagcgcttattgagccagatgattttgtttatattgatgcaggaaccactacaggctgtatgatagattatataaaggaaaaaagagcaacatatgtgactaatgcagttacacatgcaaggagtcttgctatagcaggcttcagggtgattcttataggtggtgagcttaaaggctcaactgaagcagttgtaggaagcagtgctgtagaggcattaaaagagtataattttaataaaggcttttttggtgctaatggaataagcataaagagcggaataacaacacctgatataagtgaggctgctgtaaaaagaatggcagcagcacattgcagctgtaaatatgtacttgcagattcggataagtttgacaatataagctcagttacatttgccagacttgacgaggtaaagttcataacagacagcagagtgccagaggcttataaagaatatgaagtgataatcacatgatatccagatattggatagaagacagtataaacaaccccagagtgccgtgacagaatgtgaaatgattcttatgcggcacactggggttattagttatagctattatttattagttattgtttattagctgttagtagttagttgttattttcaagttccttcagctgggctgatatagctttcttaatagcgttgaaagattctttacttatgtcatgttcgatacggcaggcatcttcttctgccacttttttatcaacgccaagttttatgagccatgatgaaagaatctggtgtctttcatatatcatctcagctatttcttttccggaatccgtaaggtatatatagccctctttagttacacgtatatgctctgcttcccttagattcttcattgctatacttacactggattttttatatcccatttcattggcaatatctatagaacgtacaacaggcagctttttgctaagcataagtattgtttcaagataatcttcagctgattcatgaataaccatcgttaattccccctggtatatatcataatatgaacaaatcataaagtcgatatagtaataagtgtttagattatagcatataatataaaattaagcaaattattagtttctaaaaggaaaaatgtggtatactatagctattattcatcaggtatctgatattcagatacaacagtatgtaaatattaaaaactggatggtataacttatgaatgaggttaatgaattatttactaaagaaaatgtagagaagatagtggtgccacaggttgttaaggatgatctgttaagtattatagaagaaaagttaaagagggcaggtttttattacagaatagcatacagggtaaagacggttgattctatggtcaacaagcttatatttaaggattaccgcagacctggtacagaaaatgctgacaagaaaatgcaggatcttgttggcattcgaataatactgtattttgttgatgatgttgatatatgcagaaaactgctggatacattgttcgtatcgcctggcatgtgggaaactacagaaaataacgagtatgaatttaaggctatgaaggtaaatggtatattcagattaccagcatatcttagcaaaacaattgttaatccatatctgtcagattatgtagatgatacatttgaagtacaggtaagaacgaattcgtttgaaggatggcatgagatagaacatgacatgagatataagggatcagcttttggaatcggaaatgaagcccttgcacgcaagatgaatagtatacttgctacgtttgagttatgtgacgattcgattgtggggctgttggaggatctgggacatcagcattacaaagataaaaagtggaatgatatgttaagatgccactatagactaaagtttgaaaatgagccattacatccatatatagaagaactgtttgatgaggatacagagcttgcaaagatattctataagtttaaaagaccaggggctatagaacagctctggatggatacatcagaaaagggaatagaacttactgttaacaatatagtaagaatagttaaccagattggtccggatgatgaaagattaaatgaggcgtttaagaaaatagatcatgaaaaaggccaggataacgagactgtaagtaagagaagaaagtttgagccttttaagaagcttggtacatataaagtattccagtcacattcggctatagatcttaccaacctttccatggaggatgcgtataagaaggcagttaactatatatattcatgggttaaatcaagatttcttgaggtctttgatgatctgccagagagtgtaggagcatatgaaaacgagatgccaggatataaggttgcaatctcatatgatcctgaaaggctgtatttcagggaagtaacaacgcatcttgatacaaagatagctaacagggtatggatatcaatagcttctattgaaaaaaggaatgatacccttgtgtttgatgtaagcaacgaatatgccgaaccagcagataagtacagggataacgaaaacatattattcagccgtcctaatttctatggtgagattgctgataatataggaatatgcgatatagaaagattaagacagacagttaagagtattggaaatgcgaaagaatatgatgtgcttaagaaacttatatcagatgaaagcagggagtttcctgttgtagtctttgtggcatcagatgattactgggttgaaaagtttgatgttgactattttgcttatcttgttggatattatgcacatattaagagaataactacagaagaattagctgaacagtttgcaaaggattatgatcttgatgaggatgaatacagagattccataactgtgttttatcctggaaagaaaccagctgcaagttataaatcacatatacttaatacaacatttgaggttattaagatagaaaagaagaaatactggaatgaaaccggatgccgtgcattcagacgacagcttgtttcagatataagagaaaataatgttgttaagtagtctgggtataacttttcaggcagggtgtggaaaaaaatgaaccatgaaaaaaatgaatcttataattatgagagctgttatatataattaaagcattaatagtcatatgtatctgtgactgtaagatattatgttgaatatgtaaggaaaggagcagtgacgtatatagtgtataggttaaatcttaaacatggtaacgtgagatataaatatacacaatataaaatcttatgataactgataacagattcacaaagatagatgttgattctgaatgcagcatacaatatgacattaaaattatataattgtgggaggtttttatgcatcatataaaaacaggtaaactgcgtaagcatatgtcagcaatgatggctgtgattatggctgtatctcttgcagttccagcaggtatgtcattttcagccagaactgtaagcgcagcagataaaacagtagaagcaaaatctggtgaaactatttataatctgcgtgatggctcaatcatagctactgatacggatggtaagaaggatgttacgtatgacagacttacagtaaaggttggaactaagaatgcatacaaatataatggtccggatcatggtgttgcatttaaagatggcaattcacttgaaatagctgttgatggaccatcaaaaataagtcttggcggatgccagtattctaacaatggaacaataacagcatcaagtgcagatggttcatatacagaaacaaaggatgccagaactgctatgtgttatcatcaggatggtacaactatagattttgcatatacaggtgaggcaaagacaacaataacaattgctttctcatgcacagtatatgttcctgaggttattgttggaccttatacagctgatactccagatgataacggtgtgaagaaggattcaacatatatgtataactttgcagatggttcagtagtgccagcaagctatgatagtgttaatccacttaaaggaagtattgaatcaaaggatggcaatcttaagataactggcagtggcgacctttatatgcatgatacacagcatggtcttgctttatacaatggcaatacctttgaagtgaaggtagcaggtaattcaacagttacatttaatatgtgccagtatggtggcgatgcagagggtaagatagttgcatctactaaaaagggcgaatttgttacagatacaaagcagcttcttatggatggtgcagcggatggactttcatctatgtcgttcagatatgagggtgttgcaactacacttaagttcacagtatcctgtgcagataaagcagaaatgtatcttcatggtattaatgtagctaatgaaccagaacagacagaggtaccagaacttgtaggtaatggtaaggcagatgtatgggattttggtgctgcaaagcttgatgaagcagactataataatatgcttacagaggatgttattaattcatggtatccagaatcagttaaggctggttcagaaggtgctactattggttcatttatgacagatgaattatattttaatccatcaggaaagactaataacagaatcagaacatctaatacaggtattacaagatacgataagagagatgatattactatagatggagtgacattaagtggatatctttattctaacaattcaactcctgtagtatacatgggattaaagttatataagaatgatattctcacattgtatacaggttctaatggtggagcttcaactatagtatgtgaatcaccaagtggacacatccagacagcagaaagtaatgtttcaggtgcaaagatacagtttacagcatctgagtatggtatatacaagatatattcaacaaatgaaaagcttgttgtatacagagctgtaagacagcatacacagccagttgttgtcagtggtgctgttgatacaaagaatgccagcggacttgatacaaaagattacagcatagcatttgttaataagtcaacaggcgaaaagaatgttgtaaaaccagagaatggttcttacagtgtatatcttaatgagatgtatgactatgatgtagttcttatggatgctaacggatatgtaataaattcagccaataagttatctatagctaaaggcgatggagctaagaagtttgatatagttattaagtcagtagaccttgtaaaattaacaggtaagataacaggccttacacagtcagctcttgaagcacttaacttaagctttgtaaataaagattatgtatacgtaccagaaatcaaaataaatggtgatgatattgcagttaatcttgaaaagggagtaacttatgatatcgtggctgaaggaataaatgattattatctttctgatataaagacaatatcagcagataaagatattacaaaggatattgtattttcagcaaaaccagcttataaggttaatatgaaatttgataatcttccagaggaagctgctgcaagtgttacattttctaatattaatgaagaagggtatacatacacattcacagatctttctgatataaagttaagagatggacagtataatgtaacagtaaataatattggaaatgttccttatagacagaagattacatctaatttaaaggtagatggaaaagctgttgataagacagtaagctttattaagaataccaattgggatttttctaagctcaatggcaatcctggtattgaagctattggggagaataattattattcaggacttgcattaacaggttctgttatggaaaacaagacatatcttcttgcacttacagatggagagattaactttccggttaaaaaaggccagattgtcaatataggttactgctattgtgcagcattctctatcaatggtgaggaaccagtagtaagtaatagtggaagtactactaatattgaaactacacagtatgtagtaaaagaagatggaaatcttaatatcaaaggtgtaacagcagctgttgatggcaaggaaatcaagcagacatattttacatcaataagtgtaagtgatgctgtagcttatcagccacagctttatgtaggagctgataaagaattcaagacgatcaatgatgcacttacaagggctgcagctatgcaaagaacaaaagaccagagagttgagatagttattgacccaggtaactacgaggaaatgcttgttatcgatgtacctaatgtatcacttgttaatgcagcaggaagtgaatcaagccttgagataaagaataaaggtgttgatataggagagaatgtagtaagaataacttcttattatggacatggatacaactactatagtatgggtaatgattgcaagtatgatgcagatttacttgcagcaaacaaagaaaatggataccttacaaagaagaatccaggttcaggtagtacagatggttcttactggaatgcaacagtagtcgtatcagcagaaggctttaaggcagatggtattgtatttgaaaactcattcaatcagtatatttcagaaaaagaagctaatgatattgtagttgaatgggaaacaggtggtaaaggtacaagatctacaacagcaaaggatacatctgtccagggaagaagctttgttgaaagagctgcagcattagcagttcttggtgataatgctgtgtttacaggctgtaagtttataggccgtcaggatacattatatggtgcaacaggcatcagtgctatgtttaaccagtgcgatgtacttggtgcagtagattatatctttggtggtatgacagccgtattctacagatgtcagttaagacttaacacaagtgaggcagattctgatgttgcttacataacagctgcacagcagtcaggtggaagaggttatcttatgtatgaatgtaatgtaacatctacaacaccaggtgttgatacagcatcacagtaccgctctaaaccaggttattttggaagaccttgggcagctaatacatcagaagttgtattttacaatacaacagttgagacaactgattttaagggacaggaaggtaaatcacttatagcacctgcaggatggaataatacacttggtggtgagtcacctatgatgtatgaatatggaactaaagagctttcaggtgaaaataattcagcatcaagagcagcatgggctaaggttcttgaatctccagttatagatgatggtaagacagagattacacttggcgcgttctataacaagacagcagattacactaatgttgacaatgctgttaagaaagcacaggcacttaatgcaaaggattataaggatttttcagctgtggagaaagcagttaaggcagttgtaaaggattatacagttgataaacagggtgaagttgagaagatggcagatgatattcttgctgcgattgcatcgcttgaaaagaatacaccagatccaacaccagcaccgaatccaacaccaacaccagatccaacaccaacaccggatccaacaccagcaccagaaccaacacctggaacagatgataaaacacagggttctgatgcatcagatggtaacactgataacagcggtacagccggcagcacagaaaacacaggtgtagcaacaggtgatgtgtataatacagcactatatgcagttattcttatgctttcagccatagcaggggtaacagtattagcagtatcaaagaagcgtataaaacgttagttgttagttgttaatcaagtggaaatacagtaaaatgtaaaaaatataataaaaatataggataatattcctcttgtcgtacatgttaataaaatatataattatttatatattttgtgcggcaaggggaaaattttgtgttatgaataagaaatattttaaaagcgggatattcaaaaaaatgttttcttcatatataataatcatactattactatttgtatcttttgtatcagctatgttatatgaagcatggacaatatcgatggaacgccaggagaattattatcagtcatcagtagaaaagatatctaatagtattgatgtactccttatggatgcatatgtcataacatcagatattaattcatcggatgttataaataaatatgctatgcagaaaaaagacattatagaaaataatgtttctgatgcggaagttatgaccgagataaagaattatatgatatcaaggtataacattaatatatatgatgtcctacttatgctaaatgattctgattctgcattttcatcttttggaatattcagacttgataaggcagcagataatattcagggcagaggaaaagtgcatagtggaaagtcggttaatgatatatatgatataggaaacagcgaagttgtttttaataaggaatttataatatatacacagaattataattcggtgtatgcaaaaggtgttatatgtgtattatatgataaaaaaagcctgagtgatatgatagattcacagattactcatgatatgcctataaatatatatatcaatgatgaacctgcatattcatatggtgatgtaaaaaagccaatagaatataacgtttcatctgtatttaacaccggaatagattacaaaatagagatagacagttcatgttttagatttaacacagattacagattctggattagtgttgtagtagcaggagtattttgtataattcttataatatcttcactttatatgtcgaaaaaattttatacaccattaaataacataagcaggattataggtattaacagtgaaaatgatgtaaatgaaacaaaaacaaaaagaaataaaaaatcagcagataaagcggctgatttgggcttattaagacatacggagactgacagtggacttgataaagaatatgacaatataattaatggtattaagaatctcataggtgagaataatggctataaggaacgtatgatatcaataaaaccatatgcacagcagggaatgctgcatggcatgcttaacaacagtacagagccatcaaagcttagttgtatgcttacagatgattataaagtacttcagaagcagtactatgtaatagcagatgtcaatatgtcatatataggctcacggtctgctgatgtttcatattttagaaaaatgcatcatattatagagcagacagcagatagttacacagatgatgaaacatatgttgtatggtatgataaggacgattataatgtctttcttataattaacagtgatgatggtaataatctggacagcatatattatgatatacataattccatgaaagaacgcattgataatgaagagtatgtatttacaatcggagtggataaagtaagggatgatattgaacagttatcacttgcatgccataatgcagataatgcacttgccaatataatgacaggtggaagagatgctgtgtattattatgatgatgataagaagtatatggcatgtgaatattattttccatcagatacacaacagaagcttataagatatgtaagagaaaacagaaaagaggatatcgggtatattcttgatgatattatgaatgttaacatgaagaataattctgataatcttaaagttatcagtctgatgatagatgaactgcatataaccacagccaaagttcttaaaaatatacaacaggataatgtagttggatttactcttgaaaaaatggaatatcccgcaacgcttgaggaaatctttacatattataaggcagtatataatatggcttgtgaacagtatatggatatgtcagcatcaagaaaagatactaatgagcttaataaagaaataatgaaagaaatcgatgataattatatgaaagcagatatgtcactggcataccttacagataagtttggcgtaagcaataaatatatcaccatgctttgtaaaagcacaaagggaatgacatatatacagtatattcaggaattgaggataaagaaggcaacagagtatataaaggatggacaacattcgttagaggaaatagcagcattatgtgggtattctaatatgcttacattccggagaaattttaaaagcgtaatgggtgttaatccaagtgaatacaattaacagaaaatggagaactatatgagccggattgtaaaatacatattgatgggcacaatgttgatggttatatgcatgacaacagcatgttctgtcaaaaataaaaataatacagcaggtgtacatatatcaatacttgcaaagaattcacagtatacagatgtggattatgagagtacagaggttatcagaaaggtatcagagaactcaggatatgatatagaatggaaacttagacagccggacagctattatgatgtggtaagagaacttatactaaatggagatacacttgcggatattatacagctgccggatatggatatgaatatggaatatattaatactggcaaattcgtgtgtcttgatgaatatcttgattatatgccgaattataaaaagtttctccagtctaatccggatataaaagcatcactgacaactgatacagggcatatatattatgtgccacagacagtccttacatataattatgtaccatgtgttatgtataaccaggaatggctgaaaaaagcaggtaaatcagagccacagacactagatgagctggttgaactgcttcgcatatataagtcagaggatatgaatgataatggttatagcacagatgaaataccattaagcattatccctgattttataccatatatgtttggacctgctttcggactggatctttcaacagggtttctagttgatgattatgggaatgtcagttattcatatagtgatagtgtcaattatagaaaatatcttgagttcgttaatgatttatatgaggaaggtcttatcgagaaagactatgaaaaatgcacgagggatattataaaggaaagatgcagcaggaatattacaggtgtaacatttgattacagctggcatatgtcaatgctgtatagtgcacagtataatgaatataatggtgatactcctgtatttaaaggaggagttccactatcaggtgagcatcagggcttttacataggaagaaatgctgtaagcggcatatttggtgttactaaaactgacaatgttataagtgctgttaaagttcttgattatcttatatctgattataatgaagacatgtactgctttggaattgatggagtaagttattatatggatgacgagggaaataaagtgtttatggatgctgcaaaggacgatgctttcattcagaagcttggtgttaatcctatatgtgttccgtcaagacagtcggtagcagctacagatatgcttcttccagaatggcatataagacttgataagcagctggctaagtatgtaagaaagccacttccttttatgtatgtttcatcatcggacgttgacaagaacaatggctatataaactatatatccaaatatgttgatgatgaggaaaatgattttataacaggaaggcagtctttaagcagctttgatgcataccttaatacacttgataatatggggatcaaagaaataaccagtataaaacaaaaacagtataatctttataaaaataatatgtaaaagccggttcgtaaaataatatgtaaaagctggttgacatataacagcaagtagggtacgatttagtgtgttaaagttataaaatattcacgtggtagtgaagtgaaatggagaattgaaacatgaagacttttactagtagtaaaacgataaaacgtatgttacttgtgcttttagtatgttcacttataactggaactctgacagcatgtggaggtaagaaaaagcagtctggtattacaacatttacagtaggttttgatgctgaattcccaccatacggatataaggatgataatggtgagtatgtaggctttgacctgtcacttgtacaggaagtatgtaagcgtaacggatgggagctggtaaaacagccaatagactgggattcaaaggatatggagctgtcttcgggaaccattgactgtatatggaacggttttactatgaatggcagggagtcagattatacatggacaactccatatatagataactctcaggtagttattgttaagtcgggctcttctattaacaagttagcagatctgtcaggaaaggtagttgttgtacaggcggattcatctgcacttgcagcatttacaggagaagatgcaacagaggataatcttgcacttgctaaaagctttgcatcacttcagcaggttggagactataatgcagcgtttatgaatcttgaatcaggttcagttgatgctatatgtatggatatgggtgttgcaaagtatgaactcgaagcaagaggcggccagttcagaatgttatcagaacaggtatcaaaggaacagtatggtataggttttaagcctggtaatacagagttaagagatatcgtccaggagacattgtttgatatgcttgctgatggtacatttgagaatatagctaaagactggggactggaagaaagcatatgtttaagtactgataataaagttaatgatattacagctgataagaaaacatcagagtttatgagtgattttgcagatgttgtaggaaagcttgcaagtggtatgcttgctactcttatgatatttgttcttacacttgttttttcgcttcctcttggtatgcttcttatgtttataagaatatcaaagattaagcttgtaagatggattgccaagatatacatatctattatgagaggtacgccacttatgcttcagctgcttgtcgtattctttggtccatattatatatttggaatatcgttatcatatagttatagattctatgcagttatcataggctttgcattaaactatgcagcttattttgcagaaatattcagatcaggtatagaagctataccggttggacagcatgaagcagcttctgttttaggatataccagaagccagacatttgtaagaatagttctgcctcagatgatgagaatagttcttccgtctgtaactaatgaggtaataacacttgtaaaggatacatctcttgcttttgcacttgcgtatacagaaatgttcacacttgcaaagcagattgcagcagccaatgcaagtataatgccactttttgtagctggtgtgttctattacatatttaactttgttgttgcatgggttatggaaactatagaaaagaagatgcgctattataagtagtagaatggagagcagggtgaataatatgaatttacttgaaatgaaacatgttaagaaaaagtttgataatcttgaggtgttaaaggatatatctatagaggtaaaagaaggtgaagttgtagctattataggtccatctggatctggaaagtcaacatttttaagatgtgcaactcttcttgaaactatggatgaaggaacacttgcctactgcaaagaaagtgcaaccttaaacgaatcaggtcctacacgatatgcggataagaagaagctgcatgagattaagaatgattttggacttgttttccagaattttaatctgtttccacatttctcagttcttaagaatgtaatagatgcaccaattaatgtccagaaaagggataaggatgaggttatagcagaagcacgagaactgcttagaaaggtaggtcttgaaaacaaagaagataactatccaggccagctatcaggtggacagcagcaaagagttgccatagccagagcacttgccatgaatcctaagatattgttctttgatgaaccgacatctgcccttgatcctgagataactgctggtattctcaagcttttaagagctttagcagatgagaagatgactatggttatagttacacatgagattgcatttgcaagaaatgtagcagacagggttatattcatggacggcggagttatagtagaagagggaagaccagaggatgtaatagataatccaaagagtgaaagaacaagaagctttttacagaagatggcataatttaattcatatgttaaatatatcttattcgtaaaatatattggattgctgtattatgattacggcaatccttttttgtgggtagaaacaactttttatacttttgtccctatttacatttgtgtgtctgatgtatcaacagtataatgatacatttcacgaattgcgtatgcaattagaaaatcaagtagtccaaattccataaaatgaaattttagggcaaattacagacattggcttggctgtagtatttttaaacaacgtgtgttagactactgttatacaaatcgaaatttataaaggagaatattgatgaaattatttttatgttcgcacttttcaagtgtaggaagtctgataaaggaagaaattgaaaataagaaagtcgcatttattccaacagcttcactgcgtgaaggctacactggttatgtcggctcggctagaaaattattcaaaaagttgggagcgatcgtaactgaaattgatatttcaacggaggcttattcaacgatacagtctgt

SEQ ID NO: 345 - DNA, 90935 bp, Unknown
  gut microbiota DNA sequence
attcaattaaatcaagtgggacgaaacaggggcggaattgtgcgtaaagcgcacaattccgcccctcatgcctctccctttgatttagccacacattcatttttcgtaaattgggtcaaagtcagacagcatatatgagaaaagtaggtgtgcatacatcataagatgcacttgaagttcaattgtgatagttcttagacttttcctttactccccagctatccacagacacggatgtctgtggaagttcgatatgggacacggatgtcccgtatcgaacggtagcggaaacctccattacgtatatgaaaagtcttagaaatatccaattgaagcttctggcatcgttgatgtatgcgcacctgcttttctcatatatgctgtcgtccctacgttaagaatgtgtgctaaacaacaagtcacctatacaatctattttccagctgccttccttgaatattcagtagtcaccagctgctcatatggaacatctttaccaagttcaccagcctgttttaatatatctttgagaagttcaaaactcttctgctcaaagatagtgtctcctttccaggtgtcctgtgatttatagcggtcaacaatggttgttatagttgcaagatctgtttcaggaaattgtggtgctatgacttcggcaatttccttgctggtgtgtgagtttacatagtcaagacctttctgtatggcattagtgaaaccttgtattatgtcaggatgctttttaatatagcttttattggcacaataagcagtatatggtacgtatccgctgtcagtaccaagtgatgccactacgtatccttctttttgctgctcaagaagtgttgcagcaggttcaaactcaacagtataatcagctattccagatgtaaaggcagcagcggttgaaccgaagtctacattctgcagtatattcagatcatctataggggagatattatttttcttaagtatatattcaaaaagcatttcaggcatgccaccagctcttccgccgagtacagtttttcccttaaggtcatcccatttaaatccattttcttcatttcttgatacaaggaagttgccagcacgctgggtaagctgtgcaaaatttacagcatagtcagtagaaccctcctggtatacatatatagaactttcggatcccatgaaaccaatatcagcttcaccagagacaagagcagtcatgactttatcagctccgaagccagtgacaagatttaagttgatattttcatctttaaagtatccaagttctatagcagcatattgtggtgcatagaatattgagtgtgcaacttcattaagagtaatatccacaaatccgttattttcttttttttcacatgctgtcattgggagcataagtgttacacataacaatagtgcaagaatatgacgtaaatatttcaaataaaactccatttctgcaagtattattaatatcagagttaaaggataagagccgatgaaattatgaattatttaacactgatagtcataataatatgcaaaatatattcaattctatattattcataatcggagttaaatgttacagaaataaatacgtagtaaagatgaaatgtttgtaaaaatatatataaaattgttaaaaatgtcgataaatatgttggatataagagggaattatgttaaaataagtaacaaggtgaggagagagttaaaagaggactttgactctcatcgatgtgtttggtgtgtcaatgagtataaatgcgtatgtatgcagacacaatatgattttgaaatttgacatttacatcatatatatattactgtatataacatgttaatataaagtaataattgtacaattataggaggtttgtttattatgtttggcagaaaaacaacagcacaggaagctaataaggacagggaattgttattacaggctatggataagatgatagccggtgattttagtgtggtatcatctgagggattcagtgatcctatatatgctgataagctgaatcagatagttggagcttataaaaaggctaacaacaactatattatgcgactcaatgaggctatggaatctataggagataactcatatgttaagaatatgttggatcaggtttctttacagcagaagtcgattagcaatatgaatgattcaagtaaggtactcaaggactctattaacaatatatcacaggctatgagtgatataagagataatacacatgatatgcttcatgcatctcagagcagttcgactaatatgaatgatagtataagagttgttaatgaatcatcagaaaagatagctgatatcaatactcaggttcaggcatttcatgagaagattaataagattggtgagattgttgatattgtaaaaaaggttgcaagccagagtaatcttttagcacttaatgcatctattgaggctgcaagagccggagaggctggtaaaggttttgcagtagtagcagaccaggtaagacaactttcaagtaacacagcagaatcagcagaagatatagttaagtatgttaatgaactcaagggtgatatagaagttcttgctacatctatggaagaaactactatgaagctttctgagggtaatgaaaaagtagaagtatcattaagagatattgaacatatgaatgatcagatgacagctattaatgattcagtagaaagaatatttgatgatattgacagacagtcagaaacaacaagagaatttacagatcaggttggtaatatagcagatacatatggtatgctcactaaggaatgtacagatacaggaattcatatcttcaagataggaagatatattgatacatgtagaagtgatatgttcagggaagcgggagctgttacaacacaggatatgttaagaatatttgagatagatcactttatcctgatgtggagagtatataacaatgttgtagatttcgaaaaactaaagataactcagcttaataatccggatacctgtaagattggaaagtggatgcatgcgcagactgatccaagaattacaggaagcagtcagtttaaacagcttgattcatctcacagacttattcataagtatgcatgtgagtcatggcaggctaaggaggaaggtgatgttgataagtcacttgaagcattccagaagtgttatgatgcttattacgtatacaagaaagctattgctgatatgaagaacttcatgaaatcattaggatatacagatgaaactaagatagtggtattcagaaactaatgaaatataagtattaagatatgaaagttatataacaaatataaaataatcaaaaaggatctggtataaccaggtccttttgttttaagtgataaaatgtcagaggattgcaagaatatgttgaaaatcaatggaatgttgataataataacgggatgtgctattatttaaaaatggtttggattggttaagtattatattttataatagctgtataaaacagattaatagagaaggttagttatataaaatatgataagcgagggaagtgtatgaaagagatatatgttataggacataagaatccagatactgattcaatatgttcagcaatatgttatgccagattaaaaaatattgtgacaggaactaatgattatgtgcctaaaagagcaggacatatgaatgaagaaacgcagtttgtgctctcaaggtgtaatgtaaaggcaccagggtatataaaagatgtaagacctcaggtccgggatatagatatcaggcaaatcgaaggaatagacgaggattattcagtaagaaatgcatggaaactcatgaaagagctggatgttgttacactgcctatattggaggataaccatcttaagggactggttactattggagatgtagcaaagtcttattttgaaatgtatgacagtgatatactttcagtagcacatacaagtcttaagaatattgttgatacattaaatgcagaaataataacaggagatccagataaatgttttgataaaggaaagatgcttatagctgcagctaatcctgatatgatggaaaacatgattgacgaaggtgattttgttatacttggtaacagatatgaatcacagctgtgtgcaatagaaatggaagccggctgccttattatatgtgaaggtgtaaaagtatccaatactatagtaaagatggcaaaacaacataactgtattataatatcaacagcatatgatacatatactgttgcaagacttcttaatcaggcaatacctgtcagtttttttatgaaagatacagctcttgtcaagtttaaaatcaatgattttgttgaagatatccaggatattatggctaataaacgcttcagggatttccctattgaagatgaagaaggaagatatattggcatgatatcaagacgtaacatcattaaggcaggaaagaaaaaagtcatacttgtagatcataatgagaaatcacaggcggtatttggtattgaggatacatatatattagagataatagatcatcacaggcttggctgtattcagacaataacaccagtatttttcagaaatcagccattaggatgtacggcaactattatatatcagatgtactgtgaatataatatagatatagataagcagacttctgctttgttatgttcagctatcatatctgatacattgatattaaaatcaccaacatgtactgaatatgatgttgaagcatgcaatgcccttgccaaaatagcagatatagatattgaaaaatatggcagagagatgtttagggcaggaagtaatctttcatcaaaaacagaggaagaaatattctatagagatttcaaaaaattctcaatcggagaattgtccgttggtgttggtcaggtgaattgcatgagttatgatgaaattcaggtaatcattgaaaaagaaaaagattatatggaacatgtaacagaacatagcagtgagattaatattgcatatctgcttataacagatgttatgaaggaaacatcatacgttatgtatgccggcaaaaatgcagtaacagtattaaaaaatgcatttaatcttgataatataagtgataaatatgtggctcttcctggcgttgtgtcaagaaagaaacagtttcttccagcagtggttgaggtgttgcagcagtaacatattaatgctgtttattttgtaatataatacagtaacagattggagagtaaataataaaatgaagaagttaatgagaaatgacccatgttggtgtggaagtaagaaaccttattgtgagtgtcatatgaattttgataaaaaaatagagatgtataaaaagaagtttcataaggttccacctagaagcataataaagaatgaagaacagcttcagggcatgagagagagcagtaagataaatatagctgtacttgattatgttgcagaaaatataaaggctggtatgacaacgcaggaaatagatgaaatggtatatgaaaagacaacggctatgggaggtattccagcccctcttaactatgagggatttccaaagagtgtatgcacatccattaataacgaagtgtgccatggtattccatcatcagatattattcttgctgacggagatattgtaaatgtagattgttcgactattcttaatggttatttttctgattcatcaagaatgttctgtataggaaatgtttcgccagaacataaaaagcttgttgatgttgctaaagaatgtgttgaacttggacttgcacaggttaaaccatggggacatcttggtgatgtagctgatgctataagtaaacatgcaaaggaaaatggttattctgtagtacgtgaggtcggaggacatggtataggtctggaatttcatgagacaccttttgtgagttatgtaatcaagaagggaacaggcatggttatggcaccaggaatggtatttacaatagagccaatgattaatgctggatatcctgacgtatatgttgatgatgacaatggctggactatatatacagaagatgattcatattcagcacagtgggagataatggttcacgttacagatgatgggtatgaggttatgacttattaattaagacttcacatatctaaaatgggatttaaaaatttttaaaggctcgacattatggcatccattaggatgtattaatgtcgagcctttattgaattttaaagtttacatcctgtatcctttaatgttgcacgtactagagaatctttcgcatttttccatggtgcatcagcatatttatgatcaaatttgttgataaaccattcaacatcatcacgcactcttttcatattatcaagatatagtgtagtgataagattcgtgaattcagtgtaatcatttcctccaagtttttcacttgattttttcataagaagtccataatgacttgtacagaagcctttgcatctggaaagaacgtctttgaattctttatcatgtttatacatgtaaaatatagtatcaacataacgttccatagtgtcagctattttatcgcatacaaagcaggaattatcaagttcttcaatataactgcacacagaagcttcttttcctttttttagaagactccttccagaacccttatcctgattaaaagcctcaatatttttaatgacataatccatatgtgttttcatgacgagtgcataaccaaggcggttgttctgctcatatatttttttgatatgtttctgacagaacccttttttatcggtaacagcacgtatatcatcttccatatagcttggacccatagtatattctatggcatcattttcaagttgttcaaacatagcacatacaggacattcagtgtctgccaaaaatgcatcattgacaggtacgttatatattttttctttcatagtaatcctccattcttgcgctgtttctttgcgcatctcaagtttgtgcgaagcacaaatcttgcgtgtgaaaaatcttattttcacactaagacgccatttcttatctgatatagttataatggctgccgagttaaacctattattaaaaataaactattttagttgtgtttgtcaaatcggcagccacataataacgttactttttgcaactacagtttttatcaaattcaggattataaaaataataattattagaatcaagcttgctctgtataatagaaagtgcttcgccaaaacgctggaaatgtacgatttcccgctctcttaaaaatcttaaaggatcgagtacatctgggtcatcttttgaaagacgtataagattatcatatgttgttctagctttctgctctgcagccatatcctcagttatgtctgttatagcatctccctttgactggaattcacaggcattgaatggaattccaccagcggcctgaggccatacggctgctgtatgatctacatagtaggcttcaaaaggagttcccttaatctgttccattgaaagatttcttgtaagctgatgaaccattgtgctgatcatttcaaaatgtcctaattcttctgtacctatatctgtaagtagtcctgatacttctctgtaaggcatagaatatcgttgtgaaatatagcgcatagatgctcctaattctccgtctggtccaccatactgcgagataatcattgctgccaatgcaggattcgtttgctttattttaacgggatattcaagtcttttttcataattccacatatcaacatacctccatttcccaaggcatcggtgttgaaacccacatccagtagttatcgttagatatgtgaagtttatcaagaggtccataataatctgcatattttgtcatataattgcaatatttatccctgatctgggcataatattctatagcttccatatcattaggatgtgtatcaaggtaaagattagtttcagttaatataaaaccaagctcatatatattcttcattagtgcatgcttgtcggcaacgatattacaggaattatttctttgcgataaaggcataggttgaatatttgtacatgaagagcgtcgctgcatatccataggtgtattacaattaacattcattgactggttgttcatattgtttatattattcatgttattcacagtattcatgttgttcatgttactcatgttattcatagtattcatgttgttcatattactcttattatttacattattcatgttctgacacctccaaaaggtttgttaagaacaggaaataaagtaccatattttaaagctctgcatgggtcatacaattctccccatttctgccatggtacatagcacatggcaagagaaaatgtattctgcattttcataaacatactccagttataaagaattcattacattatatgtaatatatttttagatgacacagatatcatatcaggttataaaaacaaatggatagtgtcaaatgacatatgaaaaataaaaagatactttttgattattacatgagtgtagtgtgtatgtatgctatatataaaactgtacacaaacctgtatattacaagctgttgtatataaagtcgtgagttgtatataaagttgaaaattaggtggaagtcaggacagctatgtgatatgattaattgtaattttacgatagcgaggattaattatgtgggacaaaattaaagcatttttaaagaaaaaagatgttgaagtatcggttaaaagatatggaatagatgcacttggggcaatggctcagggattgttttgttcgttattaataggaactatactaaatactctgggaacacagcttcatataggatttcttactaatacagttgcaacaataagtggtgttaattatacagttggaggtcttgcatcagccatgagcggaccggctatggcggtggctatagggtatgcactgaaatgtccgccacttgttcttttttcgcttataacagttggttttgcatctaatgcattaggtggtgcaggtggtccattggcggtatattttgtagctattattgcagcagaagcaggaaaattagtatcgaaggaaacaaaggtagatatacttgtaacaccattaataactataggcgtaggaacaggtgtggcagcattgatagctccaccgcttggaaaagcagctatgaaaataggtgaggttataatgcttgcaactaatcttcagccttttcttatgggaatagtggtatcagtgcttgtcggagcagcacttacattaccgatatcatcggcagctatttgtgcggcatttggacttacgggacttgcaggaggagcagctgtagcaggttgttgtgcccagatgattggctttgcggttatgtcttttaaggaaaacggatggggtggacttgtttcacagggaataggtacatcaatgcttcagatgggaaacataataaagaatccaaggatatggattgcaccgatagtaacatcagcaataacaggacctgttgcaacatgtcttttcaaactgcagatgaatggaacagcagtatcatcaggtatggggacatgtggttttgtaggccagataggtgtatattcaggctgggtaaatgatgttgcagcaggaactaagagtgcaataaccatgatggactgggcaggattaatacttatatcttttattttgcctgcagttatatgtccacttataaattggctgttaaaaaaagcaggctgggttaaagatggagatatgaaactccagtaagcagaaaagagtaaaataaaatgtgcagtggtgaatatgataacatatggaataaagattatatatcagtgataaagtcaaaaagacgttcaataggtattgaagtccacatggatggaagagtcatattaagagctccgtatacattaagtgaaaaacagcttgaagaattcgtggataaacataagcagtggattgaagaaaagcgacgttatcttggaagtaaagctaaagaaggaatatcaaccaatgcaaagaaaaaagatgaacttactaaagatgaaattaagtgtattaaagaagcatttgagaaacgtgttatatattacagccatattatgggagtgacgtttaaaaatataactattaaaaaccagaaaacaaggtggggaagctgcagctcaaagggcaatctgaactttaattatcagctgtattatatgccacaggagcttatggattatgttgtggtgcatgagcttgcacacagaaaatatatgaatcattcaaaggaattctgggcagaggtgaaaaagtactgcccagaatataaggaaagaaaaaatgtcctaaaaaaatacatattagaaacatagaggcatattgcagacacatattagtaagtgaatgttacgttatataaagtataattatttctaggtacatttttataagtatatgataaagcttcaccggtttttgacacagctgtttttaaatcagttgtgaatgtgcaggcgaattcaagatgagtctgtttgtttttaaccgcattacggataagacggtttaactgtgaagtgttgcttatcatggttactcctgcatattttacataagaatatttcgttccgcaattctcatattcactgtatttgtcatggttccatgtatggtcaatagacatgtctttagctgtaatattaaagtaagaatgatctgtgtattcaaaagaagaacctataggatcatcccatgttacgtctacatgataccattggtcatccagtttaacagtattccatatatgctgctcgtcaccagcttcaccggacactgttccattttctattccaagcatatccataaatgttttaaaacattcggtatagccgctacatacagcgattccgttaataagtgcactgtatgcattgtaagaggaatcacctgtatcaacataagaaatgtgtttgacaagataatcatgtactgcaagttcattttctatatccgaattagcaggagatgtaatctcgtttaatatctgtatgtatttagtatataatgtaagctggcgttcatttagtgcatctgttgaaccggttttatatgcattgattatagaaaaactatcccagcattcatatgtaatgcgtacattaaaaccgtttttaacacgtttatattcacattttaactgttctatgccatctatggcagcaagccatgaattagcatctataagagattcgtcttcaatgaataattcgcatacggtctgattatttattaagcattgattgatgtaatcaattatttcgctggttgatgaggcagatttatcatatgcagtattggatatggaggtacttgactcatcctgccactctgataaaagcggaatattacacccggtaaacaaaaggcttataataattgaaataacggcaaaagacgtttttttaaaatttatatttctaaaattgatttttttaaaatacattgtcattaatctttctataaataattatgttataaattgaatattgtgtgttgtttggttataatctgttatggtaaaaaagtctttttctgcaagtagaaacgactttttatgcttatatcggggcgggtcccaaggtctttcccccccctatgagcaagctcatgtgggtttagaccttttgaccctagtatcatgtatataaaagaatatacataacaattctaatacgtaatctgcaaaaataaaagtatttataatagaacatggaagaaatttataatagaatatggaagaaatattaaaaaaatgtttaagaaacattgtaagaatcaaaatacatctatttaagaatagttaagaaaagaggaataatatgaacgattatgtaataaatacaccgtcagattttaatcttaaagaaacgctggaatgtgggcaatgctttcattttaacatgcttgatgagaatgaatatgtgttgacagcatatggacagcttttacatataagacaggatgatagtaatctggtgttttacgatacagatgagaagatatatgatacattatggagaaaatattttgatatagacagggattatgggaaaataaaagaagaactgcttgcaaaggatgataagctaaaagaagcaatatgtgcaatgtcaggagtaagaatactaaatcaggaattttttgaaacacttatatcatttataatctcacagaataagcagataccacatattaaaaagatagtagcagatatttcagaaaagtatggtacttataaaggagatataaaaggaattccaatgtatacatttccagatgtttatcagctaagagaagcaactattgatgacctgaaggatttaaaaacaggcttccgtgccccatacatatatgatgcagtcagccatgtttatgatggaagtattaattataatgaacttataaagtcagattcggcagcaggaatagaaaaaatgtgtgaaataaaaggtgtaggcaataaagttgcaagctgcgtaagtctttttgcacttggaaaaagagatagttttcctatagatgtatggataaaaaggataatggaatatctttattttgataagaaggatacatctaaggaggttatagcggattttgcaaaaaacaggtttggagaacttgggggatacgcacagcagtatcttttctattatgggaaaactataaaaatgggagttgcagagtcaaaaaaacataaaaaataaaaaaagtataatcaaaatgtaaaaacattaatatatttgaattagttgttgacaaattattggctgggtgatatcttatcgttatcgggattagcactcaaaagaaatgagtgctaacagacatgattatagcaatgataaagatagctgccacacatatgtcagacagcggaaaggtggattatattatgaagttagtaccattaggagacagagttgtaattaaagcattagttgcagaagaaactacaaagtcaggcattgtattaccaggacaggcaaaggaaaagccatcacaggcggaagtagttgcagtaggacctggtggagttgttgatggcaaggaagttacaatgcaggttaagcctggagataaggtaatatattctaagtatgcaggaacagaagttaagcttgatgaagaagaatatatcgtagttaagcagaatgatatccttgcagtaattgaggattaattataaatattcatttatagtgttgattatatcattgattttatttggaggtaataacaatggcaaaggaaattaagtacggaatcgaagcaagaaaagctcttgaagagggcgttaataagttagctaatacagtaagagttacaatcggaccaaagggacgtaacgtagttcttgataagtcatatggcgcaccacttatcactaatgatggtgttacaatagctaaggatatcgagcttgaagatgcatttgagaatcagggcgcacagcttgtaaaggaagttgctactaagactaacgatgtagcaggtgatggtacaacaacagctactgttcttgcacaggctatggtaaatgcaggtatgaagaacttagcagcaggtgctaatccaattatcttaagaaaaggtatgaagaaggcaactgattgtgcagtagaagctatagcacatatgagcgaaaaggttacaggcaaggatcagattgcaaaggttgcatctatctcagcaggtgacgaagaagtaggccagatggtagcagatgctatggaaaaagtttctaatgatggcgtaatcacaatcgaagaatctaagacaatgaagacagaacttgaccttgtagaaggtatgcagttcgacagaggttatatatcagcatatatggcaacagatatggataagatggaagctaaccttgataacccatacatccttatcacagataagaagatatctaatattcaggaaatcttaccagttcttgagcagattgtacagaatggtgctaagcttcttattatcgctgaggatgttgaaggtgaggcacttacaacacttatcgttaacaagttaagaggtacattcaatgtagtagctgtcaaggctcctggatatggtgacagacgtaaggaaatgcttaaagatatcgctattcttacaggtggtcaggttatctcagaagaacttggtcttgagcttaaggatacaacacttgatatgcttggtagagctaagtcagttaaggttcagaaggaaaatacagttatcgttgatggcgaaggtgctaaggaagatatcgaagcaagagttgcacagattcgtgcacagcttgaagaaacaacatctgatttcgataaggaaaagttacaggaaagacttgctaagcttgcaggcggcgtagctgttatcagagttggtgctgcaacagaaactgaaatgaaagaagctaagcttcgtatggaagatgctcttaatgcaacaagagcagcagtagaagaaggtgttatctcaggtggtggttcagcttatatccacgcatctaagaaggtttcagagcttgctgctacacttagcggagatgaaaagacaggtgcagagattatccttaaggctcttgaagctccattattccacattgctaacaatgctggtcttgagggtgcagttatcatcaacaaggtaagagaatcagaagtcggaacaggttatgatgcacttaacgataagtacgttaatatggttgatgcaggtatccttgatccagctaaggttacaagaagcgcattacagaatgctacaagtgttgcatctacacttcttacaacagaagcagttgttacaactattaaggaagatgcaccagctatgccagcaggagctgccggtatgggcggaatgatgtaataagtaataatttactatacatcagtaagttgataaaataaatttaacacttacatcatattaaaaaagtccctttgtttatgttttatattcataaacaagggggctttttgttgtgtaatgtataaggaaacatgttatgctatcaaggctattaagtgaattgcagcagattgagcagattcatatatgtcaggagagcttggtttatgcttattaatagatagttgtttctatttaaaaaagttaaggggtatgttataatactttcatattgggttttagttgtcacgcaggaggaatggtaatggctgatattgatgagcttaaaaagaaacttgaagatggatggataaagggtgaaccttatgtatttgtaagttatgcaagtaaggataaagagaaggtttatgattttgtatatgagcttagaaaacgtggaattaatgtatatatagatatagagcttcaggagaatatttctaagaactggttacagaatattaaggagcgcttatatgatgttgattgtgttgctatgatttcatttcttagtattagctatttccgtagttatgcctgccttatagaacagcttgtaacacgttcagaggatttaaagatggaaaaaggcaggtatcttgagaatttttatattgccttggatgataatatgtctacaatacaaaaaatggaagatgcagtgtatgataatacagttgcaaaagaaagtcagagtatggcaataaagatggttccagaggaagtaaatgtccttaaagatgttatggaagataatattgcagtaaagagcaaattaaagaaagatgtcaggtcaactatagatggtctgaatacagcacatagagttgcgataagtatgcttagttatatttttaaagagtcaagctatagtattcagaaatatggaacagctggtgattgcgcacagttaatgtataacaattttacgaatgacaagaatgacaaaattaatattgatgtattggagaaacttaaagaaaagtacaacaatgatagtgttgctgataaaaataacatagcaatagacagtgttgctgcagatgattctgtaacagcagtagataacaccaatataacagataataccagtataacagatagcacacatataaaagataacaccaggacaagacaggctacaagtacaggtgatatcagatttacgctttatggcaaggagtatgagcttaatcagtcagatatgatgcttacattttttgcacacgttcttaacaaacatcaggatattgtggacgaacttccttcatataatgggatgacatgcgtgtctgatgttgattacagtcttcctaagaatcgtaaggcagatatgcctacatatttcagaagctgcgaattctttgaattcgctaatggaagccatatatgcgtcggaacatcatattcagtagtagacaagttaaagaaaatggcacttctgcttaatatatgtggtgaaagcccggaaatattcagttcagaacaggttgaacttccagcggtaaaggtcagaggcggttcttctgctgttggcaagggaagtggagcacttgtgaaattcagcgtatacggcaataaatacgagcagaatcagacagatatgcttggaacaatatgcagttctgttataactaagcacccagacaagttagaggaagcagcagatgctttattatgtattgatgttaaagattatacagatgttgccaaagaagacagaccggtatatttctcatcaatgaacagatatgaagtaaatggcacagcttatagtgttggtggaagcttcggaatgaaagaaaagcttaaaatgattgccagattacttataatgtgtgacgaaagcaaggatataattgatatagaagactatgagataccagatgtaaaggttaaggcagcagcaggcactaagaagaaaattaattactttgattaattggaagtattacaagataggaggctttatgtttgatatagcagtagaacagatagtgaaggtaaaaccacctaagacagcagttgtttataagactttgcttataataggctgtattgtggcggctacaaccataccacagacaagaacatttggaataattgtgcttgcattatttgcggtgatgacatttttagtattccagtattataatgcagagcttgagtattcgatagtggatgatacgcttacgattgacaggattatggcaaaatcagcaagaaaaagatgtggtgtgtatacactttcaagagcaaagcttgtggcaagagctgattcgcaggatgcactccgtatgaaccatatggacgttaagacttatgattattcagttggtgcaagcaatcatgattcagttgtcatatatgcgtataatgaacataacgaattagtcagggtatttatatatcctgatgaacgtgttcttcatagcatacaaaatgttgttgaaaaagatgtgtttaaagttattgacttttaaaaaatgctctgatacaatcttaatattataaacaaaaggaatatgatagagcgtttatcagatttctccacacagaaatgtccgaattgagtattcggatttttttgtataatcctatgatgtatctgttgtcaggttaagcgatgtagtattaatacacaccgctttataatacatcatagcattagaagcatattacaagaacaagaaagcgaggacaaaggaaaatgggtacaattattggcgagggcattacatttgacgatgtgttattagttccacagtattcagaagtaacacctaatatgatcgatttaacaactaatcttacaaagaatattaagcttaatattcctttgatgagtgcaggtatggacacagttactgaacatagaatggcaatcgctatggcaagacagggtggtataggtattatccacaagaatatgtctattgagcagcaggcagaagaggtagataaggtaaagagatcagagaatggagttatcacagatccattttacttacatccagataatacattaaaagaagctaacgagcttatgggaaagttcagaatatcaggtgtacctatcgtagatgagaacaagaagcttgttggtataatcactaacagagatcttaagttcgaagaggatttctcaagacctatcaaggaatgtatgacaagtgagaatcttgtaacagcagaggaaggcatcacacttgaagaagctaagaagattcttggcaaggcaagaaaggaaaagcttcctattgttgataaggatttcaagctgacaggtcttatcacaatcaaggatattgagaagtctatcaagtatcctgcatctgcacatgattcgcagggaagacttcttgcaggtgctgctgttggtataacttctaatgttatggacagagtagaagcacttgttaatgcaagtgttgactgtattgttatagattcagctcatggtcattcaaagaatattattacaactttaaaggaaatcaaggctgcatatccagaacttcaggttattgcaggtaacatagctacaggagctgctgcaaaagctttatgtgaagcaggcgtagatgctgttaaggttggtatcggacctggttctatatgtacaacaagagttgttgccggtattggtgtacctcaggtaacagcagttatggatgcatatgctgaggctaaaaagtatggtattccggttatcgctgatggtggtataaagttctcaggagatatagttaaggcgatagcagcaggcggtaatgtatgtatgcttggaagtcttttagcaggctgtgacgaagctcctggttcatttgagttattccagggcagaaagtataaggtttatagaggtatgggttctattgcagctatggagaatggtagtaaagacagatacttccagacagatgcaaagaaacttgttccagaaggtgttgaaggacgagttgcatataaaggacttgttgaggatactatattccagcttatgggaggactccgttcaggtatgggttactgtggagcacagactattccagtacttcaggagacagctaagtttataaagatgtcatctgcagctttaagagaaagtcatccacatgacatccatattactaaagaagctcctaactattctgttgagaatgcttaaataatataattgatatcggggttaaaagtaacctcttatcatatttaaagtgtaaaataagtttccggcatggcaaaattgtgactagctgtgccggttttgttatgtgcagtagttaagaatgtgaagtattttctaaaataccagtaagcagcaagcaatatgtcaattttcaatcaattaaataaaataagtgattgctaacttgtatcttaatgatgtataatgagttaaaagttaaatgaatcgaaaaaattataattgacagataatcaggtatgaggagagcgatgatatgcgggacaagatgattaacaaatatattgccaaaaatcacgctggaactgtttttactgatagtgaactgaaggttatcaaagaaggtaacatagatgatatggttacaacatttcttgatatgaacacagaatactacaacaagcagatgcagagtgtacttaagatatttactcagtttataggtaatgatatggaactggaaagaattatatatcaaaaggagtacgagggaaagtttgtaggctgccagcttatggacggagatatagatgtatttcttggcatagcgggagatgatgacgatcttttatgtgttgcatcagtattttcacaggaagagctgagtgagtttgattcagatgcttatgattcaatatgtgagcttattaacgtgattaatggtgcgtatgcaacaaagctcagctatgaagacatagaagttgcattgcatccaccagtattttataaggatacacagattaaggcagataatggaatgtatgtagttacattttcaatgaagggccatagatttaatctgattatggtggcagatgataagattaagttggaagtttaaggtgtaagcatataccagattataaagtgggaacggaggacgattatggctagaatattgatagtagatgattctaagacatcaaggaaattcttaagaaatatgcttgaacaggcaggacatgagatagttgcagaagcagtagatggtgcagagggtgttgaaaaatttaaaatatacagacctgatattacaacaatggatattacaatgccaaagcttggtggaattgatgcagttaaagaaataatagatgacgatccggatgctaaggttatcatggttacagcagcgggacaaaaggctaatatgatagaggcgcttaagatgggtgcagctgattttatacagaagccttttgagatggatgttatcgttaatacagttgaaaaggttatggaagaataatgtataattataagttacagattcaatatgatggtggcagatatgatggatggcagcgtctgggtaaagattcatcatccaatacgatagaagttaagattaaagaaataattaaaaaaatgactggcgaggatatagatatatatgttggctgcaggacagaaaagggtgttcatgcacttgcgcaaacagctaactttaagttaaatgacaggtatcaggctattgagattaagaattatcttaacaggtaccttccaagagatattgcaatcaatcatgttgaagaagtggatgaaagatttcatagccagttgaatgcaaaggaaaaaacatatgtatacaggctagatatggctaatgtagcagatgtgtttacaagaaaatatgcatatcatacattcgatgtgccagatatatcagccatgagaacagcggcgcagtattatatcggaagccatgattttaaagcatttacaactgctaaaaagagcaagtctacagtaaagaatgtcaagtcagtagatatagatgtagaaggtgataaatgtaatattacaataacagctgatgattttcttcataatatggcaagatatatgataggcatgcttcttgatgttggtaacggattaaagaagacctcagatatagaagctgcacttgatggaagggatgttgttatgtcacttccagctgagagctatggactttttcttgaaagtgtcttatactaaactaaatacagctttatatattattgttcagaatagttgaaaacctaaaactgagcagtgatgtagtagtgttttatatggaagctgtcgcaacgtaagtagtttatatatcaatatataatcaacttagtgcaacagctccctttttatatttattatatatgcatcaggtgatataacaactgaaaagcaaataaaatcaggagtggagattatatgaagaccataatagaacttatgacagaacaattccagaaagcgtttgaggaatgtggatattctaaagattatgcaaggataacagtatctaacaggccagacttatgtgagtatcagtgtaatggtgctatggcagcagcaaaggcatataaaaaggcaccttttatgatagcagatgaagttgtttttaagcttgcagataacagacttttctcatctgttgaaagtgttaaaccgggctttatcaatataaagattagtcctgaatatcttgctggttatatgaatgatatggcagcttctgataagtatggttatcagaacaatgaacaggttaagactgttattgtagattttggtggtgctaatgcggctaagccacttcatgtaggtcatttaagatcagctgtcatcggtgaaagcgttaaaagaattaacagatttgttggcaacaggacaataggtgatgtgcatcttggtgactggggacttcagatgggacttattatagaagaattaagggatagaaagccggaactgccatattttgatgcttcatttacaggtgaatatcctaaagaagcaccatttacaatagcagagctggaggagatatatccagcagcaagtgctaagtccaaggaggatgaagcttttgctaaaagggcgcacgaggcaacacttaagcttcaaaatggtgataaggcatgcagagctatttggaatcatattatgacggtttcaaagaaagatctgaagaagaattatgataatcttaatgtatcctttgatctttggaaaggcgaaagtgatgcgcagccatatatagatgaaatggtagataagatggttgatgatggcatagcatatgaaagccagggggctactgttgtagatatagcagaagatacagatactaaagaactgcctccatgtatcgtaagaaagtcagatggtgcggcactttatgctacatcggaccttgcaactatagtagaaagagaaaaactttataagccggacacatatatatatcttgcagataaaagacaggagcttcactttacacaggtattcagaaccgcaaagaaagcaggcatcgtaagacctgatgttaatatgacatttgtcggatttggaactatgaatggaaaggatggcaagccatttaagacacgttcaggcggtgttatgagattagagcatcttattgctgatattgataatgcagtacttaacaagataaaggaaaatcgttcagtatctgatgaagaagcagaagaaacatcaaagatagtaggtcttgctgcacttaagtatggggatctttctaaccaggcatcaaaggattatgtttttgatatagacagatttgcttcttttgagggaaatacaggtccttatattctgtatacaatcgtaagaataaagtctatacttgcaaaatacaaggaaaatggtggaagttctgaaaatattaatatactacctgcaaaagaagcttcagaaaaaacgcttgcattgtcacttattaagttttcagatgtgatagaaagtgcatacaaagataatgcaccacatagaatatgtcagtacatatatgaagtatctaatgcattcaatggtttttatcataatacaaagatacttgcagaagagaatgaagaacagaaaaagggttatatagcacttattacacttacaaaaaatattcttgaaacatgcacagaccttcttggcatcaagtgcccagaccgcatgtgataccccagggtcgaaagtgtgaccgctgttcgtgcttgcacgaaaaagcggtaacattttcgacccgcacaaacatgaggaagaagcgaaacgatttttttgaaattaaataggagagattatacatatgaagttattatcatttgcaattccatgttataactcagcagaatatatggaaaaatgtattaaatcatgccttgcaggaggggatgatattgaggttatcatagtggatgatggttctacgaaggataacactttagaaatagctaaaaagtatgaagaacagtatccaggcatcgttaaagctgttcaccaggagaatggtgggcatggtcaggctgttaacacaggacttgccaatgctacaggagtgttctttaaggtagttgatagtgatgactgggtagacataaaaagttatagaaaaatacttacaaagcttaaggaattcgtagaaaaagatgaccttcctgatatggttatagctaactatgtatatgaaaaagtaggcgctaaaagaaaaaaagttattcattatgagaatgcactcccagttgataagatgtttggatgggatgatatggggcattttaaagttgaccagtacatacttatgcattcagttatatataggacacagcttattaaagattgtggattagaacttccaaagcatacattttacgtggataacgtgtttgtgtttgaaccgctaccttatgttaagaaaatgtattacattaatacgaatttttacagatatttcataggacgtgatgaccagtcagttaacgaaaaggttatgatatcaagaatagaccagcagttaagagttacaagaaggcttatagattcatatctttctgagaaaccagagaatgagaaatgtagaaaatatatgagaacatatttaagaattatgatggaggtttcatcaatattcttaataatatccggaacagaggagaatcttaacaaaaagaaggaactctggaggtatgttaaagacacagataagcagctctataaggaattaagatatagtcttttaggaagtacagttaatattcccggacgtataggaagaggaatatccaagacaggatataaggttatgaataagctgataggatttaactaactgcaatgagcattgtttagttgttatttattgaagatttatttcagaattaatgcagcagataacaggaaatataaggaaagagagagtatatgatattagatttatttaagttagataataaggtggcagttgttacgggtgccaatacaggacttggacagggaatgtgtattgcgcttgcacaggcaggagctaaggtgcttggagttgcaagacgttcatgcgaagaaactaaagctaaaatagaggcagatggtggtatatttaccgaagtattagctgatctttcagacatgaattctatatctaaggttatgacagctgctatggatgtatacggaagagttgatatacttgttaataatgcaggtcttatcaaaagacaggatgctatagatttcacagaggaaaattgggattcagtcatacaggtaaatgaaaagatggtattcttcttaagtcaggcatttgcaaagcagcttataaagcagggtgaaggcggcaagattatcaatgtatgctctatgctttcatatcagggcggaataagagtaccttcatatacagcaagtaagagtgctgttataggtcttacaagagccatggctaatgaatgggcaaagtataacatcaatgtaaatggaattgcaccaggttatatggctactaacaatacagcccagttaagagatgatgcagacagaagtgaagctattcttgacaggatacctgctggaagatggggaacaccagaggatatggaaggtgctgtagtataccttgcttctaaggcatcagactatgttaatggtttcacacttgcagttgatggaggctggcttgctcgttagttaaatgcgggtctgtcagtactgattaaagtgctggcataagctgcattgatgaggagtagaattgtatgaggatagcattgtgcgaagatgatagtgtacaggcagatatgtttgtcaggcttcttgataagacagcggataagcttggaataaaagcagaaacagatgtatataactgtgcagaggatatgaaagaagaacttaatgataagaatatatcatatgatgtgtattttcttgatatagagcttggcgatgataatggaataagtcttgcaaagtggataaaggcgggatataagaaggctgttatagtatttataacaagccatacggattatatgcagaaagcatttgatgtacatgcatttaactacatagtaaagccggcaggtgaagaacgtcttagtatgatactcagcgagattaacgagttgtatataggtgatggcagcaagttcatatttcatataggaaagtctgtatacaggatagactataatgatatagtgtgcatatattcagatatgcggtatatcaatatcgtaacatctggtaaagaatacaggacatatggaaagataaaggatatcaaagaagaattcccttctgatatgtttggaatggcaggcagttcaatgcttataaactataagtatatatcaagaataaagtcagatatggtatggtataagacagggcgtgaaagcgaggaagttccggtttcgatagcaagacgttacagcagggaattcgttgatggctttaataaatatgtgtctgcaatataagcgtggagagtactgatggtgtgggaatattggtttatacttcttggaataactgaatacataatatatagaagctttatcaagtccctgaaatatacaggcgaatatgatacagataacagtatacaggaaggaatacatcacaacataagatggctgatagccattgatacaaagcagctgttaaaaagcataataataatggcagcgataagtgtgagcctgtacagacttatattatatgatgattatatagtgtgtgctgtacttgcggttattcttattatattgaatatatcggacattcccctgctgtataaaaatatatcggcagtacttatatatgtaaatatgcttattaatatatcagttgtcataaaagctgtatggagcataaaacgtaacagtatagtgtatactgaggaaacagcatcgatttatataattccatttattatatttgtaagtataataatgttgtttgcatttatcagatataacaattatagaaaagtaagcgtaagcaggattacggatatagctgttataatgacggttgtcgtacagaatataattcttatgatggtgtataagttaatgccgcagcagataaatgacaggtatgtagtatatgtaatacttatgattgtgatatgcatagccaaggatattgtatgcataagtatgatagagatagacacaagcgcacgccatagctatgaggaagatattcttaagatacagatagacacgaataacaggctgtatggtaatatcaaagaggcacaggaggagcttaaggacataagacacgaccttaagaacagactgaatacgctcagttatgccatacagttaagggattatgatgaagccgaaaaagaacttgataatatacttgataatattaacacagccgggcagccaaagtactgtacgaacttaagggtcaacagtatattgtcatataagttatcagaagtgccagaaggtgtaaatataacctatgacgtgaaagtgccagaggagctggatgttgattatagtgaccttggcgtgattataggcaaccttatagataacagcaaacatgctgtaagccgtgtacttcagaataatatggatgcatatatagatattaagcttatatgccacgcagataatatagtatttattataaagaataattatataaacacgccggaagccagaaacatagattattataaaaatcacggcagaggtataggcagtgtcaggaagataataaagaaatatgatggaatgtatgatgtcaaaaaaacagaatatgagtatgtaacaagtgtgtcggtcggagtaaggaatatgagaatgtaagtatagggatatattttatataccagcctagggatgtcaggggaagtatctgatgttgaaagggctggtatttttgtgttaattacatatattatacatataaaaatatgaaataaagtatataaaattggattaaatatactgaaaaataacatttattgaccaaatattacaacaaaacctaccaattattacaaattgaaaaaatagatgtttttgtgtggtagaataaatacaacggaaccggttctataaagttacttattaacaagggggttactgatgattaaatcagaagcttgaaagagtaaaagaagtaaagcttacttcttaatcggttggggataataattcccaaccgattgaattataaagagaaaaggatagggggaagaatgagtttatgaagaaaaaaagcgcaattattatgataagcattacaatcttaacttcacttactggatgcagattaactaatatagatgatgtatattctatggcagatatagaggatgaaaagaaaacaacagtagttgttgataataaggagtctaaatggcatgatgataataagtattatactatacctgaaggggtagatataccgccgatggtaaatatggatgatacaataaatgaaactagtaataagaataaacttgaatgtaaaatagaggaagcatatgttacaaatgattttacggatgtatatttatatgaggatagtgaaagcatagaacagttaataatattcttaaataaaatgaagaaaaatgagtatatagatgaagctgctaatatatgtagtagtcccaaagggatagattggcaaatgattatattcagacttaatataactaatacagggaatgaagatagtcagtttttaacaagtgattttaatttttatgatataaaatatgataataataacctgcaatataatactatacatgataataattttaaggggttctttataaaacctgatggatggggagaacatgaattttgcagggcaacaataaaagcaaaagaaagcagagaaattattttattatgttttgtggagaagtataaagttacaagatatagagggaagaatgtaacaggatataaatatgtgtatgaggatgtagaaacagacggattaatgcttgataatgatatatacataggaactaatcacggaagtgatgctaaaacaggtagtccagaaatatggaatgaagataaattactaaagcttgattttacatattcagacaagcttaagtaagtagttaatattctgcatttaataatgtatgtggctgggaggttgatagaatgaaacagatgctaaagattgaaatggagcgggcactaaaaggagcagcttttaagattgcgcttattataggaatgataatagttacagtgcagtttgtcaaagtggggctgcataatgcacttaatccgctggagttttatgaatatgggggactaactcttccatataccgttatttatacgtggataggtggaagttttaatgtttattatacgttgtatataagattacttcctataatggtagttctgccatatgcagctacatattatacggacaggcgtacaggaattataagaaattattattgtagaacgaaaaagattaattaccttatagccaagtttaccgcagtatttacgacaggtggaatagtggcagttcttcctttacttgttaatcttttagcaacagctatgctgcttccttctatgatatggagtaatggttcattttgttattcagcaaattctatgtggagcagtatattatttacacatccttatgtatattatctgttgtactttatattgcagtttatatgtggtggattactggcgacagtttcgcttatggtatctttatgggtgaataatacatttatagtattactttttccagtagtgctatgtgaattcctgaatgcagcttcaagctggtttccgtatgtgaaagtaagagcgattgctccatacaagctgtttagtatgagccagatggctcctaattattgggaaagttatgttttgtttatggtgatgatagttgtactcgatgttgttttgtatatatggcgggggttgaagaatgatacattttaaaaataaaaaagtaaagtatggcatattattatgtgtggcacttgttttggttatagtgtttatattagcttacagaaatgccaacacaagactgcctgctccagttgaggagtactatgaagcaggagaagttgtagagcataatggattagaaatatgcgtagctaatctttattttggcaatatgaatgatattgttgataagaagaatatgccggaaaagatgagaagcgataatgatggattggtcattgtttttgatgttacaaacaaaaaagatgagaatgtcaatctggcagctgattttgtacccaatgtagagcttgtggcatatcctataggatatgataatcagggagcgatatatgcagtagatgaagaaggagatactatattaaaaccagaggaaactaaaacatttgctatacgctttggtatgtctgatggtctggtaagacaggaacgcagggcaagatttataaagtcagacttttactttgatatggcattatatccggtacataaggcgattataatacatggagctgaaaaggtatgagaaagataagggaattactgagtgtcaatgacaagggaatgtccatagtaatgcttgttgttataactatattgttacctaatacaatattaagagggctgggtattccgtctgatacagaagcatgcctgtatgatgtgtatataggtattggcatatattatgtgagcagactgcttacaatatgttcattgttttatatattgtatgtacagagatataatttttcagtaatgatgattacgaggcataaacatatatatagtatatggaaaagatgtgtgaaggaccttgcaatacttagtgcagtcatcgctgtatacatatatatagcaacaactatagcaggcatatgtataaaacgaaagatatataactgggaagatgaggtaagtacgtgttataaagccatacatatgccatgtgaggcagcaccttcatttgcacttataagtgcagtttttatattacaggcatttgcagttatattcgttatgggactgattatgcttgcggtatggtggataacggataagaaatgggctggctatcttgcagctatggttatagtgagcgttgaatattatgatgccgatggtgctataagcactggtcttctatggcgtaagtatgtgatgacttattctgtatataaaaaggggatattattaggaaaaaatattcttatgccgatagctgtgtgtatagcgatgctgcttgtcacaagtcttatagtcagattgaagaagaaggaattcataaatagccgatagaatgtgatgattgcagaaagtgtcgtaatcccaatataaaaagagccgtgacacggctcttttttattctgtatacagttaaaaatgcgttatactaataatagttaatatgctaacttacacttattaagatccacatgttctttgataaactatccagtaattgctttaatatcttctggcatatcttttgtgttaagcataacaattctctttttttagcaaaatagtttacaaagttcagaaaaatagtttataaagtattgttaaaagattacaaaaatggtaatatatatcaatgttagaaacatattaagtggggcgttccccacaagaaccaatagggaggtttataagtttatgagaaagacagttaaaaaacttactgctgtaggtttaacacttacttcagtaatggggcttgttgcatgtggaaacaacaatgcttcaacagaaaacaaatcaacagtagattgggcaagcgtagaaaagccagaagctttcactgttatggttgatggtacagttcctaagatggcagattggggtgacaagtttgatgaacagctcaaggaattaacaggccttgacttcacagtagttcgtccagaccacagctcatactatgatgcagtagcaaactcaatgcttgatgcaaactctatgccagatgttcttattctttcatctgactacttagcactttatgctaggcagggtcttctctgggatatgacagatgcttggaacaattcagcaacaaaggcatcaggaagacttgtttcagatgcagaaaagatcatggaggctaactatgttaaaggcgttgatggggagaaagctctttacggtttcgtacctgcgcgtggtaacggatgctgtacatatgtaaaggaagcctgggcaacagctgctggttatacaaaggcagatcttcagaagcagatgacatatgatgaatactatacgatgcttaagaagatgaaggaagctaagggcgttgattatgtaatttcagctcctggtttctattcaaaggaagtaccttatacaaactatcttcctgaattctatcagaatgcacagtttacattctactatgacaaggctcagggcaagtatgtagatggtttctcagaacaggaaatgaaggatgctcttcagagaatccagaacgctgttaaggatggacttatcaataaggaatcaagtacaaagacaacatttacatcacgtaacgacttcaagtcatcagatattaagacagaatcaggtgtatttacatactgggctggaacatggattgataagttaaaggacgaaataacttcatctggtcttgatggctcactcgttgctctccttccaattaaggagcttggtaagtatgcagaaagactttcaccatcatggtgtattacatctcatgcaggtgaaacaggaaaggcagaaggaatctttaagtacttcattgataagatgttagatggtggcgatatccagacactttgggaatatggtcctaaaggatattactacaacgtaaaggatgatggttcattcgaattccttcctactaagtctaaccctaagtcaaagtactctaaggctcatcttgactgcaaccttgttcttgcaggattctctaacggaaaggatccaggaaaggcagaacagccagataaggttacagagtgtgcagaaatgttcttcaagaactctcagttaattgatcctcctgctatgacagaagaagttggtaagcttatcggtgatatcaatacagagagatatacagtagttgataaggtagccagaggcgaatggactgttgatgaagctatgaaacagtatacaaatacagttggttctaaggttgatgcagcacttaagtcattaaatgcacagcccgatgctaaataattagtgatttgagctgcttaatatgtattattagtgatacatgttatcacaaaatatcgtgccagaagactcgttcttctggcacgatattttactattatcggcatggtaatcatgttgttaggtggattgattttatttgttcagtgaggtaaagattgatagtgtaggtgaaaacataatattgcaggattcatgatgaagccatagttaatatgctaacttacacttatttagatctacatgttctttgataaactgtccagtaattgttttaatatcttctggcatatcctttgtgttaagcataacaatcatcttttttccagcaaataacatataatagccatacaggaagtaaactgttgtgaactgttcccattcatatgtgtatacaagattatgatcaggaatatcagctaatatggcagagtccataagtgtaatggtgcatggtgcatcttcagatgaatctctgtgttttaagtggtagtttacgctgttcttaaactggaatgcaaatatatatataggataaaaccagcatatcgcatatataatcagtaaaaatgaattgtacttaccaagtatcagcataacaagtgatatggcagctggtatccatgtaagtataagttctatgggatttcttaagaaacgattccagaatacaatctttttatagtcgtttccggaagctttaagtgtggtattgtacttataaatattattcatataatcttaatgtctcctgtttgtgttatcatatgtatttattaaatgattaaaacacatgattcatttaatcatatcatataaggatgtataaaacaataaatcaaaaattaaaaaaataaaatcaaaaattaaaatccagctaacgtaaaaatcaacaaataatctctcttaaaatgtcagaaaacagttcccaaataagtataaatattatataattactgtatgtaaaacaatccaggaggcaagttttgggtaattgtagtgataagtatgaagtgttatcttcggtgatagaaagcctggagtcaaaagatacatttcagaatatagttgaggttatattacaaaaagctaatgcgtatattcaggcagagtatatggcagtgatacaggagaattcagataaggatatacttgattatattgcaacggtggggaaaacctgtgcgcttatagagcgcgttgagaatggagaatattcgctcaaagagttggaaaaaagtgctggaaaaggtacataccctgatgcaggggggtgcattatcccgattaagattaatgggattaaggctatgtatgttgttataagtggaataaaagacaaaactatggaagaaattgatggatttatacatagtatagtatcagttatacagagcacagcacagatgagagttacgaatcattctctgttatcttcatatgaggttcttaaggatattcttaacaatataggttcaggtattatagtatgtgacagaaattcagctggtatcctgttttctaacaaggttgcagcagagtcaaaagagattcagaatgcgattaaagagtgtatgcaggagcttatgtcatcagaagagtacaagtcttatcttgacagaaagaaagcttatgatgaggatgatggtacagattatgttaagccatatatccgtcctattgagaaatatagtgcggaatcaggtttgtggtttgaaataagatttactaatcttttgtggatagatggaagtgaagttatagtatgcactgcatcggatataacacaaaaaaagaagagccagcaaaagatagagtttcaggctcataacgattttctcacaggactttataatcgtatgaagtgtgagtctgatcttaaaaaaatcatcaagcagtctgttaaagatggtgtgaagggcgcacttatgtttatagatcttgatgatttcaagcatattaatgatggacttggacatcagtacggggatgtccttctgcagcagatagcagcagggcttcagagtatagttggacttcgtggtaagtgttaccgtatgggaggagatgagttcgttgccatagttatgcctgatatgttcagtgagcttgagcgtatagcaaacaaggtaaaggatatgtttaataagccatggtatcttatggaaacagaatatttctgtactatgagtatgggtattgcagtattcccggatgatagcaaagatgtgcatgagattataagacttgctgatatagcaatgtatgagtccaagaaaaatggaaagaatggttatacattttacgacagctgtagtaagctgaacacagcaagaagacttgatatagagaatagcatgaggcaggctgtaacatcaggaatagaagaatttgtggtattctatcagccagtagttgatgtaagaacaggtgaatgttcatcatgtgaggcacttgtaagatgggacagcaaagcattaggttttatgggacctggtgattttataccacttgcggagtatcttggacttataacatcaataggtgattatgtactcgaagaagcctgtagacagtgcagatattggaatgagcatggcatacctgatttccatatcaatgttaatctttcggtagtgcagctgcttcagaaggatgttgctgaaactgtggcgcgtatattaaagaaaacaggggtaaatcccaaaaacatagttcttgagataacagaaagctttgctatcaatgatatggacagggttcttgacataataaaaggaatcaagaaactaggaccaagaattgcacttgatgactttggaactggctattcatcgctgaattatataaaacagcttccgcttgatattataaaagtggataagacatttatagatgatatagtggatgacgaatatgcacaggcatttataaagctcatagttgaactttcagatacgattgatacagatattattgtagaaggagttgagaatgaagcacagcttaacatactaaaggaactgggagtagactatatacaaggcttttattatggaaagccagtgcctgcatatgaatttgaaaaactaaactttaggggggaaattgattatgaaaatgctgataaagaatggtagaattattgatcctgcaagcaatacagatgaagttaaggatcttcttgtaacagatggtataattgaaaagactgctaaagatattgatgatgcagcagatagcataatagatgctaaaggctgttttgtcatgccaggtcttatagatattcatgtgcatttcagggaacctggctttgaacataaggaaactataagaacaggtgcaagagcagcagcaagaggcggttttacaactgtatgccctatgccaaacactaagccggttatagatagtgtagagatggtagagtatatcaggaataaggcagaagaggttactgatattaatattcttcctatagcagctataactgcaggtcaggatggagagtatctaacagattttgagaatcttaaagaggcaggtgcggtagctgtaagtgaggatggaaaatcagttatgaatgcaagagtagcaagacaggctatgagacttgcagcagaagttgatattccagtgtttgcacattgtgaggataagaatcttgcagcacgtggtgtcatgaatgctggtaatcatgcaagagaattaggcttctatggaatcatgaatgcagttgaggatataattgttgcaagagatatacttcttgcaaaaaacacaggtgctaagcttcacttatgccattgttctacagaggatagtgtacgcatgatagctgatgccaaaaatgaaggcatggatataacagctgaggttacgccacaccattttacacttacagaagatgctataacagaggatgatgctaactataagatgaatccgccacttcgtacaagaaaagatgttgataagcttatagaaggacttaagagcggagttatagattgcatagcaacagatcatgcaccccatcataagacagagaaggagagaggctttgtagatgcaccttttggcataacaggacttgaaacatcggtagcacttactataacagaacttgtgaagaagggtgttcttacaccacttcagatggcagagaggatgagttacacgccggctaagattataggaatagacaaaggcacacttctcccaggaaaagctgcagatattaccataatagacccggataaggagtatgttatagacagcaatacatttgcatctaaaggacataataccccttttgatggaaagaaggtatcagggcaggtaagatatactatagtttcaggaaaggttgtatattctaataacaatggaacagaagttattattgataaagatgttccaaagttgtagaataatgtgagcgtacagctaagaaacattttaaaaactaaaaagaaataaaaaggagattgttatcacatgataaacaagttagtagataagattgtaaaaactaatgcaccagtagttgttggacttgatcctatgatgaagtttattcctgagcatgttcaggcagcagcatttgagcagtatggagaaactttagagggagcagcagaggctatatggcagtttaataagtctatcattgataatatatttgatatagttccagcagttaagccacagattgccatgtatgaacagtttggcatagaaggtcttaaggtgtttaagaagacagttgattattgccatgaaaaggatatggttgtaataggtgatgttaagagaggcgatattggttcaacatcagaagcatatgctgtagcacaccttggaaaggttaaggtaggctctaagcttttaactcctttcgatgaagatttcgcaacagttaatccatatcttggttcagatggtattaatccattcataaagatatgtcaggaagagaataagggtatatttatacttgttaagacttctaacccatcaagtggagagtttcaggatcagcttattgacggcaagccactttatgagcatgttggtgcaaaggttgatgaatggggaagccagtgtatgggtgatacatacagcaatgtaggagcagttgtaggtgctacatatccagagatgggcaagacattaagaaaggttatgcctaaggcatatatccttgttcctggatatggtgcacagggaggaaaggctgaagatcttgcagcattctttaatccagatggacttggtgctatcgtaaacagttcaagaggtattatagcagcttataagaaggatgaatatgcaaagtttggtgataagaactttggtgaagcctcaagacaggcagcacttgatatgattgcggatattaatggagcacttggaaagtaatattaaaaacgatagtttcgctgtgagcatattatacatgctgatggttcagagttatatttaacgcagaagaaagcggcagtatcagttgtaattgctggtaaagccgcttttttggaagtgtttaaagatgatgaagagataaaagatatgctgatatcaatatattcaggaacgagaagagagtatgtaagtgattaaagctcatagatacattatgttaatatatctataagcggaaaggaagttcaaacaatgatactaataaagaatggctatgtaatagatccagcaagtggatttgaggactatgcagatatcattatagaagctggaataataaagaaaataggctgtgttgatgaagaatcagaagcacttgatggggaaaatgccattgataattatgagcaggttattgatgcaaagggtatgatagttgctccgggactgattgatacacacgtacattttagggatcccggttttacatataaggaggatattgaaacaggagctaaggcagcggcagcaggcggttttacaacggttatgtgtatggctaatacgaagcctgtgatagacaatgttgaaacacttaagtatgttctggataagggaaaaaccacgcctataaatgtatattcagctgcagcggtatccaaaggctttaagggcgaagagctcacagactttaagagtcttaaagaggcaggagcatatgtatttacagatgatggaataccacttaaggatgagctgttagtaaagaaggctatggaagaggcgaagaagcttgatatgccactcagctttcatgaggagaatccagcatttatagaacaacagggaatcaacaagggagtggtatctgataagttaggcttaggaggtgcaccagcactttcagaatatattatggttgccagagattgcatgcttgcacttgaaacaggcgctaccatatgtatacagcatataagctcagaagtatcagttgaacttgtgcgtacagcaaagaggctgggtgcagatgtacatgcagaggctacacctcagcatttttcattaacagaagatgtagtgcttgaaaagggaacacttgcaagggtgaatccacctataaggacagaaaaggacagacaggctataatagctgcgttagcagatggaacgatagacataatagcaacagaccatgcaccacacagccgtgaggaaaaggataaggagtttaaggcagcacctagtggaatgacaggtcttgagacatccctggcactaggtgtaactaagcttgtaaagacaggaaggctcacaatgaaggagcttctttgcaaaatgacaatcaaccctgcaaagctttataagatggataaaggatatatcaaggaaggcacagcagcagatatagttatctatgcacctgatgaaaaatggattgtaggagaaagctttgcatctaaagcctccaatacaccttttataggtcaggagctttatggtaaaataaagtacacaatatgtaatggaaatgtggtatattgcgattgctgataaaagcatggatatttataagtgcctgcgcgcacccggcacacaaccaatatacgaaaagcgtgcgcagaaatgaggattaatatgtcatacagagaaaatgctgccataatcagtacagcctgtcttgcagacggtgtatatgaaatgtggcttaaacaagagaaaatagcaaaggaatcaagaccaggccagtttatatcagtatattcaaacgatggctcaagacttctgccaagaccaataagtatatgcagaatagatgatgataagctaagaatagtatatcgtatagccggaaagggaacaaaggagttctcacagatgagtaaaggccagactcttgatatccagggaccacttggtaatggatatgatataaaagcgatatttgaagaggcagagaatgtcagtgtacacgaatgtaaggatggagtgtgtacatttaagaaagaatacagaccagttaagaaggcaattctgtttggcggcggcataggtattccaccaatgcttgagcttgcaaagcagcttgaatgtgatacagaggctgtattgggctacagggatggacagcttttcttaaagtcagagtttgatgaatattcacacgtaacagttgcaacagaagatggaagtgtaggaactaagggcaatgttcttgatgcggtaagacagaataatattactggagatataatatttgcatgtggtccaacaccaatgcttcgtgctattaaagaatatgctttaagcaacaacatcccttgctatgtatcacttgaagaaaagatggcgtgtggaataggtgcgtgtcttgcgtgtgtatgtaagtcaacagaaaaggatgagcattcacaggttaataataagagagtatgtaaagaaggaccagtatttaatgttaaggaggtagaattataatggcagctaaagttaatcagcttaaccctgctgatgttaatatgaaggtgaatatcgcaggcgtagaattcaacaatcctgtaacagtagcctcaggaacatttggttcgggtatggaatattgtgaatatgtggatttaaacaggcttggagctgttacaaccaagggcgtagcgaatgtgccatggccaggtaatcctacaccaagaattgcagagacatatggcggcatgataaatgctatcggacttcagaatccaggacttgatacatttgttaaaagagatataccatttcttaagcagtatgatactcgtataattgtaaatgtttgtggaaaaacagaagaggattatgtcgatgctgttgaaaagttaggtgagcagccagtagatatgttagaaatcaatatatcatgccctaatgtcaaggagggcggcatagcctttggacaggttcccgctatggcagagcgtataacaaaggcagtaaagaaggttgcaaagcagccggttattatgaaattaagtcctaacgttacagatattacagaaatggcaaaggcagtagaagctggtggagctgatgctgtgtcacttattaatactttaacaggcatgaagatagatattaacagaagaacatttgcggtagcaaacaagacaggaggactttcaggtccagctatcaagcctgttgcagtaagaatggtatatcagacagctaatgcagtaaagcttccaatcataggtatgggtggaatcgccagtgcagaggatgcacttgaattccttatggctggtgcaactatggtttcagttggtacagctaactttaatgatcctatgactactataaaggttattgatggaataaaagattactgtgcacgcaatggaattgcagatgttaaagagctgataggctgtgtcagataatattatagctaaaagctataacgtataataaatattaggaataatatttactattgacctactaggttaaagtgtgtattataatgtcaacgacgaaataacatatcacaatgatatgtaaataataactgacaactaatatttattatatggaggatatcattatggcaaaaaaacattatgaagacagaaatcttaagtttgaaacattacagttacatgtaggacaggaacagcctgatccagttacagatgcaagagcagttccaatctatcttacatcatcatatgtattccataacagccagcatgcagcagacagattcggccttaaggatgcaggtaacatctatggacgtcttactaatccaacagaggacgtatttgaaaagagaatcgcagcacttgaggggggtgtggcagcacttgcagttggttcaggagcagcagcacttgcatatgctttccaggcacttgcacacgcaggtgaccatatcgtagcagctaagaatatttatggtggaacatacaaccttttagcacatacacttccagattatggaattgaagctacattcgtagatccatttgattatgatgctattgaagctgctatcagacctaacacaaaggcagtacagattgaaacacttggcaatcctaactcagaggtagttgatatagaaagaatagccaagattgcacatgcacataatattccacttgtagttgataatacatttgcaacaccttatcttgtaagacctatcgaatatggtgctgatatcgtagttcattcagcaactaagttcataggcggacatggtacaacacttggtggtgtaatcgtagacagtggtaagtttgactgggttgcagcagcggataagttcccatggttagtagagccaaatgtatcatatcacggtgtaagctttgcaaaggatacagctccagcagcatttgttacatatatcagagctatccttcttcgtgatacaggtgctactatttcacctgtacattcattcatcttccttcagggacttgaaacattatcgcttcgtgtagaaagacacgttgagaatgcattaaaggtagttcagtacttaaaagaccagccattagtagaaaaggttaaccatccatctatctcaactaatgcagagcagcaggagctttacaagaagtacttccctaatggtggtggttctatcttcacatttgaaatcaagggtggagcagcagaagcacagaagttcattgataatcttgaattattctcacttcttgcaaatgtagccgatgttaagtcacttgctatacatccagcaagcacaacacattcagagtgcaacgaagcagagcttcttgaccagggaatcaagcctaacacaatcagactctcaatcggtacagagaatattgacgatatcattgaggatcttgatgaagcatttaaggctatccaggaataattaataagaatatggttttatgccggccatatatgatatttcttctagtaaatagcagtatacacggatattatgctatgtgataatcgaaagattgtacatgacatatatccgtgttttattaatgtctgaaataatagaaaagtgttgaaactttatcatttaagtgatacattttatatagagttttacaaacagatacgaagggagattttataatgatttacgcatcacttaatgcaaaagaaggaaattatcagtatccagcagcaataaagacagcacttgactttcttgctaagccagaaacagcagagcttccagtaggaagatacgagcttgatggagataacattttcgtacttatccaggatcagacaacagctccagtagagaataagagagcggagagccataggaattatattgatatccagtatcttttcacaggaaaggaagtacagggctatgcaccacttcttccaggcgtaacaggtgaagaaccagcaggtaaggataatatattctatgcagatgtagagaatgagcagttcataacattacatccaggtgaattcacagtatactttactaatgatattcatcgtcctaactgcacaatggatgaaccagttaacattcataaggcagttgtaaagattaaggaaagccttataaagtaatcagtttaagaatggtttattagaaactattaaaaagtaaattaaattagtggatgacagaaatagtttttatcatccactaatttttattaatctttatactcaatgccaaaataatcaagataagttttaaatctatcctgagcggtaagacaggtatcaactaaatatccctgttcgtttttccattcctttaatccacggtaataaaattcctttatatcatcttctataataaatggagttatgccattgcgaaggcattccttaaacataattaatctgccaacacgaccattgccatcttgaaatgggtgtattttttcgaattcataatgaaattcgattatttcttttagagatttttgctttatattattataacttttaagtaaagcctttaattctttgcatacattttcaggctttgtagttggcatgccaccgacttcattttcaatccttttgtaatcaccgacagcaaaccaggatttcctgctatcagaagtacctgactttaatatcagatgaagctgcttgataagagattcacttagaggatagttggctaaatcaatgattaagtcaatacacttaaaatgattagcggtttcaactatatcgtcaacattgatggtttcattctgtatgcctattgtattagtttcaaaaatatatcttgtctggtcatgtgaaagctggctgccttcgatgtgattggagttataagttaaatcaatttgaattttatggtatattccaccggaaattccggattctttttcaatagtaagacgggtaagtaaatctctgggtatcattgcgtttcttttctttctgactggtttaactgcatttttgggtattttccatgatttaccgtcaataatagcgccgggtatctttccatgtgaacaataatttcgtacacttctttcggaaattttccatttctctgcagtttctttgacatttagatacattgtattcacctccatcataattattaacaggaattattatatcattaccggcaaaatatctcaacttttcatgccatgaatatgcgggatattttgccgataagaattataattgccggtaaattaatattttattcaagtgaagtttgttgataaatggatcgataaatgggtgatagatgtaatcaaacaaatgttagattacaataaataatgttatacttgacaaacaatatatacgcgtgatatacaataataaactctttgcactgcatataaatctacagtacaaactgagcagaccgggattatatgatatcttatgcctgttatgtgaaaataagattaaatcacatgataatataaaagtataatccaggagtcgggtcacacgcgtgacagtggaatcttttctatccacgggacagtagttgctaatactgattcgtgggtgtttttatatctttattattatatgtatttcgcatacaactcccacatatcttagtgttatagggttacatagatataacatatatgaatatattaatactgatgtttgtatttatatttatacatgcgaagtcggataagtcttattaacaggaggaatgaaacaatggaaaagaaaaaaaatgtatcaggaagtatccaggctacatctgacatacataacggaattgtcgctgaggatgaattccagagagtagctaataaggtatccttcgtaacaattattggtaatatactgctgtcagttatgaagcttatagctggttttatagcacattccaatgcgatgataagtgatgccatacactcggcatctgatgtttttagtacatttgtcgttattattggaataaaacttgcttcaaagaaagcagataaggaacacccttatggacatgaaagactagagtgtgttgctgcaatcgtgctttccatggtattgtttataacaggctttggaataggagctgcagcacttaaaaatataaccagcggagattataacaacatagtagttccaggtgttcttgcgcttgttgcagctattgtatcaatagtaagtaaggaagctatgtactggtatacaagatacaacgccaaaaagatagattcaagtgcgcttatggcggatgcatggcatcatcgttcagatgccttttcatcaataggagcactcataggtattgctggtgcaagattaggatttcctattatggactcaatcgccagtctgataatattcgtatttatcataaaggcagcctatgacatattcaaggatgctatagataagatggtggatcacgcatgtgatgatgctacagtcagccagatacgggaatgtgttatgaagcatgaggatgtattaggaatcgacatgctccagacacgtatattcggtaataagatatatgtagatttagaaatagaaacagatggctcctatacactaagcaaggcacatacaatagccgaaacagtgcacgatgacatagagaagagctttcctaaggtaaagcatataatggtgcatgtgaatccagcggatgtgtaaatgcttaagcaattagttcttgagcgtaggatatatatgcgtatataatactttaattatatatttttttatagcagtaaagcaaaggcactttgtattgtattgatacaggcgtactttgcttttttatgtataataggggtaaagcgtattagcagctgatacaatttgcaaaaaaagaatagaaatgaggaatcaatatgaatgaaagattaaatgaaattcttaaagctcatactaaggagtttgaggaagtaagtgatgcaatctgggagcatcctgaaacgagatatcaggaattccagtcttccaggatacaaatagagtttcttaaggaaagaggctttaggttaactgaggaaatagctggaattaagacagcatttgttgcagaagcaggagaaggaaagccggttattgcattcttaggagaattcgatgcacttcctggactaagccagtatgcagactgcccgtatgagaatgccatagaagagggcaaagcaggacatggatgtggacataatctcctaggcacaggtgctatggaggctgcctgtgttataaagcaatatatagaagagaacaatataaaggctactgtacgttattatggctgtccggctgaggagagtggtgcaggaaaagcatttatggtaagagaaggctgttttgatgatgttgattttgcttatgcatggcacccaatgtttgaaacaggaatcatgaataaaacacttgctaatgtcagagtgatatatgactttacaggaaaaagttcacacgcagcagcttgtcctgaggacggaaggagtgctcttgatgcatgcgagcttatgaatgtgggggttaattatttaagagagcatgttaaaacggacagccggatgcattatgcatatcttaatgcaggtggaagtgcacctaatatagttccacataaagcaacacttttatatgcattacgcgcccccaaggcattgtatgttaaggaacttgtagaaagagtatcggacgtggcaagaggggcagcgcttatgacaggaactaaggttgatataagagttgtcagcgcatatgcagattttctttcagttccggcaatggatatggttatggaggacagcataatagatagtcctttagtagaatacacagatgaggaatataaatatgcaagccagtttaattctaaggaatatgatttaaaagataatatagatgcttcatatgaaaaaggaaagaaaagtattccaataggaagtactgatgttgcagatgtaagctggatagctcctacgggttcaataacagtaacaactatggcaaaggacagcactatgcatggctggtcagtagttgcacaggggaaaagcagcatagcacataagggtatgcacagggcagcaggtatcattgcacaggcagcattaaaagtgatagaatctcctgaactgcagaagaagataaaagaagactttaataagtcaaaggctggtgaagaatatgaatcattacttccagctaatgtaaagccaggagatttttaatatgataatattctcttgacaaagctgtgcatatactgtatatattagtatatacagtatatgcacagctttattgttatatcacataaaaaataataaaaaaggtggtttataaacaaacaaaaagataggggggaacgctacatgttagaagtcagtaatcttaataaaataaatcccgacagcaattcataccttcttgataatatgacattccacattcccaaaggacatatttgtggggtgattggtgaaaacggagcaggcaaaacaacgcttatgcgtgcgcttatgggactttacagttcatcaggaagtatagtgatagacggctgtgatatgcggcttaatgaggcagcagccaaggaaaggcttggaatagtatttgctgatgacggattttttgacggaaatatgagattatggcagataggaaagttctatggacagttatatcatagcttcaatatggaattgtatcttaattatattgaagaattcggacttgataaaaaacagaaatataagaagctttctaagggaatgaaaacaaggacacagttagcgtttgcactgtcacataatgctaagctgtttttatttgatgaaccgactgccggacttgataagcatttcagggaaaagttccttaagatatgcactgagcttgtagcagacggggaaaaaagcatacttatagcgacacatataacggaagagcttgaccggattgccgattatattgcgtatatgcagaaggggagaatgttattttatacagaaagctataaaatgtgtgagcgtttcaggattgttactggtgaggattataagtgtaaccttataccggatgaagcggttgtatataaggagaagaacacttacagcacaagtgccatggtagttaattcagagtggtacagaatagacgatggattggaaaaacacatacctgatatcagggagtttatgtattattttgtaaaaggaggggagaaaaatgccgaagctattgcagagaaatattttaaggaatagttatatttcacttattagttcgttaatagcagttgtatgctggtctgtttttatggttagtggttacgcgtatatatataccttgaatacctttttgcttgtaacctgcaatccagagattgccatatcaggattacaaggatttgtgcttcctgattatatgtatattgcaccgtataccaaagagcagagaaaagaccttataaggaagggccagcggtataagttttttgctgtatatgtatggttgattatcatttttgtattaccctttggctgtatcgaatatatgagaggaaatacgtcagcgcttatagtgtgtttaagtgaagttatattatcagcaagcttgttgtatagtaatatattttcactatatatagttaaaagaagtgtatacagtttctggttaacatttggaataaaattagcaatggtagtatcgtttatgatggctgcagataagacagcaggtacagagagcgttaatgtaattattgtcttattggttatagtaagttctgtgattcttattctggtatgcaggataaagtatcaggataaaatgtttagcagtatggcagattacgaatatattaaaaaaatataatagaggttatgtatgaaaatagttatttcaaatacagtaaatgtgccaatatatgaacagattgtcaatcagataagggatgcggtgataaatggtgagcttaaggcgggggaaggcatgccgtccataagagtgcttgcaaaagagcttgctgtaagtgttattacaacaaagcgtgcctacgaggagctggaaaaggaaggcgttattgagtctgttcccggaaggggattttatgtatgcgagcagaaaaatgaccatttaagagaaaaacagatgatgaatatagaaaaacgtatgtcagatattttagaggaatgtgtcaatgcgggcatgaccttggaggatgtgattgatatggttcgtgtgctgggggaaaagtgatggaagaaattataataagaattgaaaatgcagcgttaaagttaggaaagttttctataaagccggcaattataaatattcctaaaggctatatcgtgggcatacagggagataacggagcaggaaaatcaacaatacttcgtatgcttcttgggatgtatgataaaatgcaggggaatatttatatagatggcaatgatgtggtaaagaacagaacacagataaaaaatataacaggcgttgtttcgcaggagagaactttttttatggaagaggatgcatatgaaaatgaaagactgtatgcaccattttataaaaactggaacagcgatgaatatcgtaaaacgcttaaaaatctgaatattaattcaggcagaagcttaggaaatctgtcaacaggagaaatgcttaagtatcagcttgcatttgcagcagcatacagaccgcaggtgttattactggatgagccgactgccaatcttgaccctgtattcagagatgattttctaaagatattacaggaattcatagctgaatatgatatgactattcttatggcaacacatcttgatgaagacattaccaagatagctgattatattatggatgtagaagatgggagatattcacttagggaatgtatatgataccagggtgctatgtgccagtggcacatgtttagcactgaccgaagcatatcgtagacgtgggagtgcgtagcatggaacaatacgtaggtatcaaagtcgggggcttttgaccccgacatcatgtgtatagaaaataagcgcagaaaagagggagtatatggacacaggcataaaaatgctgctaaaagcagaacgggaaaactggaaaaagcgtatggtaaaagaaacaaaaggggcatatatagttatttatcttattttgatttttagtgtatttatgtcagctatgtttggttttaagtatgattattcatcagacgataagagggttattatttcgttgacagtatttatatttgttgtatatcagggtgtgacttcatatgtgtcatatgtgaaagaaaacggaaagaatgtcaatatatttgaaaaatataagtacatccctgtggatgtatcagtgttaaggcgtgtaaagcttatactaacagtgcgtataatagcacctttcgttataataggacagatggcagctatatttgtaagagtaatagatccggataatcaaggtggaagcctgatagatataagtgtctttatgcctttgattataggctgcctgtttatattagaaaagtttattgaatacagagtattaagcaggaaggcagcattgcaataattacatgcaataattaaaataacttaaaaacgtgcattttaacattggctaagttaaaatgcaataaattaagttaaaagataaataataaaattttagtatcgtcggtcaggtcatggctggcgatatttttttatcccttatttcaatttacaaacactttacacagatttctcatacatacggtattacattttacatatcgttgttattctgttaactgtcaatgaggtgcaggtaaagttgataacggatggtacgtaacatcagttatgattgttagtcctgtatcttgttgataagaaaacaaaacaataatatgaagaacagactgaagttgggattgaataaatcggacataagcagtcagaaggaaaagtgaggatgattatgagaaagtttaattggaaaaagagtgtagctattgcgctaagtacagtatgtatggtaggagcattagcaggctgtggaagcagcagttcagataatggaaatgacagcgcaaaggcagaaaagcttaacggaagtataacagcagcaggttcttcagcacttaagccacttgtagatgatgcagcagatctttttaatgaaaaatatccagatgtaaatatcacaattgatgcaggtggatctggtgaaggtcttaagcaggtttcagaaggaacagttaatattggtaactcagatgtagaagctgcagaaaagcttgatgcaacaaaggcttcagcacttgtagaccataaggtatgtgttgtaactatggcacctatcgtaaacaaggatgtaacagcaagcggtgttaagaatcttacaaaggcacagcttacagatatcttcacaggtaagattacgaactggaaagaagttggtggtgctgatgaagcaatcgtacttattacacgtccagaatcttcaggtacaagagcaacatttaagaagtacgcacttgacggtgcaagcgaagaatctaacaagtctatggaaacagatgattcaggtgtccttttacagaatgtaaagacaacaaagggcgcaatcggatatgtagctttatcatatcttgtaagcaatcctggtgttgatacagtatcaattgatggtgtagagcctacacttgagaatacatacgctggaaagtatccggtatggacatatgagcatatgtatacaaagggcaatgctgatgaagtatctcagaagttccttgattacattatgtcagatgaatacggtaagaaaatggaagcattaggatacggcgtatcttctaagatgacagttaaggaacactaatcataaatattaattaacttgtaaatatatatgttgatgaccagatagtaatgcagttagcaatgtagtcagcaatgatactgcataagagattataaagaggcgggcacgataatatctgtggtgcctgcctataatcgtgatatagcagacattagaatggagaatgtatgaacagtaagagaggtatgtttaccagggaatatctgtggcggagtatagttacaatgtgtggcttgttcgttatagttattacattgggaataggtggattccttgtatacaagggctctggaacgtttttaaagttccatcattcaataggagaatttcttttttcatcagactgggcaccggttgataatatggaaggtggaggaagcgtaggtacacttatatttatagttggttcacttagtacatgtggacttgcattgcttatagcaacaccatttgcacttggctcagctatatttatgacagaaattgctcctaagttcggtgagaaattctatcgtcctgtaatacagatatttgcaggaattccatcagttgtatatggatgggtaggacttacagttttagttccttttataagggatatatttcataggcaggtaggacattcgatacttgcagcaggacttgtgcttgcaataatgatatttcctacgataacaagcgttgcagcagatgcaataagagcagttcctaaggattacagaatgggagcctatggtatgggttcaacacgctggcagacaatatacaagattgtactaccagcttcagcctcaggcatattctcaggaataatacttggtcttgccagagcctttggtgaggcgcttgcagtagctatggttataggacagacaacagcacttcctgaaagcatattctctacaactaagtcacttacaacagaaataacagcccagatgggtaatgctatggaaggtggagaaacaaagactgcgttgtggacacttgctttacttctgtttctcatatcattattattcatattccttatacatatattatcaagaaagaaaccagaggatgcaggagctaaggccgtctctaaaaagagtgtgttaacatcggcaaagcaggattaaaggagcatatatttatgaatagaattaaacgtgcaaaggcacaaaacagcataatgacagtcatattctacgccatagcagtcttcttttttgttcttttagctgcatttgctggatatgtaattattaaaggctttatcggtgcagatatatctatgtttagatttgcacgaagaggaagcataggaaaccagttatttaatacgttatatcttgtatttttgtcactgcttataacagttccaatcggaacctttgcaggaatatatcttgctatgtacgctaagggaggaactgttacaaagtttataagaatatgtatagaaactctttcatctcttccatcaatcgtagtaggactttttggataccttatatttcttgttattatgggaatggataagagtcttatggcaggagcattatcagtatcaataataacactgccacttataacaactacaacagaggatgctattaaggggcttccaaagggttacttcgaagctagtatgggactaggctcaacgcgctggcaggctatattccatgtattattgccagcctgccttccaagaattatgacaggtgttattcttgcagcaggacgtggctttggtgaggctgcagtacttctgtatacaacaggctcaggcacgaatataagatggtctaactgggacctttcatcttctacgtgtcctcttaatccttttcgttctgcagaaacactttccttacagatatgggatctgcaggtaaacggacaagaccagaatcttgcgaatcttgcatcagcagtacttcttatacttgtgcttgcattcagtattggtgccaatatattaagcaataagattaataagaagaatgccggagagaaggcataaagcagatgcaatatattttgaaggcctggaagaatatataagatatatacataacttttaatatagaaatgaggaatatatatggataatacagttaatagttcgggaacatttacagaagacagcggagcgaataataagtttgagattagtcaccttaatcttcactatggggcttttcacgcattaaaagatattaatatgaatattaagaagaatcagataactgcatttataggtccttctggatgtggtaagtcaacatttttaaagacacttaacagaatgaatgatcttgttgataatgtgactatagatggagatgtacgtcttgatggaaagaatatattcacagatatggatgatataacattaagacacagagttggaatggtattccagcagcctaatccttttcctaagagcgtgtatgataatatagcatatggtccaagactgtttggagtacataagaaagcagatcttgatataattgttgagagagccttaaagcaggctgctatatgggatgaggtaaaagacagattaaagaaatcagcacttggtttatcaggtggacagcagcagagattgtgcattgccagaacacttgcggtagaaccagaagtgattcttatggatgaacctacctcagcacttgatcctatatcgacatcaagaatagaggacctggcaatagaacttaaggataagtataccattgtaatggttactcataatatgcagcaggcaacaagaatatctgataatacagcgtttttcctgttaggagaaatgattgaatatggaaatacagagcagctattctcaatgccaaagaacaagaaaacagaggattatataacgggacgttttggctgatatttcgtatttttgtcacttgttattagtatagtatggaagtataatgagcataaataaggcataaaacagttaatactaattaagaagggcaaaggttatagatatatgaaatatgtaaagtttgatatgcactgtcatacggctgagggttcagtagatgcaaaggttaatatagaagaatatattgagatattaagaagtaagggcttcggtggaatgcttgtaacagaccatgactcatatggtggttatgaagcatatgtgaattcgggaaagaagtatgatgatttcgttgttttaagaggtatagagtatgatagtcttgaattcggacattttatagttatacttccatcagatactcctgatgaggtgtatgagttactaagatataagggtctgactctggataagcttatttatatagttcattgcagcgatggaatactaggacctgcacatccttatggagaaccctttatgagctttgcttctactatgtattggaatcagccaaagcagattgcacatatggtacattttgatttcgttgaaggttataatgcctgtgaaagtaataaaagcaacagatatgccagaagatttgcaagcgactgcagagtaccacttaccgcaggtagtgatgcacacggtagtgactgtgtaggtcttggatatgcactgctccctgaaacagtaagaactgttgatgatctgattgaatattacaaggaggagaatcatcctaaggttggtggaacaagatatggacacacaaccaaggacaggataggttcgtttaacaaggttcttgtatacatgttctatctgtataataaggttggtgctatgtttaagtatcctaagagagccaaggctttcaggaatgcgttaagagcacttaacagaagatacataatattcagggacaggagctgaatgtctgcttatttacacacagcatattatactggcagcaggctgccggtgtatggaacatttaaccttcactatgtacatagctgtattatagtggaggtatttttgtatacagaaatatacgtgatttgtggctgcgcaagatttgtgctttgcacaaacttgagatgcgctgaaaagcagcgcaagaatggaggataatatgagaaatagatttgacagacagttagtacagcttaatgatgagcttatagaaatgggtggaatgatagaaaaggcaatagcagatacagtaaaggcacttgtgaatcaggatacagagcttgctaaggttgtcatagattatgatgaagagatagaccatcaggaaagagagattgaacagttgtgtcttaagctgctgttacagcagcagccggttgccagagatttaagacttatatcatcagcgctcaagatgattacagatatggagagaataggtgaccacgcttctgatatttcagagatcactcttgaactttcaagccagtcttatatcaagaagcttgatcatatacagcagatggctaaggaaactatgtatatgcttgtgcagagtgtagatgcatttgttaataaggatatggataaggcaaaggaagttatagcacatgatgatatagtagatgagctttttggcagggtaaagaaggagcttataaacatgatacacgagaatgcagaggttggtgagcaggcatcagatcttctcatggctgcaaagtatttcgagagaataggcgatcacgctaccaatatatcagaatgggttatattctcaataacaggtgaacatccagacgataaataaaccgaaataaattgagaatataaaactacaataatttaatggtaataatttaatggtaataattttatgataagaatttacacagaatttacataaggttcatataacatttatatacgtgaattacactccaaaatgtaaagaataaatgaagtcagattaaacagacaaagatttggaggaaatatggacatatttggtgtattatcattaataggtggattagcaatattcctgtatggaatggacctgttaggtgaaggattaactggtgcctcaggtggaaaacttgaaaaaatactggaaaagcttacatccagcccgataaaggcggtacttcttggagctggcgtaacagcagtaatacagtcatcatcagccacaacagttatggttgtaggctttgttaattcaggtattatgaagcttagccaggcagttggcgtaataatgggtgctaatataggtacgactataacatcctggatattgagtcttacaggtattgaaagcagtaatatattcataagcctgttaaagccaacctcattttcgccagttcttgctgcagttggcataatatttctgatgtttttaaagaatgacagcttaaagaatccaggaaagataatgataggctttgcacttcttatgtacggcatggatgctatgagctcatcagttgcaccacttgccgaggtgccacagttcgcatcaatacttaccgcattttctaatccggtgcttggaatgcttgcaggtatgctgtttacagctgttatccagagttcatcagcatcggtaggtatacttcaggcattatgctcaacaggtatattaagctatgcaacagcacttcctatcattatgggacagaacataggtacctgtgttacagctttgctttcaagtattggagcaactaagaatggtaagagagctgctattattcatctgtactttaatgtgattggtactgttacatttatgatagtattctatgctttaaatgcagtaatacacttttcattcttgaacctgacagcacaggaattcggaatagcagtaatacataccacatttaacataataacaacagcatatctgcttcctttaagaaaggtgcttgagaagctggcatatgctactattaagcttgatgatgatgaaaaaagaatcatggatagaagaagtgaaaatgaattcgcattgcttgatgacagattcttagaggcaccaagtcttgctgtagagcattgcaaacaggttatcaataagatggcagatatatcgcgtgagtctttattcatatctatgtcgcttataggcgggtatgatgaagaacaggcacttcgagtaggggaacttgaaacaagggcagataaatatgaggatgcacttggaacatatataatgaagataagtacgaagaatctaaaaaaagaggattcagaaatgcttaatgttatgttacattgtataggagatttcgaaagaatatcagatcatgcatgtaatatatgtgattcagcaagagagttgcagcaaaagaatatgcagttttcacctaaggcagagactgagcttgatatattaagttcagcagtgagagaagcggtagatatatcctttgatgcgtttaagagtaatagtaaaaatgaggcagataaggttgaacctttagaagagcttatagagactcttgcagtagaactaaaggcaagacatataagaaggcttcgtgagggtaagtgtactattgagctagggttcgcacattcagatattcttaataatctggaaagggtagcagaccattgttctaatattgcggtggatgttattcagagtgaccagttggaattcgatgcacatgaatatcttgacggaataaagaataaagataatcagcagtttgtaagggattataaggcttataaggaaaaatacagactgccggaaacacgcagttttcagtagtagtagagccgtaaagcttatatacacttactattaatcgtataagaacagaagggaagatgaatatggcatacatatatgtagttgaggatgacaataatataagcgaaattgaaggctttgcgttaaagaatgcagggcatacagttatagagtgtgccagtggaaaggacttccataagctgatgagggaacgtattccagatctcgttcttttagatataatgcttcctgatgaagatggacttgaaatcctaagaaagctaagacgggttccagaaaccagaagagttcctgtgattatggttacagctaaaacaacagagatagataaggttaaaggtcttgatatgggagcggatgactatataacaaagccgtttggaattatggagcttatatcaagggtaaaggcagtgcttagaagagctggtggaactgatgaagagaagcttataggaataggacagttattcatagatgatgagaagcgtgttgcttatgttgaagataggccagttgaacttacatacaaggaatatgagcttttaaagtatcttgctcttaacaggggaatcgtgcttacaagagataatatcatggacaggatatggagtacagattatgaaggagagtcaagaacgctggatgtccatattaagacattaagacacaagcttggagatgctggtaattatataaagacagtaagaaatgtgggctattttatggatgatgaggctcattaagcttaaaaggagttcttatgaagaaaagaattaacatacaatgtatgttgctcgcatttgtcactattgtatctgcaatggcaatatctacatttgtattttacaacatattaaagcgtgaggttttaggcgatatgcgcaattatgttgatatatttattggtgcagatgcgtggggaatggtaagtgatccggacgatatcaatgagcagaaggtaatagaaagctatgatggtaatctcagagttacatttattaatgctgagggatatgcggttgtggataatcttgttgaagtgacagatatggagaatcacaataaaagaccagaggttgttgaagccagaaggaatggctatggaagtgatataagaaagtcagaaaccttgcagaagaattcattttattatgcagtggagcttgataacggatatgtgttaagagtttcaagagaagtaagcagtatgacaagtattatgataagtgcattacctgtagctgtgttgttatgtgttattctttttgtgataagctctataagctcacatctgcttacaaagagtatcgtagagccgatagaatttctggcagataatatggatgcatcagattctataaaggtgtataaggagctggtaccctttgttaatacaataaagaagcagcatgaggatattatgcgtaatgctgatatgcgtcaggaattcacagcgaatgtttcacacgaactaaaaacaccacttacatcaatatctggttattctgagcttatagaaagtggaatggctggtggtgatgatgccaagcgctttgcgacagaaatacataagagttcacagcgcctgcttactcttattaatgatattatcaagatatcagagcttgatgcaacatcttctgatgaagcctttgaaagtgtcaatctttatgaaatagcaaaatcaacagtacagatgctggagctgaatgcccagaaaaatggtgtgataatgaatctttcaggcaaagatataagtataatggctgacagacagatgattgacgagcttatttacaatctatgcgacaatgccataagatacaataatcctggaggaagagtctgggtatctgtatatgagcgggaggctgaagcttatgctgatggtggcggaagcggtgtgaataatggtacttatggaaatagcagtaaaatggcagttgtcattgaggtcaaggataacggaataggtatatctaaggaaaaccagcaaagaatatttgaaagattttacagagttgataagagccgttcaaagcttaccggcggaacaggacttggacttgctattgttaagcatatagttgcaaagcatgataatgcacatatagagcttgatagtgagcttggaacgggaacaactataagagttgtatttgaacagtagtgagaagagaacttataacaaatccataattagcataaaccaacaataaatccataagtatcggttgactaatccataagaaaggattaatcttttatattagcagcttgtatccggtataccgaaaagatgcttttaatgaactatggagagtggatacgttatgagtatgaaaaaactatttgatgttgataaacataaccttttgtttcacaataaagcactttttgccttacttataccaatcgtagtagaacagcttcttaactcttttatgggtatggttgatactatgatggtgagtaatcttggaagtcaggcaatatcaggagtatcgcttgtagattcggttaataaccttatagtgcagcttttttctgcaatggcaacaggagcagcgattatatgctcacattatattggtatgagaaataaggatggagctaataaggctgcaagacaggttgtacttactgttatggtgatatcacttgcaataaccatacttgggcttatattcagaagaccgcttcttactttgatatttggacatgttgagcaggaggttatggataatgcggtggattattttttgtttacggcacttagctatccatttcttgcacttttttcagctggctcagcaatattcaggtcttgtggtaactcaagatatcctatgatggtgtcagtgatatcaaacgtgtttaacataggtggtaatgcgcttctgatgtttgtgtttaagttaggagtttctggtgcagcgatatctacgcttgtgtcaagagtgttctgtatggtagttatatttatagctttgtcaaagcctaagcttgatatagttgtaaaggattatgcggctataagaccagatttcggacttattaagtcgatacttgcaataggtgtgccttcaggtatagagaacagcatgttccagttcggcaagcttgccatacagtcaacagtatcaacacttggaacagcagccatagcagcacaggcgatgactaatatactggaaaatgtgaatggtatattcggaataggagttggaatgtgccttatgacagttgtgggacagacacttggtgcaggccgtaaggaagaggcaaagtactatattgtcaagcttgcaggaatagcagagcttggaataatagcatcgtgcctgctggtttatgcatttgctggtcctattacaaggcttggaggaatggagacagatagtgcacgtatgtgtatagagatggttggtgcaataacaatagtgaagccgcttgtctgggtattatcctttgttccggcatatggcatgagagctgcaggagatgtgagattttcaatgacaacctcgattataacaatgtggggctgccgtgttgcgctaagtatagcacttatacgaatatttggtatgggtcctattggtgtgtggtatggtatgtttgcagactggacaatacgtggaataatatttacaacaagattctttagtggaagatgggtaaagaaggttatataatacatcagtaggtatcaaaggggaacagtaaatatatgtttactgttcccccttcatatttagagagaatgagctgtgggtaaaaccatggctctttttttaagaaaaaatataagacagagaagataaaagtggaaagattataatagagctaaaaacatacttaagcacttatataaaaatagaatagtttttttattagagaaaatgacaagtgtatgttcgtttgtagtatgtaaaatgataataaattgtataaaagtaacaaagagataaaactttttctttaaaatattgacaaaattgcaaaaaagatgtattttcaaggcacttaaacaaaagacttatataaaagttattagcgtattcggtgtagggaacgaatatatttcagggagtaagtattcttttgtttaagatggtatttacattttattgcagacgtatatcagtcaaggcagataggaggaagtatgttaagattcagaaaggctgcagcattgggacttgcagcacttatgacagtcagttcactcggcactttgcagacagtgggagcatcagggctgccaactacacagggacatgacaagtatgtcaacaagaatgtgtttgatgttatatcaagtgacacatttggtacaaaggagctggaaagccctttatttgataagactaagggttcaagtgatatcacagatttacaggttcctacgcttgcatatgatgatacaagtataggtcttgtgtggcagaagccagaaaagtacgataatgtagcagattataaggtatacataaatggtgagtctgccggtacagcaagagaaaattacaaggtaaacgctgcatgggcagcaaagtatatggaatcattctatgattactataatacacagggtaagagcgatgttgagatggttaatgtagatatccatgcatacagagcaacaggacttaaaccagatacagagtatacatttaaggtagtagctgtggacaaggatggcaaggaacttggaagcgctaaagagataaagcaaagaacaactaaagcaccagaggttgttaatatcaaggattttggtgcagttgaaacagaaggctacacatcttacaatgatgagattaatgcagttatagagagcaacacaaaggctatccaggcagcaatcgatgcatgtcctgagggtggaaaggttgttatacctgaaaactcagatggaaaggttttcgtcagtggtgctgtatggttaaagagtgatatgacactcgaggttaatggtacattatgggcatcacctaacagtgaccattttgagataggttttctcatgtatccattctacacagatacaagaggctggggacttgtcaatgcgatgacagcagatgagtctaatcctataaagaacgtaagagtaacaggaacaggtactctttatggtaacggctggaagtatggtgccggttcaactatatacgaagatggttatacatctaacaagggtaagaatactcaggctggtgatccaacagacactgaaaactggggtcttccaagatatgttggaggcggtaatgtaaacgtattctatcagggtatccagtcaaaggattcagcatataagtaccttaagaatacaggtaaatatgaagaatccaagcttaatgcaatatttagtgcaaagacagcagatgaagccaaaaaagcaacagaaggagtatcaagagatgaccttaagtttgcttatgcaacacgttcaagtcttcttattatgagaaactgtgaaaatgtttatgttggtgatatcactatcgagaatccatcaaaccattcagttaatattcttgattcaagaaatatagcaacaactaatgtaaaggtattctcatatgatggcaacaacggtgacggtcttggatatggctgttcacagaatgtaatctgctggggtaactttacagatacaggtgatgataacttaggttttggttcgtcagtaggtatgggcgcaagagattcagaaatccagacaaactcagaagtatggatgtttgataacttccttcgtgaaggccatggtggtcttgcagcaggaagccacacaggtaatggtattcaggatgttctttttgaagatacagttatgaaccatattgatatggcattcagattcaagtcagcacctactaacggaggtttcggtgctaacataactatgcgtgactgcgcagtagctgatactaatcagggctgggtatttacaacaagctatggtgatcctaactcagcatcatctacagaacatgctgaaatcggtgagttctataactttgcatcatacaatgtttctgtatatggtgctaaccataatacaatacaggtacttgcagatattgacccagtaggcaatacaagcaagccattacattcacaccacaatatgtatttccaggatattacatttggtaatgtaggttctaatggttcttacaagaacaagaatggctgggaaacacttataggctgtgacaattcagtattttacaatgtaaagacagtatcatataacaaaaaagcagagagtaagaagactgacaaggcatggaataacatccagtattgtaataatcttatattccagggaactacatgggattcacttaatgcatgtaaagataatatgaaagctgctatgagtggaataactgtaagggataacacagtaaaggctgagaattataaagaaacaccagaaacaccagataagccggatgcaggcgataacaaaccggatgctggtacaacaacagagtggacggcaagtgttgatgaatgtgcagatttctttaatgatgcggtagctgcaacagaaggaaagacagatgctatcaaatcagtacctaaggtagaaacaaagaacacacctcataacattggttatctttatgataatgaacataacaagggaaaaacctcatatcctggattagaacagggttatgcttatactaactgcgatatagcaggacttactaagcttgtattaccagtaaacagacagacagatgcaggaacacagaatgtttcagtacgtcttgattctaagaatggtgcagagattgcaaaggcaacacttaaaggtactaaggcagatggttatatagattatgagatggatgtaacacttccagaaggaacagatacaactaagcctcataagatattcgtagtatttacatcaacaggcaacacagctaactatattgccaatgtaagagatcttaagggtattaagacagcaacagcaaaggcagcagacagcagagcagcagctaaggagtcagtagaccttacaaaaggtcttacagaaggaacagaatataacaaagacagcgcatatgctacagtttctacacttgaaacagcaggtgttaatgtactttcagagttatcaacaccagaacagccagtaactatagatggtgttaaatatacacagtttgtacaggcatctacaccagctaacgcaggtggagaggttcctggtaagggtacagcaacatatgtatttaaggcaaagactgattgttcagttacattacataacagagcaactgcaaaggtatggtggtttgtagaatcacctgatggagcaaatgtaacaaataaggcaacaggaacaacagtagatgatattatgacatttaacttaaaggcaggtaagacatattactattactgccagggttctaagccaatggtatatggtatatacttaaacgcaccagtagctaacgcagattctctactcaaggaagaaacagcaacaggtggttcaggtagtgatacacaggaagcttcagacaagtcagttaagcttacatggacagccgttgataacgacacggaagtgtattatggagtagatacatatgttgatggtgtaaaggttgatatgattgacggaattaaagatacatccgttgttattgacagattatcatcaggtgttgaatacacatttatggtatatgtaagtgaaaaggccgatacagctaacagtttaaaggcaggtaacaataagacatatcttggtaaggcagtattcacaacagatggaaacaaagatacatcagctattgcagctggcgataacacagaggttaagcttgcaagtgctatatatacatgtgcacaggcaacatggacaggaatatcaaaaaatgatacaagagtacgtggatataagatatatgctaatggcaagcttgttaagacactgtataactatcagataaataactataagacagctaataatataagtaatcaggtaggccgtcttacacctggtattgataacaaggttcagatagttgcatttacagatgcaggagtagaatacaagtatccagaggcaacagttaagacacttgaaaactatgactacaaggcacctgtatggggcagcgatgctaagcttacagctaaggaaaatgaagctggagacatcgttataacatgggatgcagcgaaggatgatacaaaggttggcggataccgtgtataccttgatggcatagcttatggttctgataagtactttaatccagttaatggagcaaagacaacagaagagacaacttatacaattaagaaagaaaatcttccagaaggctttaaggcatcagatgcccacacagtaacaatccaggcaggagatacatggtggaaggcagaaactactatgggagctttcgataagatggcaggctttaactggactaacaagggtcttagcacaactgttgaaaattataagccagagccaggcaagccagatgatggcaagaaggatgatacaacagtaacaaagccagacgatggcaagaaagatgatacaacagtaacaacaccagataatggtaataatgcagcagatgatgcagctacaggcagcacaacagacacaacagctacaacacctaagacaggtgatacaaacgcttcaatgtggatgttacttgcaattatgggaatggcaggaatcgcatttgttactgcaaagaaaagaagtttagtaagaaagtaataatgcttacagacttagaatacaagttatataaatgaaaataatataatgagtagttaaagaagctattcttaagacttataaccgcagggtggaggcttaagagtggcttcttatctttttatgatataatgagcgcaaaagggagtgtatcagaaatatggaaatgccaatgcaaatacacattgaaaccaataaagttttatggtaaaattaaaccaatattattaaagaaataacaaaatggtgtaagaccacataaacaggaggttttaagatacaatggaagcatacaagcaggaatttatagatttcatggtagaaagtgatgtattaaagtttggagattttacattaaagagtggaagaaaatcaccattttttatgaatgcaggtgcatatgtaacaggtacacagcttatgcgtcttggtgagtattatgctaaggctatacacgaaacatatggtgatgattttgatgtgctttttggaccagcatataagggaattccaatcagtgtagttacagctgttgcttatgctaagttatatggcaaagaagtgcgttactgttcagaccgcaaggaagaaaaagatcatggtgcagataagggcggattccttggaagcaagttaaaggatggcgacagagttattatgatagaggatgtaactacatctggtaagtctatggaagaaacagttcctaaggtaagaggagcagcagatgttactatcgtgggtcttatggtatctcttaaccgtatggaagtaggtcttggcggaaagatgagcgcacttgatgagataaaggaaagatatgggttcccaacaagtgctattgttacaatggaggatgttgttgaacacctttataataaggaatgcgaaggcaaggttgttatagatgatacattaaaggctgcaatagacgcttattatgagcagtatggtgtgcgaagctaatagccgtaaaatagtttgatacagtcgtcttataataaacttaattaaatgaagaaatggagattagtatggaagaaaagttatataaaaagatgaagtccgtaggtgtatccaatcttgtgtttggtattgtgactatagcatttggaataggtgcaggtgttatgatgattgttaatggtgcaagacttcttgcacataagtcagatgtacttttttaaatattaggattaactgcctggtatggcatatatatacataaagatgtaaaagcttgtgagttctttgtgatgttgatatatgctgtaccgggcatattgcgttgttaaggtatatgcatataaaggtataagagataaaacataggtagtagaattatgcaaatgaaataaaaaactatacaaacaaaataaaaataattatatgaataaaaataattatgtaaacaaaataaatagagtaaaaagatggacataatagaagtatgaaaaaagaattcaatcataaagcagtaatgaagcttttgtttattatatatatgtgtgttcttgtgtatgttgtgttttttgcagaggctatgggaagaacaccacaggatggttatgtgtataaccttacacctttaaaggaaatcaagcgttttatgaagtatatatgggataatgatgccttaggaagtgcggccagacttaacatatttggaaatattattgcatttatgccatttggaatatatctgccatatacatcggaatcaaagcttggatttatatcgacgtttttatatacattcagtttgtcattgacaatagagctggttcagcttataacgaaggttggaagctgtgatgtggatgatataatacttaatactcttggcggagttattggatatatattgtggtatatatacacaaagttaagaaaaaagtaaaatatctttcattaatattgtgcagttattttagagacaatatgcaaagaaatcaaatatattatataaggttggagattggaatgaaattatttaacaagtacaaattctcggataaaaggcagtcacttggtggaataatatctactataatgggacttctggcattggcatctttgatatatggtgtatatatttcatttaaggcagaaggatatgctggactaaaagtaggaagtcttggacttttaagccttcttatatcggttataggaacttttatcggacttttaagctttaaagaggatgataaattctatactctgtcaaaggttggttcaatgctatgtggaatacttgctgtatttatgatagcagtatttcttatgggattatagataaaataacaatacgatattaaaagtgaataaaataaagaatagtatggagataaatatgtttgatgataatgtagcagagcgttacgcgcttgcaattgaaagaataagccagattaataatgattgtgaaataaagaataaaagccatgcggattacttttctaaagtatctgcatttatcatgcttatggacaggttaaaaacagatgtggaaaacaaagcttttgatgatatgtcattggaggagcttgatgaatataataacagtctttatgcagatgtagccggtgaggcatatgataaaagctatgcgaatccacgcgtgtgtgcaaaggcatttggtgaggacacaggtaaacttatggcaatggtatatatggagcttcgtggacttatcgtgtatatgtatgagaagaggcttgcggatgctgtggcagttatggagctgttcatagaaatatactgcatatttgttgatacacaggcagaagagtccgtaagaaaagaaaaaagaatggatatagtaacagatgagcagtatcgccagttaggagaagctgtttactggtatgtaagcgattatagtgatgattttattgagtacaggataagggagctgctagattcatcgcttgattttgcaaccagaattattatggaaagtgacttaagcgatgtaagatatctttataagtatggcgaatacgtgacagaaaatgagataaagatggcaaagcatcttaatacattaagcgaagaagctataaacgatatggcaaagacatttacagaaggataccgtattggtttcgtactgggaaacaagccgcttgataaaaagaaaacagttaatataagatattgtcttggttttgaaagacttgtaaaagcagagatagaacagtttgaaaaaatggggcttaagcctacaatatacagagctgctgtaaataccatcaataaaagaatgcatataaagataggatattatggtgcaagtcctaataaacagatggattttgaccatagattcgataatgcactatatcttgatggcgactttgttgaaagaaagttaggggcacttaagagtgcttatgaaaagcatagtgagcttgctgatgttcacggaggacctgctgttatggaggtgtttggtgaaacacctttcgaaccggaggatacgattgagtgctgtcatcttgatgataaacaacagaagcttcttgttaagtataataatgaatccggaagtatagttaacagttatatcaaaggagaagaaagaagctttactataatagcttatccatcaccacagataggagataagttccctgaaatattcaatgaaatagttaagataaatactcttgattatgaaaaatataaggctatacagcagaatatcatagatgtccttgatacagcagaatatgttgaagttcatggaaaagacaacaacaagaccgatatcagagtatctgttatgaagattaataatccgaataaggaaactgtttttgaaaactgtcttgcagatgttaatattccgctgggagaagtgtttacatcaccagtgcttaaaggaacagatggtgtacttaatgtaagcagtgtttaccttaatgatattaagtttaataacctttcggtatatttcaaggatggttttgtgacggattatagctgtgataactttgaggatggggtgaagggcaaagcattgtttaaagaaaacgtactgtataaccacgacactctccctatcggtgaatttgctataggaactaacacaacagcttatgttatggctaataaatatgacatagtatatcttcttcctatacttatagttgagaagatgggacctcactttgcgataggtgacacatgttattcaaggtctgaggatgtggcagtgtataatcctgacggtaaagagataatatcaagggataatgaggtttcacttcttagaaagacagagcctgagaaagcatattttaactgtcatacagatattacgataccatatgatgagataggcgatataacagctgttggatatgatggtaaaaagacggttattataaaggatggacggtttgtacttgatggaacaaaggagttaaatgaaccttttatttcttaaatacgtcgtttatcttgacgatatatgtaaaacaaagtagaatattataggtattgtatttatttatctgcataattgtatgctttatatgtgaattgtaagacaatggattacgagtctttattatatataagatgatttgccggataatatggatgcattacatgataatatattattttatgtgatagttatttttctatcagaatgggaggaagttaaacatggctttagtaggaatagttatgggtagcgattctgatatgcctgttatggctaaggcagcagacatattagataagttaggtgtatcttatgagatgacaattatctcagcacacagggaaccagatgtattcttcgaatatgctaaaacagcagaagaaaaaggcttcaaggtaatcatagcaggtgcaggaatggcagcgcatttgccaggaatgtgtgcagctatattccctatgccagtcataggaattcctatgcatacaacttctcttggaggtagagattcattatattcaatagttcagatgccaacaggtattccagttgcgacagtagctattaatggtggtgctaatgcaggaatacttgcagcaaagattcttgcaacatcagatgataagcttcttgaaagacttaagaattacacaaaagaactaaaggaaagtgtacaggctaaggatgcaagacttcaggaagttggttacaaaaactactaataaacaaaactaaaacaacaaaagaatgttaagaacggaggacaataatggattacaagaacgctggtgttgatattgaagcaggttataagtcagttgagttaatgaaagaagcggtaaagtctacattcagaccggaagtattaggtggaatcggtggattctcaggtgcattttcacttgaaaagattaagcagatggaagacccggtacttctttcaggaacagatggatgcggaactaaggttaagttagcatttattatggataagcatgatactatcggtattgatgcagttgctatgtgtgttaatgatgttgtatgcgcaggtggagagccacttttcttccttgactatattgcgtgtggcaagaattatccagaaaagatagctacaattgttggtggtgttgcagaaggctgccgtcagtcagaatgtgcacttatcggtggtgaaacagcagaacatccaggtcttatgccagttgatgagtatgatgttgctggatttgcagtaggtgtagttgacaggaaagaccttataacaggtcaggatataaagccaggtgatacacttataggtatagcatcaagtggtgttcattctaacggtttctcacttgtaagaagtgtatttacaatcacagaggaatcacttaatacatattatgattcacttggaaaaacacttggagaggctttgattgctccaactaagatatacgttaagactatgaagtctataaagaatgctggtgtacgtgttaagggctgcagccatatcacaggtggtggcttctatgaaaatattcctagaatgcttccagatggtgtaagagcagttgttaagaaggacagctatgaggtacctgctatctttaagatgttacagacagatggtgagattgaagaacatatgatgtataacacattcaatatgggtattggacttgtacttgctgttgatcctaaggatgttgatacaacgatggaagctattaaggcagcaggcgagacaccttatgtaatcggtagtgttgaagcaggtgagaagggagttactttatgctaagagtagctgttatggtatccggaggtggcactaaccttcaggctattattgatggtgtaaagaatggcactattactaatacagaaatagctgcagttataagtaacaatgctggtgcgtatgcacttacaagagctaaagataacggaatagctgcttactgcgtatcacctaaggattatgcgactagagatgaatttaataaggcacttttagataaggtcaactcacttaatgtagatcttgtagtgcttgcaggattccttgttaaaattccagaggaaatggttcatcagtacagccatagaattattaatattcatccatcacttataccatctttctgcggagttggcttctatggtcttcatgtccatgaggcagctttggcaaaaggcgtaaaggtgacaggtgcaactgttcattatgtggatgagggcatggatacaggagagattatattccagaaggctgttgatgttcttgatggtgatacaccggaaactcttcagaaaagagttatggaacaggcagaatggaagctgctccctgcggctatcaataagattgctaatgagcatgataactaatacagttcttatatatattaaagatgtcagtattagtattgataatactggaaattaagtataacgagtacgaaaactggaggaataaaagatgaaggttttagttgtaggaagtggtggacgtgaacatgcaatatgttggaagataagccagagtcctaaggttgataagatatattgcgcacctggtaatgcaggtattgcagaggttgcagagtgtgtagatataaaggctatggagtttgataagcttgttgcatttgctaaggataacgctatagatttaacagttgttggcatggatgatccacttgtaggtggtatagttgatgtgtttgaaaaagaaggtttaagagtattcggaccaagaaagaacgctgctatacttgaaggttctaaggcattttcaaaggatcttatgaaaaagtataacattcctactgctgcatacgagacatttacatctgcttctgatgcaaagaagtatcttgagacagccaaatatcctatcgtgcttaaggcagatggacttgcacttggtaaaggtgttcttatatgtgagaataaggacgtggcacttgctggcgtggatgagcttatgcttgataagaagtttggatcagcaggtaatactattgttattgaagagttcatgacaggacgtgaagtgtctgtactttctttcgtggatggcaacactataaagattatgtcatcagcacaggatcataagagagccaaggatggtgatcagggacttaacacaggtggtatgggtaacttctcaccttcaccattctatactaaggaagttgatgatttctgtaagaagtatatatatcaggcaacagtagatgccatgaaagcagaaggaagaccttttaagggagtaatattctttggtcttatgttaactcctgatggacctaaggtacttgaatacaatgcaagatttggtgatccagaggcacaggttgtacttccaagaatggagaatgatattatagatgtatttgaggcatgtatagatggtacacttgataaagtggatcttaagtttgctgataatgcatgtgtatgtgttgtgcttgcatctgatggatatcctcttgaatacaagaagggctttgagataaaaggcatggaaaacttcaggaataaagattcatatttcttattccatgcaggtactaagtttaacgaggatggcaaagttgtaactaacggaggccgtgtactcggagttacagcacttggagctgatttaaaggaagcacgtgctaacgcatataaggctacagaatgggtggattttgctaacaagtatatgcgccatgatataggcagatctattgatgaagcgtagtctggctgacatcgtaataatagttaaatggaggtaacaaccgtatgaagattacatctgtaaagggtacaaatgattatcttcctaatgaagttgagataagagattatcttcagaatgaaatattaaaagtatatgttgctaatggctttgaacatataactacaccagttatagaggatatagagaatcttgataagagtgatggtggagagaatcttaatcttatttttaagattatgaaaagaggagataagctcgataaggcactcgcaagtggagtgacatcaaaaaatgaaaatgttcttgcagatatgggcttaagatatgatcttacacttccactgagcagatattttgctaataataaagataagcttacactgcctatgaagtgtatacagatggacagagtatatagagctgaaagaccacagaagggaagacttcgtgagtttgtacagtgcgatattgatattatcggttctgattcaagggattcagaggttgaacttatacttactacaacaagagcacttaaggctattggcatgaagaactttaaggttaaggttaatgacagaagactgcttcgtgccttccttatggattgtggatttgaagaagaacagctcgacagtgtgtgcataacatttgataagatggataaagttggccttgatggcgtaaaaaaggaacttgaagaaaaagagtttgctgatgaagctatagctaagtttacagatttcttatcaggagtggataatccacagcagataacattagagtctgttaagtctattcttgctgataaagcacctgcggaaagtcttgaatacattataaactcagttaatgcattatgtaatggtgagtttgatgttgtatttgatctttctttagtaagaggacagggatattatactggtactgtatttgaggtagagagtattgattttaagggagccatagctggtggtggaagatatgataacctcataggcaagttcttaggacagcaggtaagtgcagtaggcttttctataggctttgagcgtatattctcaattcttatggaacacggtgttgatcttgcagacaagggaaacaggatagctgttatgtatgatgagggagatcttactaatgcatatagaatagctgaaaagtacagagcagaaggaaagatatgttcattatacgtaaagcctaaaaagatgggtaagttcttatcaaagcttcaggaaagaggctatgctggatttatcaatgtaagcaatggcgatgagatatctgattttgaataataatatgataaaaagcgtatgtattgccggtataaaagccggctgatacatacgtttttttatcgttaatacgcagctgccttgtcaagggcattctgtatagcaccaagaagcaggcttgcagtatatttgttggatgaatcataagttatgtcagcggttgtaccacgttggatcacagcgtttttaatttcatcgaaggatggtgcaagcataggatacattgtctggactgattccgacatattaacaagttcaatgctgttaatattgtcagaatcaacagttacctggatatcaacaggatttccgttaagcataagagaggatgtatatacgccaggagaatatgtaacactggtgttaatagaattattttgtccagcagcgtttgtgggatggctttctggttctttgtctgatagtatatatatagctgctattataataaatgctataattacgcataatgctagtattagtttcttaagcggtatgactaatatacgtgtagagccactcatcagataaatcctcctatactggatactatttataagaatatatgagagtgtgtgaaaatatagaacgaagatataaaaaggagataatgcagaatgtcattacagtacatatttggcggttcgggtgcaggaaagtcaacatatttatataattccataataaaagagtcaattaagaatcctttggaaaattatataatagtagttcctgaacagtatactatggcaacacagaaaagagtggtggagctgcatccaagaaaaggtgtacttaacatagatgttgtaagctttgaaaggcttgcatataaagtatttgaggaagttggggcagcagattaccctgttcttgacgatactggtaagaaccttatagtaagaagagtgcttgagcagaataaaaaggctttaagattctttgggagcaacatatccaatacaggctttgtttcggagcttaagtcagttatatcagaaatgcttcagtatgacataagtgttgataagcttcttgatattaataaaaatgtggataataacagcctgcttgggatgaagctggatgatatatcacttatatatggaggcttcagggaattcataaagaacaattacataacgtcagaagaaatactggatcttatgtgcaggaaagtaacagagtcatcaaagatacgtggaagtgttatagcatttgacggcttcactggttttacaccagtgcagtacaggcttatggctatacttcttgatatgtgcaaagaagtgaaggttgcacttactatagatatttccgaacatgtcaatataaatgaggggatagagagcctgttttatatgacaaaggatactgttgcacatcttaacagaatatgtgatgaagggcatattaatgtggataaagtaacagttggtgaagatacagtgttaacaagatttgcagcctctaaggagctggcatttcttgaaaagaatatattcaggccaggtcttagatattacagtggaaaagttaatgatatagtcatgtatgcaggtatcacacctaaagatgagatacagtatgtatcaggggaaatattaaagcttacaagactgcagggctttaggtataacgaaatagcagtagtaacaggagatatatcagtatatggaaagcttgctgccaatatatttgcccagaatgatataccatatttccttgaccagaagctgcatgttacagataactgtcttgtagagatgataacagctgtgcttgatgttattgaaaagaattatacttatgacagtatgttcagatatttaagaaccgggcttactggattatcagatgaaaatatagatattcttgataactattgtcttgctgtaggcataaagggaagaaaacagtggagtacgcagtggtgtagaaagttcagacgcagtggcataacaacggatttaaatatgcttaatgaattgaggcttaatgttatagagcctttaacagagcttgataaagaactaaaggaagcagatggcaatgtaagacttatgacaacggcactgtataagtttcttgtaaggatgcattgtgaggaacagatgtctttacttgcaaagagccatggggatgagtacaggcagatatataaaaaaattatggagctgtttgataaaatagtacatctgcttggaagtgaaaaagtatctgttaaagaatataaccgtatcatggcatctggttttgatgagataaagataggacttattcctccgacaaaggactgcgtggtgataggtgatattgaaaggacaagacttgataacataaaagcaatgttctttataggtgtaaatgatggatatgtgcctaaaaagagtgacagcaggagtgtgctttcagaaacagacagacaaaaactaaaggaaatggatgtatccttgtcaatgtctgtgagggagaaagcatttgttcaaagattctatctgtatcttatcatgacaaaaacatcaggaaggctatacataacatatgcatataacagtatggatatgaaagcaatattaccatcgtatatagtaagaatgttaaagaaaatgtttcctgggatgaatgtgctttcttatgatgacacagcgaaggaacattcatatataaagattcctaagacagagcttgaatggactgatgagaatctggcaaaaatacttgcagatggtgtggcactcaaactctatggaaaagaactaacaggaagtgtaacatcgtttgaacagtttgcatcatgtcagtatgcttatttctgccgttatggactagacctttcggaacgtgaggagtacaggtttgcagtaaatgatttcggaacgatacttcatgcagttatagaagatgtatcaaagaatattaaaagaaacaaaaaatcttttgtactgctgtcagatgaagaaagaagaagcctggtatcggaaagtatacatgcagttgcagataattatggcaatacgatacttaaaagcacaagccgaaacgaatatcttataaaacgcatggaggatcttgcagataaaacattgtgggctataggaaaacagcttgcggatggtctttttacacctgatacatttgaaaaaggttttcttacaaggatagaggatctgccacatgatgtcagcttttttatgcagggtaaaatagacagaatagatatatgcgaggatgatgaaaacgtatatgtcaaggttgttgattataagacaggacacgctgattttgatctgttcaaaacatattatggccttaaaatacagctttttacatacatgagagaagctattgcatacgaaaaaaagaaacatgaaggtaaaaatgtgattcctgcaggactgttgtactataacatagataatcctatagtggaaacaaagcagacggatgattcagctatcgaggagcttataagaaaggaacttcgcatgaagggggttgttaactccaataagaatattataagcaagcttgattctacagaggggacgtcacttaatattcctgtaacagtaggaaaatcaggaaatatagatgcgtctaaaagcaaggtgcttacaacagaagagcttttggcagttggcagatatgttgataaggagaatcttgataaagcaacaaaaatactggatggaagtatacatattaatccatatgagaagggaaatgaaaacagctgtgcatattgtccttataacagtgtatgcggatttagtgaggatatgccaggtgttaaattcagaagacttgaatatatgagtcctgatgatatatgggcacagattaaaggcaatgaagataaacaaaaagatgcaggtaaagatgaagtgggaaaagaggagtagtgtatggcaaagtcatggacagtgcagcagcttgatgctatgaatactaaagatagaaatattcttgtatcagcggcagcaggttctggtaaaacagctgtgttagtagaaagaatagtaagaaagataacaggtgaaaaccagactgatatagacagactcgttgttgtaacctttacaagagcagcagcggctgagatgaaagcaagaataagaaacagacttgatgatatgcttgatgaggatgagaataatgctaatcttattaagcagattgcacttgttaataatgcacagataactactatagatagtttttgcctgtggatattaaagaatcatttttcggaaattaatcttgatcctggtttcagagtggctgataaaggagaaataacacttcttgaaaatgatgtaatggaagatatgcttgaggactattaccagaatggtgatgaacagttcataaaacttatagatgcctatggtactgggagaaatgatgcgaatatagaggaaataatcaaaaagatatatgctctggcaagaagtaatccatggccggatgagtggtatgaacaggtgcttgatacatataccagcatagataacggcagtaacaaagtacttgccaatctatatgaaagcatagtgtattcaataagtgactataagaaaaaatatgaatatatgatagaggtgtgtaacaggccagatggaccggtttcatatcttagtgctgttaattcagactatatggctatatgtggtattgttaattcgcaggatattaacgagctggcaaaaagaatatcaaacatcagctttgaaagactaagtacaaaaaagatgccggatgctttggatgaacttaaggagtatgtaaaaggacagagagataaatataagaaatacatagcaggtcttactaagaatgtgtttacagcagatatagacagtcttatggaggatgttcacgctaatgccatggcagttggaatgatggtgcagctgtcaaaggattttgcagagaggatgcagacagagaaaaaagacagaggaatagttgaattcaatgatatagaacattatgcacttgatattctggtaagaaagaatggcatagataaggaatataccggggtggctgatgaacttgccaaatattttgatgagatacttattgatgagtaccaggattccaaccagcttcaggaagaaatacttacagcaatatcgagggaaaggcttgatgataagcctgataatatgtatatggttggtgatgttaaacagagtatatataagttcagacttgcgtgtcctgagctttttatgaaaaagtattacagttatcagacatataaaaatgataatgcagaagatataaaagaagccttaacagataagcaaaaagcctgcaggatagaacttcaaaagaacttcagaagcaggaaaaatatacttgatacaactaacgatgtgttctacagggttatgaaccgcaattattgtgggatagaatatgatggcagccagcagttaaactgtgggcttgattatccggaatgtaatgataaaagaaactttggatgggaatctgaaaaaagtacggacgtagtgcttatagatacatccgaggatgatgaaaacagcagcatagaagcagaggcattatacgccgtgaagcgcataaaggctctgatgacagatgagaatccttattatgtgtatgatacagacttatcagactacagaagaatacagtatggtgatatagcgatacttactaggacacttacaggctgggcagatacatttgttaatgttcttcttgataatgatattcctgcaatggcagaaacagcacagcagtattttaaagtaagagagataaaggtacttataagtctgcttacatgcatagataatcctatgcaggatatacctatggcatcagtgctgctgtcatatttcggaggttttacagaagatgagcttgcaatgttaagagtttatggtaaaaatgcttccaaaacagataaactttttataaaacagattaaggcagtaaaagaaagtggtgatgcagcattaaaagagctttcatacaaatgtggcagctttcttgataaactagctgcgctgcgtaaaaaatcaagacttatgacgatatatgatctgttgtgggatatagtatataatacaggatattatgactatgttggtacaatgcctgcaggaaaaaagaggcagtcaaacatagatgtacttcttgatagggcatcatcatttgaaggaactagttatagtggattgttcaactttttaagatatatagaaagacttcagaaatatgatatagaacttacagattcacaagggtctggagttggtagtgatgctgtcagggttatgagtatacataaaagtaagggtctggagtttcctgtagttatcatggctggtcttaacaagcagattaataagatggatgcaagaaacagacttgttatagaccaggagcttggaataggaactgattatgttaatcttgataagcatacgaaaacttcaactataataaagggtgccgttgcaagaaaaatcctgcgtgattccatatcggaagaagaacgtgtgttatatgttgctatgacaagagcaagggaaaagcttattatgcttggcagtgtgacaggaacagataagaaaatgtcagcatggcagatgttatcagttgaacttgcactaaatgggatatattcatatgccgagtgtgaaaatatagataagtattcagatatggttatgccagttgcacttatggacaaagctttaaacagtggaatttttaatgtctgtataataacctcagatgaagacgtggtatgtgatacagctgcggataatgaccaggtaagtgatacagacaatgtgcagccatgtgtcacagacaatacacgattggatgaaggtgtgccatatattaatgagaaggcttctgacatgcatatatcagagctgcctgaatatataaaggatccggatgcagatagaaaggtcaaggttactgtatcagagttaaagaagatgcaggaagattcagactatgataacaatgcatttatgccggacgatataaaagcggcatataaagaagctggtaaggatgaattggaagcagctgataaaataacaaatcaggaaaaagcagaagatgaagattttgtaccaacaatacctgattttatatcagataaagaagaaacacttcgcgcgaatgaacgtggaacggcttatcacagagttatggaatgtttagattataataagattgaaagccttgacgatgtaaaagcagatattaaaaaaatgcttgattctgaaaaaatgaacagcatgcaggctggctgtatcagggcagatgatgtttatgaattcgtaaaatcacctataggacaacgcataaaggaggctgttaagaaaaacaatgtaaggcgtgaacagccatttatgttcgaatatgacagacagcttgtacagggagttattgacctttacatgatagaggatgataagatagttcttgtagattataaaacggaccgtgtaaaaaaaggaaaggcgggcgagcaggagctcataagaagatatagtgtacagcttgattattatgcgcttgcccttgttcagctgacggggcttgaggttaaagaaaaaattatatactcatttgcacttggaaaacagataagtcttgaatgaaataattgcatgatagttgaatttataaaatttatactatatacttaattagttacactgatatggtcgtgcaggaaacggatttatgagtgtaaagaaagtaaaatataaattatgattttatgtgccatgactcgcacaggaatgaggaatagtatgtcagatattacaagtgaaataaagaaaagaaggacatttgcgattatatcgcatcccgatgcaggtaagacaactcttacagaaaagtttctgttatatggaggtgctatcaacttagcaggttctgtaaagggtaagaaaacagcaaagcatgcagtatcagactggatggagatagaaaaggaaagaggtatttcggtaacatcttctgtacttcagtttaattatgatggatattgcatcaatattcttgataccccaggacatgaggatttctcagaggatacctacagaacgcttatggcagcagattcggcagtcatggttatagatgcatcaaagggtgtcgaaaagcagactattaagcttttcaaggtatgtgttatgagacatattcctatatttacatttataaataagatggatagagaagccaatgatccatttgaactccttgatgaaatagagaatgtgcttggtatatcaacatgtcctataaactggcctataggctgtggtaaagagtttaaaggagtgtatgacagaaagcaaagagaggtatcactctttaaagcagctatgaatggccagaaggaagttgctactaagaatatcgcacttgatgcgcctgagcttaaagcggagataggtgatgcctatcttgaaaaattagatgaggatgttgaacttcttgatggtgcaagtgcagagtttgatcttgcaaaggtgcaggcaggagatcttacgcctgtattctttggttcggctcttactaactttggtgttgaaacatttttacagcatttccttgatatgactacatcaccacttccacgtaactcatcagaaggacttattgatccttttaaggaggatttctcagcatttgtatttaaaatacaggctaatatgaataaagcacacagagacagaattgcttttatgcgtatatgttcgggaaagtttactgcaggtatggaggctaatcatgtgcagggaggcaagaagataagactttcacagccacagcagatgatggcacaggaaagacacatagttgaagaggcatatgcaggagatattataggtgtatttgatccgggtatattctcgataggtgatacaatatgttcatctaataagaagtttatgtttgatggcattcctacatttgcaccagagcattttgcaagagtaagacagatagatactatgaagcgtaagcagttcataaagggtatcagccagatagcacaggaaggtgcaatccagatattccaggaatataatactggaatggaagagataattgtaggtgttgttggtgttcttcagtttgaagtgctggaatatcgtcttaaaaatgagtataatgtagatataaagcttgagacactgccatatgagcatatccgctggatagagaatccacaggaggtggatgtaaacagaatagtaggtacatcggatatgaagaagattaaagaccttaaaggcaatccattgcttgtctttgctaacagctggtctgtcaatatggtacttgaacgtaacgaaggtcttaagctgtcagaatttggaagaaactagtacattattaaaaaaagatgtactataacgaaacatggcttaaaataaggaaccgggtgattagatggaagaaaactacatgaatgttgcaaaaaagataacagctgttgtacttatgatggtcataattatatgtactcagtttggatacacaggtgccatagaggctaaagcggatgatgacattatagcgacaggctatgttaactatgatgttactgatttaaggataagaactgctccggttaatggaagcattataacaaaggttaatggtggctttaagttcgatatatatgaggaagtaagtacaagtgcgacatatagctggtataatattggattttatcttgatggtgaatatacaagaggctatataacctcacagtatacaactaaggataaaaagtcggattataagccagataataattttgaggattatcttacagcacaggattttccagaatcatataaagaaagcttaagacagctgcatgagaagtatccattatgggtttttgtggcagatcataacggcagagactgggataccatggttaacgcacagaatgttataggaagaagtcttatatacagctcggcagattcatcgtggaagtctacagcagaaggatgttatgactgggaaacaggtgagtatacgatacttgacagtggtggctgggtacaggcatcagaaggtcttgtaaaatatgcccttgatcctcgtaatttccttgatgatacatatatattcatgtttgaaagtctttcgtatgattcatctgtacataatacagatggtgtgcgtaacataataagtggtacatttatggaagattcaggacatgatcttgatggatatgactatgcaacactgcttatgtatgcaggagaggtgtcaaaggtgagtccttaccatcttgcaacaagaattatacaggagcagggtgctaatggtattggtaaccagatatcaggtaatgtaagtggttacagaggttattataactattacagtcagaatgcctatgccagtggtggtcttagtgcagtacagaatggccttagatatgccatgcagacagatgactttaatatgcgcccatggaatacaagatataaggctgttgtaggtggtgctattaatcttggaaagtggtatataaacagaggacaggatacgatatattatgaaaaatttgatataaagaatttttcacatcagtatatgacaaatgtcttagcaccacgttcagaagccacaagagcaaagaaagcatatagtacaagtacgcttaacaacacaacatttaagttcagtataccagtatatgataatatgccttcatcaagatgtattattcctgatggcaaccagagctctaataactggttaagaggcttgtcagttgatggttattcacttacacctacattttcatcagatactacagattatagtcttatagttgaaaatgaagttaaaagcatagacgtatcagcttcggcagcagatactaatgcaagtataagcggaagaggaagccacagattatctgtaggaaataacactatcaacatagtggtcactgcagaagatggaggaacaaggacttatactatcaatgtggtaagaaaagaggctgttaatccagaaccatcaccagagccagtaaaaccagctccggacaatggaggcaatggaggcaatagtggaaacactgaaagcgatgggtttaagacaggacttctgatagataatgacaagaagatagttactagaataggtgttggaagtagtgtgcagagtatacttgatggcataacatataccaatggatgttatggaaagcttcttaacagtgataacagcgaatgttcatcagatgatacagtagctacaggtgataagcttactatatatagaaaagatggaagcgtgtatgcacagtacgatattgttatatatggtgatgtgaatggtgatggtgttatagatcttgtggattttgtagctatcaagagagctatacttaatgtatcacagccagagggtgtgcattttgaggcagcagatataattcatgatggaagtatagatcttatggattttgtcgctattaagagacacatacttggagtaagttttattcagcaggattagtttaggtattaaaggtaaaatgatatgaaaaatataagaaaaatagctgctgtccttatgacattattattatgtgtaccattttttaatgttacaagtgctaaagcggcaggaacagcaagagtttcaataggttcagcaagtggaacagtgggagaaacagtatctgtaacggtttcaatagatgcaagttttgagataggtgctgctacaatatatgtatcatatgatacatcagtactggaaccagtaagcggaagcaacacaggaacagtaacctgtaacttccttgacagcaatgcatcaagcagccagtcttcatctatcagcttcaggataaaggctgctggaacttcaagtcttagtgttataggtgattccaaggttataagcatggactacgataatgcatcaatatcaaggtcatcgggctcaataacaggaatagcacctgcaagttattctacagataacacattaagttcacttgagataagtccaggtgtgctttcaccagcattttcatctaatgttactacatatacaacatcagttggaagtgattgtgacagacttacggtaagtgctgcaccaaatgattcaaaggctacagtcaaagtatctggtacacgtatggatccgggacttaatacaactactattacagtaacagccgaaaatggaagtaaaaaagtatatactatcaaaacaactaaaagtgataatgtaataacacctgagcaggcaagtaaagaagcagaagaaactgatggaactaatcagggtggaacaacagatggagataacaacagtattatccaggaacctgcggtaagtattgatggaaatgaatataaggtaatatcttcttttgatgagcatccactgccatcaggttatgtccagtcagaaaccgattataatggcattaagatagctgtaggcatgggaactaacacaagagttatgttagcttatcttgagagcacagatggaacaggtgaaagtggtttttatgtatatgattcagtaaagaagactttttcaaaatacatagaagtatatcagccagagctgtcatattgtattcttcctatagatgagtcatctatggagcttcctgatggttatgaagcaggaagaataaacatcaataacagggaagtggatgtacttcttgataaaactggtaattatgcactgttttatggcgtaagctcaactggtgatacaggatggttcaggtataacatcaacgatggtacgatacagggctatgccggatataattcatcagatgaaccagcattgatacatgtgcaggataaggaagcttctgctaaaggagtagtaaacgtcttaaaaggcacaagcaatataatattagcattattagttgtacttgtacttataatagcagctcttattgtagcagttatagtactttcacgtaaactttctgtaagtaagaaagcattcgtaaaagccatggatgagtatgatgattcagatgaatatgatgagcttcttataaaaaaagatgatagtgatgacagcgataatgatgaagctgattcacaggaatatgatgaagatatagaagtatcagaagatgctgatattgaagaaagtaccgaaaacaatgacagctataatacacagaatgaagaatatacagatgattcttcagatgcagatatattagataacgaatcagaggaaatcgaacttgaggaaatagagttggaggaaactgataagaagtaatattgttgtttaacacacattcttaacgtacggacgacagcatatatgagaaaagcaggtgtgcatacatcaacgatgccagaagcttcaattggat

SEQ ID NO: 346 - DNA, 11582 bp, Unknown
  gut microbiota DNA sequence
ctcaatattcttcgtaaggacacctaaaaaatatccaattaaacaatcatattcacacctatccacaccttatacagagttatgcacaacatgtgcataacttgtgcataacttttctattttttgtgattacatgtgtgtttttttgctattttccgctattttcctatgttttttttgtttatatattatcaacacaattttgtataacacggaattttttaaagattttttaagttatccacaattttattgaaaaaaatccacaaatgctttatgattataaaggaatgtttttttatcattctaatacagccagaaaggcaattattatggaagaattaattaacagctgggatagaatccttcaaatatttaaagaggaatacgacatacaggatatttcctttaatacatttattaaaccccttaagatatattcagtagatgataacgtaattaccttattagtatctaagggccgtatgggtgtatccctcatagaaaagaaatatcgtgaatttcttgaaataactgtctgtgaggttatggatgataaatacacgatccgtcttatatccgatgaagaccttgaacatgaggaaaagattaaaaaagaaaagattaaaaaagatgagcctaagaaagataataacaattctaacaatctttcccttaatcttaatcctaattatacattcgacacatttgtcgttggtaacaataacagccttgcacatgcagcctctgtagctgttgctgaatctcctggcgaagtatataacccactttttatatatggtggtgttggacttggcaagactcatcttatgcaggctattgcacattttattattgaaaacaatcctaataaaaaggtattgtatgtaacaagtgaaactttcaccaatgagcttatagatgccatccgtaataaagaaaatgctgaaaaaggcaatgctgctttcagaaaccgttaccgtaacattgatgtgcttcttattgatgatatacagtttattataggtaaggaatctacacaggaagagttcttccatacctttaactctttatatcaggatagaaagcagattgttatatcttctgataaacctcctaaggaaatggaaactctttcggaacgtctaagaacaagattcgagatgggacttcctgtagatatccagattcctacatacgaaactaagatggccattataaaaagaaaagctgaattatcatcacttgatattccatatgatgtacaggattacgtggcaacccatataaagtcaagtataagggagcttgagggtgcacttacaaagttatctgcattttcaaagttatcgcatacacctattactgtagaattcgctgaacagacattaaaagatcttatatctcctgattctaaaaaagaaatcacacctgagcttattatacagacggtggcagatcactttaatgttaaatacgatgacataatatcatctaagcgtaatgcaaacatagtacatccaagacaaattgccatgtatctatgccgtcagatgacaacagctcctcttcaggccgtaggtaaagctttaggtaacagagatcatacaacagttatccacggagctgaaaagattgccaaagaagttgtccagaacgaatcagtacgcaatactattgatattatcatcaaaaagatcaatccttcatgatgttattaacaattattaactgtgttataaacagttatccacaaagttatcaacagattgtggatttttccacatggtatttgttataacctgtttataatatgtgctttttatgttgatgttcatttataacttttttttcaattttttttggattttttttatcaacataatttttgttttttaaacagtatactcagtccgttttaactggcttatccttttgccaaacgctgatatttactagattggcaggggtttttaacatattaacagcccctactataactactactgaattatatttatatatatatgtgtctggggaaggtttcctcgcaccgaaaggagttttgaacaattatgaaacttgtattctcaaaaagtgaacttaataaagccgttggtattgttatgaaagcggtacctgtacgtaccactatgaatattcttgaatgtatcttaatagatgctactactaacgttattaagtttacaggtaatgatatggaactcggtattgaaactatcgttgatggtgagatacttgaaaaaggtaaagttgctattgaagcaaagcttttttctgaaatagtaagaaagcttccagatagtgaagtaactattactacagattccaactatacatctttaattacatgtgaaaacagtaaaattaacattgctggtaaatctggagatgatttttcttatttacctataatagataaagataaaatgatcactatttcccagtttaaacttaaggaaataatcaaccagactattttctctacagcacctaacgataacaataaaatgatgacaggtgaactttttgaggtatcagaaaatactcttaaggttgtaggccttgatggacatagaattgctataagaaacattgcacttgaaggaagagctgatgatgttaaggtagtagtacctggaaaaacattacaggagataagtaagatattatctactgatgcagaaaatatggttaatgtatactttactaataatcatattttatttgagttcgataatactattgtagtttcaagacttattgaaggtgaatacttcaaaataagccagatgttatcaagtgattatgaaacaaaagttgttattaataaaaaagaatttatagattctatagacagagctaatcttcttattactgagagcgaaaagaaaccaattattattaatattacagatggttcacttgaagttaatgttaattcatcaaagggaaagtctaacgaaaatatagatattaaaaaagagggtaaggatcttatgattggctttaaccctaagttccttatggatgcattaaaagttattgacgatgaaacagtagatatatatcttgttaaccctaaggcaccttgttttataagagatgctaaccagtcatatatatatcttatacttcctgttaattttacagcttaaatataatatttatgattatgccgtttgttaagttataaggcaatattaaatttattataaaaagttgtatattagttcaggtatatgtttagattttagataaaatatcagaaatgaggattatcatggaagaattaactattagaaaaggtgatgacttcatcaagttaggtcaggctgttaaagctgttggattcgttgaatcaggagtagaagctaaggaagttatccagagtggacttgtaaaagtcaatggagttgtggaaaaacaacgaggaaaaaagcttgttggtggagaagttgtagaattcaacggcaataagcttattattaagcgctgataacagcaaataaactattcagggacaagctgatatgctatacattgctctgaacgataacaaattatggcaggtgaaacagtggttattgattctctagatttaaagaattatcggaattatgatattcttgatatgaatttcgataaaaatgtcaatattatatatggtgacaatgcacagggaaagactaatatacttgagtctatatatatgtgtgccacctcaaggtcacatcgtggcagtaaagacaaagaaatgataagattcggagagtcagaatcacatataaaagccaacgtgttaaaaaatgacataaactatcgtatcgacatgcatcttaagggaaacaaagccaaaggtatagcaataaatggaataccaataaaaaaggcagttgacctgtttggtataatacagatagtacttttctcaccagaagatcttaatattataaaaaatggtccttccgagagaagaagatttatggatatggagttaagccagctgaataagatatatctcagtaatcttgttaattataataaagtgctggttcagcgtaataagctgctaaaagaattatcatttaacatgacagatgaacttttatcaactcttgatatatgggatatgcagcttgtgcattatggaagaagcataatcgatggaagaattaagtttgttgaagaacttaatgatataataagcagtattcactctaatcttacaggaagtaaagaaaagcttgtagttgagtatgctccatatacgacgtctgaaaggcttgaagatatggtaagtgcatcaagagataaggatataaggtataaaagcacaggaattggaccacataaggatgatcttgttttttatatcaatggacaagatgtaagaaagtatggatcccagggacagcagaggacaacagcactgtcacttaagctgtcagagattgaacttgtaaagaagcttactaaagataatcctattcttcttttggatgatgtgctgtcagagcttgacagtaacaggcagaattatctgcttaacagtataggtgatatacagacgattatcacgtgtacaggtttagatgaatttattaataacagaataaatattaataaagtttttaaagtaactaatggaacagtaagtcacgtacaatgcggtgatggtaccgcagaaatgaggtaatatggcagagcagaattatggtggagatcagattcagatattaaagggtcttgaagctgttagaaagagaccaggtatgtatataggtagtacatctggaagaggattacatcatcttgtatatgaaatagtagataatgcggttgatgaggcacttgcaggatactgtaatgttattaaggtattcatcaataaggataactcaataactgttacagataacggaagaggtgtacctgtagatattaatcacgaaactggaaagcctgccattgaagtagtgtatacaatgttacatgcaggtggtaagttcggtggtggaggatataaggtatccggtggacttcacggtgtaggtgcatctgttgttaatgctttatcagagtggatggaagttgaagttaaaagagatggacatatatatgagcagcgttatgaaagaggagatgtatgttatgcattaaggacagtaggtgattgtcctgcggatgaaactggaactaaggtaacatttcttcctgataaggagatattccaggaaacaactgtgtttgagtatgacatattaaaacacagattaagagagatggcgttccttactaaagggataaagattatacttactgacttaagagaaggtcaggaaaaggaagaaacattccattatgagggcggtataagagaattcgttgagtatataaacaagagcaaggagccactttacagccaggtaatatattgtgaaggtgtcaaggataatgtacaggttgaagtagctttccagcataatgatggttttaatgaggttgtagattcatttgttaacaatataaagactcctgagggtggaacacatcttgctggttttagaaatgcgatgactaaaacatttaatgactacgcaagaaagaataaaattcttaaagagagcgagcagagtctttctggtgatgatataagagagggacttacagcgatagtaagtgttaagatagaggatccccagtttgaaggacagactaagcagaagcttggtaatactatagcaagaagtgcagttgacagcatagtatcagaacagcttcagatatttcttgaacagaatccatcggtagcaaaggctatatgtgagaaatcgttacttgcacaaagagcaagggaggctgcaagaaaggcaagagatcttacaagaagaaagacagcacttgagagtacatcgcttccaggcaagcttgctgactgtacagacaagaatccagagaattgtgaaatctatatcgttgagggagattcagccggtggttcagctaaaactgcaagaagccgtgcaactcaggctattcttccacttcgtggcaagattcttaatgtagaaaaggcaagacttgacagaatacttggaaacaaggaaatacaagctatgattacagcatttggtacaggtattcatgatgattttgatattaaaaagttaagatatcacaagataataatcatgactgatgccgatgttgatggagcacatattgcaacacttcttctgacattcttctacagatttatgccagagcttataaagcagggacacgtataccttgcacagccacctctttacaaggttgagaagaacaagaaggtttggtatgcgtacagtgatgatgaactgaatcagattatgacagaaatcggaagagaccagaacaacaaggtacagcgttataagggccttggtgagatggatgcagagcagttatgggatacaactatggatccacataagagagtacttttaagagtagatatgaaggaagatgatgaggcagatcttgatgttacattttcaacacttatgggagataaggtagaaccaagacgtgaatttattgagaataatgccagatttgtaagaaatcttgatatctaaatgaatgtaaaatattatacagactgtatatagtgatgcagcaaagaaaggaattaatcaaatggatgaacatatctttgataaagttcaggaagtagatatgcaaaagactatgaaggattattacatagactatgccatgagtgttatcgcttcaagagcattgccagatgtaagagatggtcttaagccagttcaaagaagaatactgtattctatggttgaacttaacaatggtcctgataaaccacatagaaagtgtgcccgtatcgtaggtgatacaatgggtaaatatcatcctcatggagattcatctatctatgaggcacttgtaaagcttgcccaggacttcaatacgcgatatccacttgttgatggacacggtaactttggttctgttgatggtgatggggcagcagccatgcgatatactgaggcaagactcagtaaaatatctatggagatgacagcagatcttaacaaagatactgttgattttatacctaactttgatgagacagagaaagaaccaactgttcttccatcaagatatcctaatctgcttgttaatggtacatcaggtatagcggtaggtatggcaactaatattccaccacacaacttaagggaagtcataggtgctgttgtaaaaattatagataacaagataaacgaggacagggaaactacacttgaggaaatacttgagatagttaaaggtcctgattttcctacaggtggtacaatcataggaaagacggctattgaagaggcttacagaactggaagggctaagataagagtcagagctgttacgaatattgaacctatgcctaacggaaaaaacagaatagttgtaacagagcttccttacatggttaacaaggcaaggcttatagaaaatattgctgatcttgtaagggataagagagtagaaggaatcacagacttacgtgatgagtcagacagggaaggtatgcgtatagctatcgagttaagaagagatgtgaatcctaatattatacttaaccagctatataagcatactcagcttcaggatacatttggtgttataatgcttgcacttgttgacaatcagccaaaggttcttaatctttacgaaatgcttaagtattatcttatgcatcaggaagatgttgttacaagaagaactaagtatgatcttaacaaggcagaggaaagagcacacatattagagggattaataatagcccttgataatatagacagagttatatcaatcataagaggatcttcaactgtacaggctgccaaggaaagtcttatgaaagaattcaatcttacagatgcacagtcacaggctatagttgatatgcgtcttagagcccttactggtttagagagaagtaagattgaggcagaacttgctgatttacagaagaagattgaggaatacagatctatacttgctgataagaataagcttcttactgttataaagacagagatatctcttatagcagacaagtatggtgatgaaagaagaacttcaataggatatgatgaatatgatctttcaatggaagaccttataccagatgaagcttgtgttatagcacgcactaatatgggatatgtaaagagaatgacacctgataatttcaagagccagcacagaggtggcaagggaattaagggtatgcagacacttgaagaggattatattaaagatctgttcatgacaacttcccaccatgtgcttacattctttacgaatacaggaagagcatataagcttaaggcatatgagataccagaagcaggaagaacatcaagaggaacagcaatcattaatcttttacagcttgcaccaggtgaaacaataacagctgtagttccagtgaaggtagaggatataagtgataatgattatctttttatggctactaagaatggtatagtcaagaagactccttgtagggaattcgctaacataagaaagaatggcatacaagctatgacactaagggatgatgatgaacttatagaggttaagttaactgatgatactacagaagtaatgatggttactaagttaggtatgtgtataagattcaaggcaacagatgtaagacctacaggaagatccgcaatgggggttataggcatgaatcttatggatactgatgaggttgtaggagtacagcttaatacacagggcgatactatgcttattgtttcagaaaatggtatgggtaagaaaactgacatatcagaatatgcagtacagcatcgtggaggaaaaggtgttaagtgctataagattacggaaaaaaccggtaatgtaataggtgcaaaggctgtagatgatacaagagaggttatgcttataacaacagagggcataattataagactggcatgcagggatatttcaacacttggaagaataacttcaggtgttaagcttattaatcttgatgataatgtaaaggtagcgacggtttccaaggtaagaaagagcccatcagatgatggtggtaacgaaacagaggaatttgatgcagaaagtgattctgaaaatattgatggagtgaataaagtaaatgaaaatacatcagatagcaatacatcagatgtagcagacgattcaatagacagactgcttgatgcagctaataaagataatcaggaagattaatattaaaaaccccggttgcacagagtaagtgtaaccggggtttatgtgttaaagtttatagctatgtatagcattttaagatggattatgaacaataaagttcgtatatacgagagatattaacgtatggaggttgatatgagagaggtaaatgtggataaagtcactgaaaacataaagaaaatgtgtatagaagctaatcattttcttacagatgacatgaaaaaggtgtttaagaatgccgttgtgtcagaaaaatcaccattaggaaagcaggtactaaaccagttaaatgaaaaccttgatatagcagccaatgacatgatacctatatgccaggatacaggtatggctgtagtattcataaatgttggccaggatgtacattttacaggtggaaatataacagatgcaataaatgaaggtgtgcgtcagggttatgttgaaggttttttaagaaagtcagtagttaatgaccctattataagggagaatactaaggacaatactccagctgtaattcactataatatagttcctggagataaagtggatataacggttgcacctaagggctttggcagcgagaacatgagccgtgtatttatgttaaaaccagctgatggcatagaaggtgtaaaggatgcaatactgacagctgtaaaagatgccggtcctaacgcatgtccacctatggttataggtgttggtattggtggaacatttgaaaagtgtgcacttcttgcgaaaaaggcactcacaagaaatgtagaggaagaatctcatgttccatatgtaagagagcttgaaaaagaaatgcttgaaaaaataaataagcttggaataggaccaggaggacttggtggaacgcagacagcacttgctatcaacatagaaacatacccaacacatatagcaggtcttccagtagcagttaatatgtgctgtcatgtcaaccgtcacgcacatagacagatatagtcgattataaaaaaatataatttagattataaatagagttagaattataaatagagttagaattataaataaaattataattacaattaggaatagtcgtatcttaatatgacagtcatgcaggattgatgtgaaaattttttcacatgtgggatttgtgtctgcgcacacttgacacaaatttgatatgagcaaaaatgtgtgcagaaaagaggtttagtgtgaaaaataagatttttcacacaagaatggaggattattatggacagacacatagcagctcctataagtgacgaagatgcaaagagtcttcattcaggagattatgtatacataacaggaactatatacacagccagggatgcagcacataaaagaatggcagaggctctggcagcaggagagccacttccaatagatatgaaaaataatattatatattatatgggaccatctccagcgagagaaggaagaccaataggttcagcaggtccaacaacagcaagcagaatggataagtatgcaccagaccttcttgatcttggactaaaaggaatgattggaaaaggaaaaagaagcaaggctgtgatagatgcaatagtaagaaatggtgcggtatattttgcagcagttggaggtgcaggtgctattctttcaaaatgtatcaaaaaatctacagtaattgcatatgatgatcttggaacagaggcaatacgtgaacttgaagtagaagatttccctgttgttgtagttattgatagtgatggtaacaatctttatgaaacagctataaaagaatactgtacattataaaaaaatgtgggctattagcttaaaaggtattagtgtgaaaaataagatttttcacgcgacgtcatattatataatgttatatagaaatattatgtgatattatatgaaaatgggcttgacatattataacaaatttgataatatatctcttgcgtgtaacgcagaatttcatattatgagttaaacattaatggtttagggctcgcattcatggaatctggagtagtactcaagaggctgaagaggcgcccctgctaagggtgtaggtcgggcaaccggcgcgagggttcaaatccctcctgctccgttgacagtatatgctgtaagttggaaacaacttacagcttttttctttatatcgttatgttttatattcatatatctaatatttatatttattcaatatctgtatatcatatctatggctctattaatccaggtatctattcatctatccatcg

SEQ ID NO: 347 - DNA, 10652 bp, Unknown
  gut microbiota DNA sequence
ttatgccgtaacacagacaaatataagctacaggcagtcctgcatactatgcgaaatgcacttgaagtttgattgtgatagttcttagtctttcccttagtctaccagctagcttcgtacacggatgtacgaagcagcgaagccgcgccatggatggcgcgtctgagcggtagcgtcagttactatagtttacatggaaagacttagaactatccaattaaagcttctggcatttcgcatagtatgcaggactgcctgtagcttatatttgtcgtccgttcgtcaccaactaatattcaattaaacaacaacattcctacttagttcctgtagaaccgaatccgccatctccacgaactgtatcacttaattcctgcacttcgttaaaagcagctgttatataaggagcaagtacaatctgtgcaactctgtcacctggttctatagtaacagaagcatcagagtggttgtgtagggcaactattatctctcccctgtagtcagaatcaataacacctactttgttggcaggagcaacaccctttttgcatgccataccgcttcttgcataaataagaccaacaagaccagcgggtatctccatggcaatacctgttttgatgaattcagttgtgccaggttttatagtgactgcttctgtcatacctgaataaaggtctgcaccagctgagtattcagttccgtaagttggtataatagcatcaggtgtaagttttttaatatttacattttgtttcataaaaataaatcctcatttctatatattgtgattagcataaatagctttagtaaccatcagctatgactacatgcccctccttaagcgaggtctgtacatcaatagttctctggttagatgatcctttgaattttaacatcatatcctttagttgttcaacaaacttcccatcaacacatatgtcgatgaaagacagcattcttgcagtctctgggtatgtgttatacatacgctccataatatctttatcaaacagatagcctgtaaaacaccatatattcttatcaggatatacctgttttactctttctaataaaggaagaagtcctttctggttagctggttcgaagggctcaccaccaagaagagttaatcctgctatataagaaggcttcattgattctattatttcatcaatagtttcatcagtaaatggcatgccataattaaaatcccatgcaacctcgttaaagcaacccttacagtgatgagtgcagccgcttacaaatatacttgttcttacgccgggaccattggcaatatcattatattttatttcagcataattcaaagtgtacagtcctttctgtgaataaatttaccttcatgcttagtactgattgctaacttaaagcaggtaaaggtcaattaatatgtataatatcataaaaaggacaatcttaacagtagttagcagatattaatgtgagtataataagatataagttaaatgcgaaaaaaaaccggtaaaaacccatattaatacagttttgttgtgttaaaaatggtttgcacagtggaataacaaggaggaataaagcatgttagatatttatctggataagttatataggtatccaaggattcaggaatgcgtcagtgtagcagttccatttaagaaaggtgaacttaaaagcatatcagagatagcagtattacagaatggaaaggaatgcattatacagcctgaagtgacatcaagctatgatgatggaagtgttaagtttctgtttataagctttatggcagatctcccagctaacaaacgcacaaaagtgattctttctgtaagcagtgaagagtatgataaagctgtagaagcttctaagctgtcttatgataatcctatagaaaaggatgtaaatgtacacaaagctgcagtgtgtgtaaagaagacagaagcaggttatacagtaaacagtggtgaattagagtttgatgtatctgataactctgaaagtatatttacaaggttagttgatggaagaaagatatataccgaagagaactttgaaggaccggttttaaaggatcgagaaggaaatgattataagatgtctataggagagtggcgtgtagtaaagccaggtcctgtagaggtaacactttcagctaaggcttataatgttgttgaggctgataaagatggaaataaaactgataaaggcggaaatacagcttctatagataaagaagatataaaatataagaaaatagagtctgagatacgaatcacagcctatgcaggaaaaccatgggtaaacatatcatatagaataatcaatacatcagacgaggaacttaatataaaatcacttgtattttatattaagaaatcaaaggacagcaggataacagataagcttgtacatatagatatggcagctggcaacgattcaactggatgtggagatattcttacagacaattctaagaacaatggacctatatttatgacaagaggaataggagagcttgatatgatagaacacagggctcctgtttcagatatcaggactatagttgccacttcaaactataagacaagctttatcataggtaagaatggtgaagaagtaaatgagacgatagatgacagctatcttataaaagaggctaatgaacattatgcagaagtgttatatggaacatttatggctgactatacagattctgatgatggattctgcgtaacagtgcatcaggcacagcagaattatcctaaggcaatcaagtcatgtgcagagggtgtagcggtcatgcttgtgccagaaggtgtaggtcagattactatgcagtcaggtatggcaaaagaacagaacttccttatacactggcatagtccggaaactcatatatgggagatagataacagaagtcttatatatcagatgccagacagaccatatatagcacctcagatatttaaagagtctggtgcaatgcttgatgtatttcctgataaatatgatgaagatgtggaaatagcacttatggcaaaagcagatggacattcaagatgctatggtatgcttaactggggtgatacagtagatatgggctacacagtccagggaagaggtggcggaaaaccggtctggagcaacaatgaatatgactatccgcatgcctgcgcacttatgtatgctagaacaggagtaagaagattccttgattatttgatagtagcagcaaaacattggatggatgttgatgtatgccactatagcagcaatcctttaagaattggtggacaatgggaacatacagcagggcattgtaagaatggtgttatggtatgctcacatgaatgggttgaaggtcttcttgattattatcattttacaggagatgagagaggatatgagacagctgttggaatcggcgaaaatgtcttaagacttcttgaaactccgatgtatcaggtgccaggtgaagccaatgcaagggaaacaggctgggcacttcgtacacttatagcactttatgtagaaactaatgataagaaatggcttgctaaatgcgactggattatagacagcttcaagaaatgggaagaagaatatggagactggttatcaccatacacagataatacagcaataagagtaggtttcatgatatcagttgcagtcggaagtgttatgagatactacagagtattcccaagagaggatgtaaaacagatgttaatacatgcggtggatgatctcgtagagaactgctatatggataacggactgttttactataaggaacttcctagtcttgcaagaaatggtaacaacacacttctgcttgagtcacttgcgatagcttatgagcttacaggagatgcctcatatttgaagtacggacttaaaacattcagaaaaaccataaatgaagcatctggtggagcagtaggtataaagacaataacagacgatgcagttatatgtaagggtgattcaggaaaaagctttgcacagagctttataccactgactacattttataatgctgtaagtaagaatgatatgagcttctaattgtttctgttataattaatcgtacaatctagtacattaatagattatataaaataagagagcctctgtaatggtagtatttattaattatacagtaattattatcattacaggggcttttgtatcaggtcaaagtttaaatagagcttatatttcaagcttaaattcaagcttaaattgaacttataagtgacatttgggcattgatatgttaaactgaaataaatctgtagattttaaatagcatgatgtatgaatatagtaagacatataaaatattcaagattaaacacgcacagaaaagaaatttagtgataaatgagcgtagaaaagaggattagtgtgaaaaataagatttttcacacgcaagaatggaggattattatgagaataggtatcagagcacatgatgttgcatatgcaccacttgatgagcttatccctaatatacataagcagggatttcattgtatgcatatagcactttcgaagtctataaaggagtttaagccgggagttgagactatgacacctggacttgctatgtatattaaggagttgtgtgcagagaataaggttgatgtggcagttcttggatgctatcttaatctttgcaatcctaatcctgaaaagcataaggagatagtcgagaagtataaagcacatataagatttgcaagtatacttggatgtggagttgttggaacagagacaggtgctgtcaatgaagagtacaagtatgaaccagcgaatcattcagatgaggcacttcagtgttttatagataacctaagacctatagttaaatatgcagaacagtttggcgttatagtagctatagagcctgtatggaagcatatagtcaacacagttgagagggcaagaaaggtgcttgatgctatagattctccaaaccttcagattatatttgaccctgttaaccttctttatacaggaaacattgataaacaggatgagattatagaaaaggcatttgacctgttattaaaagatatcgcagtagtccactgcaaggattatgtagttgagaatgatgaacttaagtcaatagcagcaggaacaggtggacttaattatccactactgcttaagaagatcaaggaacataagccatatgttcattgtacacttgagaatactgttccagaaaatgcagtggcaacaagagaatttatggaaaagttatacgctgaggtataattataaccattatcgaacgagtaaattataatataataaaacagtcatatacaggctgtgcacccggattatagatacacgagggggagagattatatgccagagagcaatatagaattagcaggaaacaagaatattaagacaagcaaagtagaaaaatcagtggatacgccggcggattttacaagcccggaggagctttataatgaccttatagaaaaagttaaaatgtaccatccatcatctgacctttcagatatagaacgcgcatataaggttgcaaaaaaggctcatgaaggccagtttagaaagtcaggtgagccatatattatacatccactttgtgttgctattatattagcagagcttgagcttgataaagagtctattatagctggtcttttacatgatgttgttgaagatactgttatgacaagtgaagatgtggcaaaagaattcggcgatgaggttgcacttttggtagatggtgttacaaagcttacacagcttaactatcagcatgacaagatagaagtgcaggcagaaaacttaagaaaaatgtttcttgctatggctaaggatataagagttattcttataaagcttgccgacagacttcacaatatgcgtacaatgcagtaccagtcaccagcaaagcaggtggaaaagtccagagagactatggatatatatgctcctatagcacataggcttggtatatctaagattaaggtagaattagatgatctttccatgaaatatcttatgcctgatacttacaatgaccttgtaaagcaggttgatatcaacagaccgggcagagaagcatttataaagagtataataaaggaagtcggtatgcatataagcaatgccggcatagaagcagagatagatggaagagttaagcatttcttctcaatctatcgaaagatggttaaccagaataagacacttgatcagatatatgacatatttgcagtgcgtattaaggttgatacagttaaagactgttatgcagctttaggtgtaatacatgagatgtacaagcctattccaggaagattcaaggattatatagctatgcctaagcctaacatgtatcagtcacttcatacaacacttatagcatccaatggccagccttttgaagtacagataagaacatatgaaatgcatagaatagcagaatatggtattgcagctcactggaagtataaagaaggcaaaacaggtgagacaaacaagagtgaagaagccaagcttagctggttaagacagatacttgaatggcagagagatatgtcagataacaaggaattcttatcatcgattaagaatgaccttaacctgttctctgattcagtatactgctttacgcctacaggagatgtaaagacacttccagcaggttctaaccctatagactttgcttacagtattcatagtgctgtaggcaataagatggtaggtgcaagagttaacggaaagcttgttaatattgattatgagataaaaaatggtgacagaatcgagattataacttcacagaactcaaagggaccaagccgtgactggttatctatggttaagtccacacaggcacgtaacaagattaaccagtggtttaagcaggagcttaaggaagacaatataataaagggtaaggagcttatatccaactattgtaagggaaagggcatagttctttcagagataaataagcctgaattcgtagaaaaggccttaagaaaatatggctataaggactgggattctattatggctgccgtcggacatggagctttaaaagaagggcagatagtcaataagcttaatgaagaatacttaaagacaaagaagtctgagattacagacaagcaggcacttgaacagatagcagcaagtgaaagcaaggaaaaggagaaggacaataaaaagggcaagggtggaatcgttgttaaaggaatccacgatgttgctgtcagattctcaagatgctgtaatcctgttccaggtgatgaaatagtaggctttgttacaagaggaagaggtatctcaatccacagaacagactgtatcaacatactaaacttcccagcaagtgagcgtgcaagactcatagaagcagagtgggaacagacagagaacaaagatgaaaaatacagtgccgagattaacatatttgcaggtaacagaaaaggtcttattgttgatatatcaagattgtttacagaagctaacatagatgtaagattcatgaacagccgtgtaaacaagaagaatattgcaactattaacttaggatttgtggtatcaggtaaggaagagcttaacagacttatcgacaagctaagaaaaatagatggcgtcacagatattgagagagctacgggctgataaagacaagtaccggcagaaaaggtattatctgaattcagataatgcagaagcttgtgcgcagtggatatagcaatagagaatgtaaataacaaatataatgtgtaaaatatagcatataaatgttacagtttagagccgttgtcgggattattcttgataacggctttttgatagcatataatgatattacgatgatatatagattcttataaattgcgaagcaatgggtccgaatgtatgcatcaatcggtggcaaatattaaaaataataatataaagaaaaggaaaaattatgtataaaatagattcaagaatattaggaatggtaggcactaactgctatctgttatgtaatatggatattaaagagtgtgttcttatagatccagcagacagccaggatgagataagcagaatgatagatgaatcaggatgcagccttaagggaatattgttaacacatggacattttgaccatattatggcagcagatgccgtaagagataaatatgatgttaaagtatatgcatcatgtgatgagaagaatacacttgaacagccacatattaatcttggtgaagcatatgggcttaagctttcagtaaaagcagatgtatggcataaagatggcgaaatacttaaacttgcaggctttgatatagaagtacttcatactccgggacatacagaaggtggaagctgttattatataagagaaataggagtgcttttttcaggagatacattattctgtggctcagttggaagaacggattttcctggaggtagcatgagtgaaatagtgcgttcaataaaagaaaaagtaatggtacttcctgatgatacgaaagtatatccgggacacggagaaggcacaagtgttggttatgaaagagagaataatccgtttctggtgaattaagattttcaatttagaattgatttataaattttatattttatgtatatatagactagacagaatatttaatattgtgtgcaggtggtgtttttttgggaagctgtatatagagaggaataatgatgatatatattaaaatagacgataatagattttatgatgatgccatagtgctggtgcgttcattctatccaagaacagaggttacagcatataaagaaagcgataattcaagaaataatccgaaagataatcataaagacagtacagaagagaatctaaaagataatcataaagacggtatagaagacgattcaaaatatacatcagtggatattattgatacgattatagatataaaggtaccagatgttgcaggacttaacaaaagccagatgcatgataagtttaagtcatatctatacgactatcttagtaaaaagaccggaaagacacttccatggggatatcttacgggagtgcgcccaagtaagatagcatatatgatgcttgaagatggtgaaagcgaagaaacgataaaaagacattttatggataagcataaggcaagtgggcagaaggcagagcttgcacttaaggtagccagaaaagaaatggatatactaaaccgtatagactataaaaatggttatagtctgtatataggaattccattctgtccaagtatatgcttgtattgttcattttcatcatatgcactaggagcctataaagattatgttgacagttatcttgatgcacttattaaggaaatggaattcgtatcaggatccatgaaggggagaagacttgatacagtatattttggtggtggtacaccaacaacgcttagtgcagcgcagcttgacagactgataacagaacttaaaagactgtttgatatagatggatgccacgaattcacagtagaagcaggtcgtccagatagtataacacttgataagcttaaggtgcttaagaaacataatgttggaagaatctctatcaatccacagacgatgaatcagaaaacgcttgacctgataggcaggaagcatactgtagaacagataaagaatgtatacaatatggcaagagaagaaggctttgataatattaatatggatataatacttggtcttgtcggtgaggatgttgacgaagtaaagcatacacttagcgagatacaggctatggatccagaaagtcttacagtacattcacttgccataaagagagcagccgcgcttaatatatggagagataagtacaagcagctgtcaacaaaaaatacggatgagatcataagaatgacagaggaaacagcaaaaaagcttgatatggaaccatattatatgtacaggcagaagaatatggctggaaactttgaaaatgtaggatattcaaaggaaggtaaggagtgtatatataacatacttattatggaagagaaacagactataatagcatgtggagccggagcaagcagcaaggttgttttccataatgagtcggatgataatcattcagtaaggattgagagaatagagaatgtcaaggatgtaaggaattatatcagcagaatagatgagatgattgaaagaaagcgggaattctttaaagataaccagttctaggaagatataaaatataacagttgtgagtttgtcagataaagtacataagtggggcgaagcgggagtatcccaaagtttgtgtaaacctccaaactgatgtaagataaaattactcagtttggaggttatttttatggcaagaagaaaagacagcccacaaaaagcagcaatgagagaaatgatgcgtgactatctgaaaaataatgatatcagcatcaaagacggcaccgatgtaaatagcatcatgcgtgacatgatgtctgtccttttggaaggtgctttggatgaagaactggatgaggaattaggatattccaagtatgactatcgaaacaaagaaacagacaatagtagaaatggacattccagcaaaaccatgcacaccagttatggagata

SEQ ID NO: 348 - DNA, 27549 bp, Unknown
  gut microbiota DNA sequence
taaatactattctatttttgaacataaaaactgcggtatttaccgcagtttatcttatgttaaatttagtacatattctggaggaaaaggtaattgaatggatataaatatttatttaagaatataggtcttttaacattaagtagttttgcaacaaaaattttagttttttttcttgttccattatatactaatattttaacaacaacagaatatggtacctatgatcttttcaatactacaataggtgttttaataccaatacttacattaaatatacaagagtctgtaatgcgtttttcactggaaaaaaaatatagtagaaatgctatcataactattggggcaaaatatctattgatttcaaatattattgtaataataggattagaaattaattccatatttaatataagtatattagtaaaacaatatgctattttcttttttttaatgtatgcaacacagtctatgtctggaattattatatcatatattcgcggaattgataaaattgcagaattgtcagtttcaagtgttatagcctcatttgttacgattggacttaatattgtatttttggctgtttttaaatggggattaatgggatattttcttgctaatatagtaggaccattttttcagtgtatatatttaattattagagctaatgttattaaaaatataaattttcataataattttaatactgaaaaaaaagcaatgctttcatattgtaaaccaatgattgctaatggtgtagcctggtgggttaataatacatcagatcgttatattgtaatttttttctgtggattagctgaaaatggtgtttattctgttgcatcaaaaattccatcaatattaaatatttttcaatctatatttaatcaagcatggacattatctgctgtgcgtgactttgatccagaagataaaaatggtttttttgctaatacatataaagcatataattgtatgatggtaattttatgttcttttattattatgtttgataaaatactcgcaaaatgtttatatgcaaatgatttttatattgcatggaaatatgttccttggttaaccattgctggagtgtttggagcaatgtctggatatattggaggatttttttcagcagtaaaagattctcgaatttttgctagttcaagcatagttggagctatttctaatataattttaaatttgatattgactccttatatgggagcattaggtgcagctattgcaaccgcagtttgttatgttgaagtatggatttttcgatatattcaatcaaaaaaatatattaaattaagaataaatatatttagagatatagtaacatatgtattaatttgcatgcaagcaacaattatttatgtaaaaagtaattatatatatttattgcaatgtgttttatttgttgcaataattatactttatgctgatgatataaaaaaaataattaataaatgtataaacaaaattagatgtaagtataaaactaaaaaataagttattcttgttgatatggtttaataaattataaaagatatgcttctgtaatatatacaattatgtaatcttttaaattgttcatttatggtttttaccctgtttttttactactgttattttatttaattttttatataataagttgggtgaaaaaataacatatattatagttatattaatgagtatattatacatattcattcctattccaaaattattttggggaatagatttaagttttaaatatatggcattttatgctgtgggtgtttcttcgcaaaaaatattaaaaaaaattaatgttaataatgttaataatagaaataataaggcaagtcaaagtattattgctataattttacttataataaatttttgtttatcatattatggattaactacaggaataatgtggtttattacagcacaaattggtgtgattggtgtaacaattagttcattgataataaataaaaataggctcttagaatatttaggaaagatttcattaataattctttgtatgcatggacctatttataggattgtgataaaaattacatcagttattcttaatataaattctgatattataagaactaatttattttatgcagtatttattgtattagtaacgattttaatatgcagtgcagtatataatatagttataagaactgttccatggatggtgggtaagaaaaataatatttagaaaatttaattgtattcattttatattttaatgaaattatgttagttattaacttatttttatgaaaacaatattgtaaggaaaattttgaaataatatattaatttatttgaaaatttgattatattaattttatatacaatattatataaggagaaatatattatgtgtggaatagtaggatacaccggaaagaaccagtcagccccagtactgttaaacggcttagccaagttagaatatcgtggctatgactcagctggtatagcagtaagggatggggattcgccagtccaggttgttaaagcaaaaggaagattaaaagtattagcagagaagactaacgatggtcagtctgttatcggaaattgtggaataggtcatacaagatgggcaactcacggagaaccatctgaaactaatgcacacccacacatttcagatgattataatgttgtcggtgtgcataatggaattattgaaaactatcaggaattaagggataagcttacaagaaacggttacagcttctattcttcaactgatactgaggtggcagtaaagcttattgattattattataaaaaatatgagcatacaccggttgatgcaattaatcatgctatggtacgtatccgtggttcatacgcatttgcaattatgtttaaggaatatccgggagagatatatgttgcacgcaaggacagtcctatgattttaggtgtaaatgatggcgactgttatgtggcatcagatgttcctgcgatacttaattacacaagaaatgtgtattacattggaaatatggagataggtcgtctggctgacggtcatatcacattttataatcttgatggtgatgagattgaaaaggaacttgttgaaataaagtgggatgcgaaggcggctgaaaagggcggttatgagcattttatgatgaaggaaatccatgagcagccaaaggcagttaaggatactcttaattcagttcttaaggatggaaagctggacttatcagcagtagagcttactgatgaagagataaagaagatatcacagatatacatagtggcatgtggttctgcttatcatgtaggtgttgtcgcacagtatgtcatagaagaccttgctaaaattccagtacgtgttgagcttgcatcggaattcaggtacagaaagccgcttcttgacccagacggacttgtcatagtcataagccagtcaggtgaaacagcggacagtcttgcagcattaagacttgcaaaggataagggacttaaaacgcttggcatagtaaatgtggtcggaagttcgatagcaagagaggctgataatgtattttacacacttgcaggaccagagatagctgttgccacaacaaaggcgtacagcactcagcttatagcagcatactgtcttgcactccagtttgcttatgtgagaggtgaaatggaactttctgaatatgaaagacttttatctgaacttgaaactatacctgaaaagatagaaaagatacttgaagataaggaaagactccagtggtttgcagcaaaggtagctaattcaaaggacattttctttataggacgaggaattgattatgcagtgagtcttgagggaagtcttaagcttaaggaaatatcatatatacattcagaggcatatgcggcgggcgaacttaagcacggaaccataagtcttattgaggataatattcttgttataggtgtgcttacacagaatgagctttacgagaaaacagtgagcaatatggtagagtgcaagagccgtggggcatatctttgcgggcttacaacatatggaaagtatgaggttgaggatacagttgactttaccacatatattccaaagatagatgaacatttcacagcatcgttggcagtagtgccacttcagttacttggttattatgtgagtgtagcgaaagggctggacgttgataagcctagaaatctggctaagtcggtgacagtggaataaaatataaagataaggaatactatactgattattgggatgattattactataatagttgttatatgtataataatattttttggtgatggataaattagatagtatagtgttgtaagcgcaacatcgtgcatactcaatcgcgcatcttctaaatataataattttttttagaagatgcgttattattaaagtgataacgatgaaacaacaaaataatcgtaaaaataaaaggagtatatatgttttttaaacaattaataggtgaatttcttgataagtgggataaagacacatcaaaagcatatcgaaaaaagatatattcattttatcagtatttagttgagatgaagaatgcgacagattctaattataaaagtatattaaagggattagagatagaagatgttgctgaaagtataattttttacgttaaacgtaatcaggtgaagtatagagcatcagcagatttgtatatatctacagttaaaagcttttatgcatatatttctgcaaaacagatatgttccaatatatattttgataataaagcgtatgcaccagacatgaaagaacagtgtgagtgtgcaataaaatgtcttaagcttaatgagtcaaagcaggtcatgcctttagatgaggaagcagcaagacgtattgttgacagatgtaatgagataattaaccttgctaattatgatgagctaataagtggaaagtgggatggaacattttcagcgtatgtatcagctttaatttctaagcttgtattatgtttcggaatgagtaataaaactataagagaattgaaagctgtggattataacagtactaatggtcgtatagtaatcaatggatattctgttcatttgccggacaccttaaagacaaatatggatacatatatggactatagaacaagagcgattaatgagttatgtaatggttcagatgttaaccaatatatgtttatagaattaagtaacccgcgtaagaatatatcgtacaatacaagacttttttttattcttaatgaattaataggttcaacatgtgcaacagcattggcaaagtatgcgattatacagctaatcaggcaagggattccagcttatcttataaaggattttactggctataaggatgatatatataatcattgtcaggagatagttaatgaggagaatggtgcagtgtcaaaagaggaaagatgcaagattatagatgctggaatcaggatgagcaggttgagtgagattatgtagaaaatatatagtttgaattcaataacgattgagcattaattatcaatattgatgaaggagtgaataatatgccagattttaatatatcagattcaatggcagaatctatttttaataatgagataatacagaatatgacggatgaagcatttgataatatacttgatacgataggatttgctgtaccagatattataagagatataccaatatttaagtacactgtttccatatattcgttggcaaatgacataataaagcgtgttgaattaaagaaacaattcagatttttaagggaattgtctaaaggtaacattaaccagaaagaattaaatgagcgaagaattgcatatgtgaataagaaaaagtgggtatacagggaaattgagcagctatgtttatttatatcaagaagtaatgatgttaataagtcacagattcaagcatatctttatatttcacttgtgaataaagatatagaatataaggatttcgtggaatatctgcaaattattgatatgatgtttatggaagatgtgaaagaattgatagatatatttgagcaggggaagaatcataaatatgattatgcaaggtgttttagattgcaggcattgggaatgctgactggggggataactgtttactgtggagagtcgagggtggataagttttatttaaccaatatgggaagagacttatgtaatattataataaataataggaataactaaagaaatttatcaacaccaagtattacgattttaacggtgttttattgactatgagtagattgattaagattgtgttattaggataggagtttggttatatgaaaaagtttgaaaaatatggaaatgatataagctatagagacattttgcaagttgatggggcagatgcaacgtgtcatgtactttatggtaaatctccaatttttaatggaataagtgcaaaaaatatagaagatgaattaaaaaaagataaaatatgtagatggaaagagtattgggttgaatatattaatgcatttgataagttaataaatatattgccagattctgttgttacgataaatgttggtaggcaggcagtagagattggttttaaatatcttatagtaaagaagaatggagaaattagaaaatcagatagaacacataatttaagtgagttagctgatacagtatttaaagaatatagcataaatgatgattatatgaaatgggtagatgttttttgccacgtatataatgaacatattgaaaatggatatgtagagtattttagatttccagaatataaaaatagtgagtattttgatggtatttttttatatatagattggttatcttacaatttttcattgattttattaaaattaatgcattttgcggggattgatgatgaaatagaatagttagcataaatactgcgttatggatggggaaagattgtatgatttagtgtttgtttaatctaagcatgtagcttttcatgtagattgttattctctttaagccggatgacgtagcgagttatatttcttcacattgtcggtaaagttctggtgtagtgaacccgctgtcaccacgaagccagagaaggcatagaaaataatacgataactgatattcttaataagattgaataaatatagattgtattttatagatatataaaattgtaatagaaattcttaatacaataagatataatatgcataagaccgacaatccaataaagtaaagacgaggggtgagggcaattatgaagaacttaaatattcctgttggagtatcggattttacagaaattcggaagaacggatattattatatagataaatcgggtttgataaaggatattctaaaaacagcttctactaaggttactttgattacaagaccacgtaggtttggtaaaacattagcgatgagtatgcttgattcatactttgatattcgcaaagacagtaaacaattatttgatggattagaaatatcacagaatcaggttttatgtagtgaatggatgaataaatatccaacaatctttgtgtcgttcagacaagttgaaggacttgattttaaaggtgcttacgatatgcttacagtagttattgctaatctttttaatgaacatatttatctccttgacagtaagaaagcaactgaatttcagaagacttcatttaagaatttacttagtggtaatgcatctgtaaaagaagttaagagtagtatataccttcttatgaatatgatgaatgattattataatgaaccggtcattctgcttatagatgaatatgatgttccagtagcaaaggccaataataatggttactataatgaaatgttagatgttatgaagagtcttatgcagacggtaaaggataataaaacacttaagtttgctattattacgggatgtcttagaattgcgaaggaaagcatatttacaggtatgaacaattttgtttcagatacgattgtgtcttcgcgtttgaatgaatatttcggttttacgcagaaagaggttaataaaattctaagtgatgcggatgcaataacgcatgctgatattataaaagaatggtatgatggatatcattttggtaattatgatatatattgtccgtgggatgttatgaattatattttggatttacaatataatcctaaagcaaagccacaaagttattggaaaaatacaagtgataatgcaattattcgttcatttatagattattcaggaagtaatataaccagaaaattggaagtgcttatgtcagggggacacatttttcagcatatagatgaatatttgacgtatgattatttacattcggatgaggataatatatggagtattctatatttgacaggataccttacacaagtgaaagaagatgttggacgcaagttagatgatagtaaaatgacagcattgaccattcctaacaaggagataagggatatatttgaaaccacagttattaaatggttcggtgatagtgcacgaatgtggaatagaaaggctttatttgatgcagtatggagtggtaatagtgagagcattacttatgaaatgaataagcttttaaggaaaactataagctatcacgattacagggaagatttttatcacgcatttttagcaggaatatttgcaggtgcaggctatatggttgattccaacaaggaacacggtgagggaagaagtgatgttgttgtgtatgacactgttaatgcacgtgtggctgtttttgaagctaagtatacaagagctttagataaattggaaagcgaatgtgatattgcattggaacagatagatgagcgtatgtatgcaaaagaatatgaagatgactatgatgacataatgtgttatggaatatcattttttaagaaaagatgtttggtaaaaaagaagtaatattcaacagcacactattgacagcgtgctatcaatagcgtattataatatagttctttagctgcagaatgactgcagcttttttgatattctcatttgatatgctaatttaagaaaggatgttgcaagtggtaagagataaacttcattgtggagagcttataaaacgccttaatgacatattgggaacatgtgcaaacaaggaacttaagagcgatgatatgacagcatcacagataaaaatgcttataatcatcagtgaaactaagaacgaaagcataactcttaaagaacttgagaagcattttggtgtggcacaggcgacagtagccggaatagttgcaagacttgaaaagaaggctatgattgaaagcttttacgaaccagatgataaaagagtaaagcatgtaaagcttacagacaagggacgtggtgtatgtaagcatgcatgggcgaacatggtaaagaaggaagaatggtttttatccagtcttgatgatgatgaaaaagaagaattatggcgcttattacaaaagatatatgataatatgcgcagaaatgaggtttgatgtatgataaaaacattatcggcttatataggccagtataagaaggattcagttaaagctcctttctatattatatttgaagtacttatggagattcttataccatttgttacagcaagcattatagataagggtattcaggcaggcaatatgaaaaacgtatatatatacggaggagttatgatagtacttgcctttgtcagtctgttttgtggtgttcaggcaggaaagtatgcagccagcgcatcaactggctttgcctgcaacttaagagaaggaatatataccaatatacagaatttcgcattttctaatattgataagtatagtacagcaggtcttatcacacgtatgactacagatgttactaatgtgcagaatgcataccagatgcttcttagaatagcagtcagggcaccgcttatgatgatatgcagtatggttatgtgttttatcattaacccgactatgagtactatatttttagtggcacttatacttcttggcttcgtgcttttctttattatatataaggtaacacctatattcacagaaggttttgcaaagtatgataatcttaatgcgagcgtacaggaaaatatttctggcatacgtgtagttaaggcatttgtaagggaagattatgagaatgataagttcaaaagggcagctacaggtctttataatacatttgtaaaggcagaatcatggcttgcctttaacaacccggttatgatgtttgtcatatatgcaagtattattgctctttcatggtttgcggcacattttatagcagatggaactatgacaacaggtaatcttacatcaatgttttcgtatgttatgagcatgatgatggcacttatgatgctttccatggtatttgttatggtgtctatgagtgctgcaagtgcaaaacgtatagcagaggttcttaacgaaaaggcagatataactaatcccaaagccccagttatggaagtttctgatggtagaatagattttaatcatgtagattttgtatataaaaaagacagtgaaacagatacacttcatgatatagatatacacatccagtcaggagagactattggtatcatcggtggaactggctgtggtaagtcaagctttgttaatcttataagccgcctttatgatgttaaggacggaagtgtatgtgttggtggagttgatgtaagagaatatgatatagaaactcttcgagatgaggtatcagttgttcttcagaaaaatgtgttattctcaggaactatccttgataacttaagatggggcgatgataacgcaacaaaggaagagtgtatagaagcatgtaagcaggcatgtgcagatgaattcatagagcgtatgccagataagtatgatacatggatagaacaggggggaaccaacgtttctggtggccagagacaaagattatgtatagcaagagctcttcttaagcatcctaaggttcttatccttgatgattcaacaagtgcggtggatacagcaacagatgccaagataaagcaggcatttgcaactaagattccaggaacaactaagcttatagtatcccagagaatttcaagtatccaggatgcagacagaatacttgtgcttgataacggagaaatcagtggctttgatacacatgagaagcttatagaaaataacaaggtatatcgtgagatatatgaagtccagacacagggcggcggtgattttgatgagcagaagggaggagaagataatgagtaaaaatgttgaaaattctgataaaatattgaataaatcagacataaagccgggtaatgaaaagcataaaagaaaagatagtgaaggaaagaatgcacttcatgttatgaaaagattattaggatatgttttaaagaattataagttttcatgtatagctgttgtggcatgtattatagtttcatcacttacaacacttatagctactcttttcatccagaagctggttgataactatattattccactcacacagtcagcagtgcatgattatgctccacttgcagctgctattataaagctttcagcagtacttcttgttggtgtgttatgttcatatatatacaacaggattatggtaaatgttgggcagggtactttaaaaaagttaagatttgagctttttactaacatggaatcacttcctataagatattttgatacacatgcgcatggtgatattatgtcagtatatactaacgatatcgatacattaagacagcttataagccagagtataccgcaggttatcaactcatgcataacgcttgtttctacatttgtaagtatgatagtgcttgatattccacttactatagtatctgtcataatggttattattatgttgtatgtaacatccagattaagtgaactttccggaaaatatttcgttgaacagcagaaggatattggtaaggttaatgcttatattgaggaaatgatggaaggacagaaggttgtaaaggtgttctgtcatgaagaggaaagtatagagcagttcagaaagattaatgatgcactccgtgcaagcgctaataacgccaataagattgctaacattactatgcctgttaatggcaatatcggaaacataagctatgttttatgtgctattgctggtggtatattagcactcagtgatttttcgggactgactataggtactcttgtagcatttttaagtcttaataagagctttacacagcctgtaacacagataagccagcaggtaagcagtatagtaatggctatggctggtgccggacgtgtatttgagttatatgatgagaagcctgaaacagacgaaggccgcgttgaacttgtaaatgtaaagtataatgcagataaagagcttacagaaactaaggaaaatactatgatgtgggcatggaaaagaccagctatggatggtaagccagtagaatacagaagacttgaaggcgatgtcacatttgatggtgtagactttggatataatcctgataagatggtgcttcatgatatcagaatgtatgcaactccaggtcagaagatagcatttgtaggaagcacaggtgctggtaaaactacgattacgaatcttattaacagattctatgatatacaggatggtaagataagatatgatggtatcaatatcaatcatattaaaaaggatgatttaagacgaagccttggtatagtgcttcaggatacgaatctgttcacagaaactattatggaaaatatccgttatggccgtctggatgcaactgatgaggagtgtatagcagcagcaagacttgccaatgcagatggcttcataagacgtctgccagaaggctacaacacattgcttcatagtggtggagctaatctaagtcagggacaaagacagcttttagccatagcacgtgctgcagtagctgacccaccagtacttattcttgatgaggcaacatcttctattgatacaagaactgaaaaacttgtacagaagggaatggatgcacttatgtcaggaagaacctcttttgttatagcacacagactttctacagttcgtaacgcagattgtatcatggttatggaacagggcagaataatagaaagaggaacacatgaacagctgatggaggaaaaaggaagatattaccagttatatacaggtaagagtatatcagcgtaggtacaaaagcatgaaaatagcttattatgagattgacaattctgacctggaaaaatataattaaatattgttcagacaaatatattgtttaaattctttgtctggaataaaagtatatattggttaagtttaatatgaaaaaagagatgaataatgaacttattgactacgtagtcaatgatttcaaaagtggtattaagcatggagtgcttgttgctaatctgacatatgccctggctaaggagtatggtatgtcagaagctgaggcatacgaactaaaagtggcagctatggtgcatgatattggaaaacttaagctttcagagtatctttatggaagaacgaacaatggttttccagaagaggaaaaaaagtatatgggcatgcattcaaaaatcagctatgatgtattgaaaaagtatgattattcagataatattatggaggttgtacttttacaccatgagtgctacgatggaagcggatatcctgatggacttgtgggtgaggatataccgatgggagcaaggattcttaaggttacagatgaattcgcagctcttatatcagacagaccttatagaaaagcatttgatatagatacagctgtttctattatgattgatgaggtgaagaatcttgatatgaaggtctttatattatttcagagacttattcatgaggaatcaacgcttgaacttataaaaaacagcagaattgatattgatgacctggatataagtgatatacttgatatttagaatgatctgattatatggcatccatatggtttatttatcagagtttgttttaatcaaatatttacaggaatgaggtaattaacaatggcagagtcaatggttggcttaaaaagaacacacagatgcacagaggtgtcaggtgctgacataggaagcacagttacagttatgggttgggtggctaagagacgtaatcttggttcgcttatattcgttgatttaagagatagaagcggcatcctacagatactttttgatgagaatatagttggtaaggaaggctttgataaagcttatacattaagaaatgaattcgttatagcagtagttggtaaggttgttaaaagaagcggtgcagttaatgagaatcttaagactggtgatattgagatagcagcagaatctttaagaatcctttcagagtcagaaacacctccatttcctatcgaggataatataaatactaaggaggatatcagacttaagtacagatgtcttgatttaagaagacctgatatacagtctaatattatcatgagaagtaaggtggcaactctgacaagagcatttcttgcaaaggaaggcttccttgaaatcgaaacacctatgcttactaagtcaactccggagggagcaagagattaccttgtaccaagccgtattcatccaggtaagttctatgctctgccacagtcaccacagctttttaagcagatgcttatgtgttctggctatgacagatatatgcagatagcaagatgcttcagggatgaggacttaagagctgacagacagccagagtttacacagattgatatggagctgtcatttgttgatgttgatgatgtgctcgatgttaatgaaagacttttagcttatcttttcaaggaagtgttagatgttgatgttaagcttcctatccagcgtatgacatggcaggaggctatggatcgattcggttctgataagccagatttaagatttggtatggagcttaagaatgttacagatatagttaagaactgtggcttcagcgtgtttacaggagctattgagaatggtggttctgtacgtggtattaacgctgcaggtcagggaaatatgcctcgtaagaagatagatgcacttgttgatttcgctaagggttatggagcaaagggccttgcctatatagctattcatgaagatggttcacttaagtcttcattctctaagtttatgacagaggatgagatgaatgcacttgttgaggctatggaaggtaagccaggagatcttttactttttgcagctgacagaaacaagattgtatggaatgtactcggtgcattaagagttgagcttgcaggacagatgggacttcttgacaagagtgattataagttcctctgggtaacagaattcccacagtttgagtggtcagatgaagaagaaagattcgtagccatgcatcatccatttactatgcctatggatgaggatcttgataagcttgagtcagacccaggttcagtacgtgcaaaggcttatgatattgtacttaatggtacagagataggtggtggttcagtaagaatccatcaggctgatgtacagtcaagaatgtttaaggcacttggtcttacagatgaagttgctaatgagaagtttggtttcttacttgatgcattcaagtatggagtaccaccacacgcaggacttgcatatggtcttgacagacttgttatgcttatggcaaagagagattcaataagagacgttattgctttccctaaggtaaaggatgcaacatgtcttcttactaacgcacctgatgttgttgatgcaaaacagcttgaagacttatctatcagcattacagagtcagaacaggaataatattttaagagcatttgaaagtatttaatggatattttcaaatgctttttttaattatatttttagacaatactttgtgaaatctggataaaaataatgtctttatctgcttttttttagcaaaaatattgcatttggataatcatgggtatatactttttttataaatcttggcaaaactataacaaaagactggagataaattatgacagagaatcagtatgtaagggcaaacaggactgttttatttacagttctcatagtatttggttatattgcgctgacagtgatggcagcattaggagtgggtgacggacataacaaaggaaagattttaatacagtttgttgtggcacttgcggtaattattgtatcagtagctgcttatattttaaggaagaagaccagagtgtgtgaattaacgattgcggtatcaatggcacttggatatgttgttcttatactgcttaattcaactgatggtgtatggacatatgtacttcctttgattatggcttcgatggtatatcttaatgaaaaactaatattgtgggctgatggtgttgcgatagctgctaatgtcataagacttattatggattataatatgtataatggagtggttatggcaagcagggttcttgctatattagtattggttattgttacatgtatatctcttagtgtaacaaagctgcttaagcagttttttgcagagaatatgaacaagatagaaaaagcagcagttatacagaaagagaataacgagaagatggttgctgtagctgataatataaccagacatttcggacaggctatggatatgcttgatgagttagaaaagagcatagatataaaccacaattcaatgaaagatatagcagaaagcacagaaagcacagcagaagccatacaaagacaggccactatgtgtgcagagattcaggaaaacactgatattgctgaaaaagagataagcgagatggttgaggcctcacacagaacagatgagactgttaatgatagtaaggctatagtagttgaacttaaggaacaggcacagaatgtacatgatgcaagcaatataatcgtagatgtgattaacagtcttacagaaaaggttgatgatgtacagggatttattggttctatcgtagagatttcaagccagactaaccttcttgcattaaatgcttcaatagaagcagcaagagcaggagaagccggaaagggctttgcagtagtagcagaagagataagacagctctcagaacagactaagaatgcatcttcaagcataacagatataatcaataatctttatgaagatacgaagaaagctaatgagagcataaaagcgtcagttgagtcagttaataagcagaatgaacttattgataatacaagagtgacttttgaggacgtaggaaaaacagttgacaatcttatgaacaatatagattctgctgagcagagcattaacaagatactggattcaacttctgttatttctgataatatttcacatttatcagcaacaggagaagaggtagcagctgcttcaactgaaggcctaagagtatctgacacaacagttgaaagcatgaagaactgtaagaatatattacataacatatatcttcttgcagaggatttaaaacgttcgacagaggcataaaatataataaaatgtataattatacattgacttatttataaataatctatacaattaatagtcatacaggttgtataactacaactatagaaaatggaggttgtaatatgtattcatttgatgaagtattgaactatgatccagaattagctaaagctatggatgatgaattagcaagacagagaagccatattgaacttatagcttctgagaaccttgtaagtaaagctgttatggcagctatgggaagccctcttactaacaagtatgcagaaggatatcctggaaagagatattatggtggctgcgaatatgtagatgttgttgaaacacttgcaattgagagagctaagaaattatttggttgtgaatatgccaatgttcagccacattcaggtgcacaggctaacctagcagcattctttgctatggtagaaccaggtgatactgttatgggtatgagccttgactgtggtggacacctttcacatggttcaccagttaatatttctggtaaatattttaatatagttccttatggagttacagctgaaggctttatagattatgacgaagtattaagaatagctaaggaatgtaagccaaagatgattattgctggtgcatctgcatatgcaagagttattgattttaagaagttcagagagatagctgacgaagttggtgcttatcttatggtagatatggctcatatcgctggtcttgtagcaggtggagagcatccaagccctatcccttatgctgatgtagttacaactacaacacataagacattaagaggaccaagaggtggtatgattctttcatcagcagaagctgctgaaaagtttaagtttaacaaggctgtattcccaggaatccagggcggtccgcttatgcatgttattgctggtaaggcagtatgcttaaaggaagcacttgatccaagctttaagacttatgctaagaacattgttgataatgcacaggctctttgtacaggacttatgaacagaggttttgatatcgtatctggtggtacagataatcaccttatgcttgttaaccttttaagcaagaataagactggtaaggaagtagaaaagcttcttgatgcagctaacattacatgcaacaagaacactatccctaacgatccagcttcacctttcgtaacaagtggtatcagacttggtacagcggcagttacaacaagaggcttcaacacagcagatatggatgtagtagcagaagctattgctttacttgttgatgatgttgatgctaatcaggctaaggctatggctatggttaaggaacttacagacaagtatcctctttatgaataatgctggaatatataagaaatgaacttctggggatggctgataaaggggaatatgcagcatttacatcctcacttattcctggctgcgataatataataggaataagacaaccggtattaaagcaatatgcaaaacagcttataaaggagaataaggattttcggcagctgattagtgaaccggatatttatcaggaagaaatgttgcttaggagctacataataggaatgggaacagcgaaggagaaagactttaagaaggctttaaaagacttcaacgcattcgttcctcttgtgaacaactgggctgtcaacgatagcttctgtgtggaatttaaggttatggatatgtttcgggacgagtttctgccatacataaaggaatgtatagaatcgtttgatgaatacagggcaagagtagggcttataatgctgttagaccactacttaaaggttgatatgcatggcatgaaaagaccgagaatgaaaaaggttactcttaaagatatagaaagcacagctgaaagaaattgtgctaatggtttatatcttgatgatatattttcacttgtaaacagggatttttcgacctatggatattatacacagatggcagcaggctggcttcttgcggaatgttttgttacatttccaaaaagaacgtgggaatatcttacagataccgactgcttaaagttagataagctgtcatatcagaaggcagtacgaaagatatgtgaatcgctcacgccggataaagaagttaaactaaaagttaaaaaggatctgaagcagatgtaataatctgtttcaggtctttttttattgctccatattatgacgtcggggtcaaaatcacccgactttaataatttgaatatcaaaataactattgacaatatataagtattgtagtataaaaataatgtttgaaattcaaagtaagataatcaaacagttagtaagtcaaataaataaggacaaaaaagtatgataagaacaagaatcataggaacaggaagctatgttccaccagatatattgactaacgataatctgtcagaaatggtagatacgagtgatgagtggataaggacaagaactggtatatgtaacagacatatagcaaaagatatggataatgctgatatggcatataatgctgcaagaaatgcagtagagaatgcgtgtattgaagcttctgccataggtcttattatagttgcaacgtcaactcctgattatgcttttcctaatcaggcatcacttgtacaggcaaagcttaaagcagtaaatgctatgtgttttgatgtaagtgcagcatgttcaggttttattacagccctggatattgcagcttcaatgttaaaggcaggttcgtataaatatgcacttgttattggttcagaaaagatgtcagaaatagttaactggaaagacagaagtgtgtgtgtacttttcggagatggtgctggcgcagtggttcttaaagcagttgataacaacacagaagatgttacaggtgcctctgctggtcaggaaagaggaattattgacagcaatatctacaatgatggaacaggtgcctctgttttaacaggtggcaggagattttctgattcacgcagcacagacatttttatacatatggatggacaggaagtgtttaaattcgccgtaaagagtgttcctacagccatagaaacacttttacataataataatatggatattaatgatgttgataagttcatactgcatcaggctaatgtacgtattatagagagtgtagctaaaagacttaaggctgataaagataagtttccagtcaatctgaatgaatatggaaatacatcatcagcaagcattcctattctgcttgatgagttaaacaggaatggaagcttaaaacagggagagaagcttatacttgccggttttggtgcaggattaagctggggaagtattctgcttgtatggtagcacggttaaagatgctaagcttattatatagatatttgcagactgcttacttaaagatatcaggcagccggataagcggcattttaacatatataagatgtttatggcaaaagctttgccacagatatcaaagtcgtgggcttttgaccccgacaacatataataaaaaataataagaattaaggagatttaacattatgtttgaaaaagtaagagaattagttgcagcacagttaggtatagatgaggcagttattaagcctgagtctaatttcaaggaagatcttaaggcagattcacttgatctttttgaacttgttatgtcacttgaggatgagtgttcagtaactattccatctgaggagcttgaaaagattcttacagtacaggatgttgttgattatatcgaggctaaccagaaatagttataaatgtaaggaaggaagataagttatgaaaactcgtgtaacagagcttctaaatatagaatatcctgttatacagggcggcatggcatgggttgcagatgcgaatctggcagcccacgtcagcaaagctggtggaatgggatttatcggcgcagctaatgcaccggcagaatgggttaaagaacagatacatattgcaagaaagataacagataagccagttggtgttaatattatgcttttaagtgattatgcagatgaaatagcacagcttgttattgatgagcatataggagcagtaacaacaggtgcaggcaacccaagcaaatatatgaaggcctggaaggaagctggaataagggttattcctgttgtggcatcagttgcacttgcaagaatgatggaacgtgccggagcagatgcggttgtagctgagggtatggaatcaggtggacatatcggcgaggaaacgaccatgacacttgtaccacaggttgttgatgcagttgatattcctgttatagcagctggcggaataggtgatggcagaggtgtatgtgcagcatttatgcttggtgcagaggctgtacagatgggaacaagattcgttgtggctaaggaatcgaatgttcatcagaattataaggacagagttatagctgccaaggatatagactcagtagtaactggcaggagcacaggccatccagtaaggtcacttagaaacagcatgacaagagagtatcttgatatggaaaaagaaggcgttgaatttgaaaagcttgaaagacttactcttggaacattaagaaaggctgttgtggatggtgatgtcaagcagggaactgtaatggcaggtcagatagcaggtcttgtgagtaaggaacagacatgtgaagagattattaaggagcttatgaaggaagtctctgaggtatataattcacataataagctggcataaaacagtgtatggaaatgaggatttaaaaggtatgggaaaaacagttgtaatgtttccaggacagggaagccagtgtactggaatgggaagagaaagctataatagctgcacttcatcagtaaagtgctttaagaaggctggtgaactgacaggtatcaatatggagcatttaatatttgaagaaaatgatcttcttgataaaaccgagtatacacagatcgcgttatatgtaacagaaatcgcccagcttgctgatatggttgagcagggccttacgtatgatgcagctattggactttcattaggtgaatatagtgcacttactgcaagtggtgcgctatcttatgaagatggtgtaagacttgtaagaaaccgtggaatatatatggaacaggaggttccggctggtataggtgccatggctgcagttatcgggcttacatcagatgaggttgacagtgtacttgctaaatataacaagcttaaaagcgggaacacagagtctgataatgatatgtatcctgatacagtttccgcagctaattacaactgccctggacagatagtaatatcaggtaaaaaggaatatgtacaggaggctatggaagtgcttaaggaagcaggagcaagaagaacacttcttcttaatgtaagtggaccgtttcattcaaagcttcttaagggtgcaggtgataagcttatgaaggatcttgaaaaagttacttttgataaagtgaagtatccttatgtggcaaactgtacagctgagtatgtggatgagaatacatccagtggatatataaaagaacttctttcaaagcaggtatatagttcagtacgttttgaacagtcagtcagaaaaatgatagccgatggttatgatacatttgttgaggtgggaccaggaaagactttatctggctttgttaaaaagatagctaagagcatggaaaaggaagtagttataaaataacaggcaataaatgcaggcaggatattggtaaggctttagcaatattgtatcgatgaaaggcagtgtgttatgtgtatggataattgtataaaaagatatgaaaacaagatagtgcttgtaaccggagctggcagaggaataggagctgctatagctgcccgttttgccaaagagggggctgtggttattgttaattacagtggtaatgatgaggcagcagatagaacagttaaaaatattctggatgccaacggaaaggcagaaaaatacaagtgtcaggttgattcgtatgaagaaactgaaaaaatgatcacatatataatggataaatataagagaatagacattcttataaataatgcaggtataacaaaagatggtcttatcatgagaatgaaagaggaagattttgacagagttatagatgttaatcttaagggaacatttaactgcataagacacgtaagcagatacatgttaaagcaaagaagtggaagaataatcaatatgtcatcagttgtaggcatagctggtaatgcaggacaggttaattacagtgcttctaaagcaggcgtgataggtattaccaaatctgcggcaaaggagcttgcatctcgtgggataactgttaatgcagttgcacctggatatattgatacagatatgacaaaggttttatctgatgaacagaagaagtcagtacttgatatgattcctctttcaagaatgggaagcgtggatgatataagcaatgcggtagcatttctggcatcagatgaagcggcatatataacaggacaggtgatatcagtagatggaggtatgaatatctgatgagaagagtagttgttacaggtatgggtgcaataacacctataggtttaagtgtggatgaattctggaattctgttaaagagaatacagttggaatagataatataacaaggtttgatacaacagattataaggtcaagcttgcagctgaggtaaaggatttttatgctaagaattatatggattttaaggcagccaaaaggatggagaagttcagccagtatgctgttgcggccgcgcatgaggctatgaaggattcggggcttgatatggctaaagaggatgctttccgtgttggtgtatcagtaggctctggtgttggaagccttgaagctatggaaagcaatcacaagaagcttcttgaaaagggtccatctaggattaatccgcttcttgtacctcttatgataactaacatggcagctggcaatgtatcaatacagctaggtttaaagggtaagaatataaatgttgttacagcatgtgctactggaactaactctataggtgaaggctatagaagtatacagcatggagaggcagatgttatgtttgcaggtggaactgaaagttctatatctcctattggaatcggtggttttgctgcgcttacagcactttcaacatctacagaccctaagagagcctctatcccatttgacaaagaaagaaatggttttgtcatgggcgaaggagcaggtgtggttgtacttgaagagctggagcatgctttaaagagaggggcacatatatatgcagagattacaggctatggctgttcttctgatgcataccatataacatcacctatggaggatggaagtggagctgcatatgctatgacaagtgccatgaaggaagcagatgtaaaagcagatgatattgactatataaatgcacatggaacaagtacacatcataatgatctttttgagacaagggcaatcaagctggcacttaaggattcagcttacagtgtgcctgtaagttcaacaaaatctatggttggacacctgcttggtgcagcaggcgcagttgagttcatagcctgtgtcaagtcaatccaagatggttatatacatccaaatgtaggattatcagaaacagaggaagaaatggatcttaattatgtcaaggatgagggaatcgaaaaggacgttgatgtagtcatgacgaattctcttggctttggcggacataatgcaactcttatagtaagaaagtattcataatactatgaacgcttaaagtacataagtggattgctggtgagatatctggaataccagaatatgaataaaaggtcatgaagaaatggagataatatatggaattagaaaatgtaataaagctgattaatgctgtatcagaatcttcacttacaagttttagcatggaagatggcgacactaagctttcacttggtgttgacagaaatgacaggactgctgttaaagatactgcaagtgctgctgatatagttaatagcgataatggcagcgaatcaggattgaataaatcagacattaaaacttttgatgatgatgatgttcttactgttaattcaccacttgtaggtgtattttacagttcagcatctccggaagcggatgcatatgtagcaataggtgacagagttaaaaaaggtcaggtaatcggtatagtagaagcaatgaagcttatgaatgagattgaaagtgattatgatggtgtggttactgatattcttgtagataatgaacagatggttgaatatggacagcctatgtttgttataaaaccagtctgacaatacgtcggtatcaaaggcatgggtttttgataccgacattatatatatgaaattcgattatttaatataaggagttaagtatgcttacaacaaaggaaataatggatattataccacacagacatccttttctgcttgtggatacgatagatgaacttgagcctggaataaaggcaacaggatataagtgtattacatatgatgagccttactttgcaggacattttccagctgagcctgttatgccgggggtccttcagatagaggcatgcgcacaggtaggcgctgttgcgatactttcgctggaagaaaacaaaggtaaaacagcatattttggtgcagttaataatgcaagatttaaaagaaaagtagttcctggtgataaacttaagatggaatgtgagattataaagaaaaaaggaccagttggcgtgggaaaggctgttgcgacggtagatggagaggttgcacttacagcagagcttacatttatggtaggttaatccgtctgatgttataaatataatatgtggattatggaatggttataaggagatgaagctgtgtttaataagatattgatagcgaacagaggcgaaatagctgttagaataataagagcctgtagggaaatgggtatacagacagttgcagtatattctgaggcggataaggaagcacttcatacgcagctggctgatgagagtgtatgtataggaaaggcagcagctaaggatagttaccttaatatggaaagaatattgagtgcaacagtagcaacacatgcagatgcaatacatccaggctttggatttctttctgaaaacagtaagtttgcatcattatgtgaaaaatgtaacatcacatttataggtccagattcagatatcatagagaaaacaggtaataaacaggaagcaagaaatacaatgatatcagcaggtattccagttattccaggaaccaaagaaccagttatggatgcagaaagaggaaaagagcttgcagacaatataggttatcctgttatggttaaagctgcacttggcggcggtggcaaggggatgcgtgttgtatatacaaaagaagattttaaaagggaattcgataacgcacagagagaagccgtgaatggctttgctgatggcacaatgtatatagaaaaatatatagaaaagccaagacatatagagttccagatattagctgataaatatggaaatacaattcatcttggtgaaagagattgttcaatacaaagaaatcaccagaagttagttgaggaatcaccctctcctgcgttgaatgatgaattaagaaagagaatgggagatactgcagtggcagtggctaaggcagttaactatgaaaatgcaggaacagttgagtttcttctggataaaaacgacaattattactttatggaggtaaatacccgtattcaggtcgagcatggtataacggaacttgtgacaggtgttgatcttataaaggaacagataaagatagccgccggcgaaagtcttggtattaagcaggaggatgtaaggatacatggtgctgccatggaaataagaatcaatgctgaaaaccctgaaaagaactttgcacctaatccgggaacaataaagaatatacatataccaggtggtaatggtgtaagaatagataccgcagtttatagtggat

SEQ ID NO: 349 - DNA, 11849 bp, Unknown
  gut microbiota DNA sequence
agctttgtcatgtcgttcgtgctaattatacaatccattattccactatcgcattcgcaacctgcgcaaactgctccagtgtaagtgcctcacctcttatagtcagaggcagtccacatttttcaagtgccgcagcaagcttttccttggaaacattaacatcaccgctgttgccaacactgttcatcatagtttttctacgctgattgaaggatgcccttattattctgaacataagatgttcatcagctacatctaccggtggtttctcatatctttcaagcttgattaccgccgaatccacgtttggtcttggcataaaacagcttgccggaacattaagcacgattctaggtctggcatagtactgtactgccagtgaaagtgcaccataatccttagttccagggcccacctgcatcctgtcagccacttccttctgaaccatgatagttatgctgtcaagaggaactccactctcgaaaagtcccataataataggggtcgttatatagtatggaagattagcaaccacctttataggctttcctccattcttctgctctgcaagcttttttatatcaagctttaatatatcttcgttgataactgtcacgttgtcataccacgaaagtgtatcttctgtaagtatcggtataagcttcttatctatctcaacagctacgacctctcttgcattctcacatagaatctgtgtcatagttccgattccagggcctacctcaagcacgaaatcatcctctgtaacgccagcctctcttactattttctgaacaacattctcatctataagaaagttctgtccgaatttcttctggaaattaaagccatacctgttaagaacagctatagtattagtcggattcccaagatgcatgacgttatcataattcttattattcatatatatatttatctccattcctgtatcacacataacatagactgtttatgtttattaacacagcctgcactgttttttaacaaaccttaacaacaaatatacattttctgaataagtatgtcaatcgaataacaaaatactaaaatcacacgtaaatcacagatgcagtccatatactctgcatgcattctggtatgtcacctctgctatctgctccttcgtaacaccctttatatcagcaagtttttctataacatactgtatgttactgctgtcatttctttttcctctgttaggcactggtgcaagatatggacagtctgtttcaagcactatcctctcaagcggtatgacatttgctgcttctataagttttttcgcattcttaaaggtaagcactccgcctataccgaagtagaagttcatatcataaaatgtcttaactgtttctttagaatatgaatagcagtggattatgcctccaacctcactggcatgtccactttttaatatatctatggtatcagcacatgcatctcttgaatggataataaccggcttgctgacctctcttgccagctctaactgtcttgcaaaccactttttctgaagctctcttcccggctcatcataataataatcaagtccgatttctccaatcgcaacaaccttgttgttcgtaagtgcctctttctttagccagtccatgaagctcccaccatatatattactatcatctatcactgaattccttgggttctccccacgctcaagcctctcatagtcatccggatgcacacctatagctgcatatatattatcatatttttctgcaagcctgacactttctatacatccttcaaggcttgcacctacatttacaactgctcctatatcaccgctgaaaagacttgttaataattcatcgcggtctttatcaaatgcttcatcatcataatgagcatgtgtatcaaatatcttcattcacaacctctcttatttcctgtgtctggtgctttttattaaatcctgcaagaacgaccacccatgcaactgataatataagacctgccactgacacacacaaaccctgccataaatatggtaccttaaacgttatcttagtcactcctgctcttacatatgtaagattattcttctttccaagccactcatctgatacgaatatatcatgataagaaaggcttgtatttacattatcataatctgatgtgatagttattccgttcacgtcatgctctactttaagctctatgttagttctttcaggcagctgtgcagatgttatatccatcatatcactaagaagtcttccaacagacttatcagctgacactccatagtagtatgccagattaagaccacatactattatgttatcgttcttaactgtaccataaaaatcaagcttaagaccgttgtccatgacacttccccatgtattatcaagacctgtaacatatactgtctgccatgttgcatatcctttagggaaaagatcaggataaagcactccaagcttagtatccatatccggatagccattcttaaatacaatatcgctgcacgtaacgccaaggaactcctgactctgtgtcttcttttcctgtggaattccatctgcatatataacaaccttcacgccagcttcactaagccttaagacaagctcctctgctgccgtcttatcatcatatgtaaatccatcaaggataacttgcttatactgcgataactgttcataagaataatcattaagattatctgaatcagtctcttcaactgccggaaatgactgtgatataagaggtgtaccacttcctatgcctatcacctcatacttactgattgttccccagttatcataagtatccatatggtataacctgtatgctgcattttctcctgcaacgctatatcctgaggcacctgctgccatatccatatcttttacagatacaccatacttttcaagcgatgacagtcttacaagaactgtatcatttcccagctcacggcatctgtcaaacacataataataattgccatcagctaatgccctgtttattcttactatgttagtggaggtattagcagcctcacgtcctgcaccatatgcggcaggtattgcattgttccagtctgatactaaaaatgctcccatagaccctaagctgctgtcatcaagaagtgctattctctgctttgttatggactgtgcctttgatataagtgtattatcctgctgcatatccagtctgtcccacacactgtcgttatctgtgttaatgctcactccattcttagttatggatatagtatctaatccacctgttatcaacggtatagatggcactatatctaaaacaagcagaacacagaaaaacactatcagcggctttttgagtgtatcccatttaagaaagctgtacaatatcatacatagtgctatggatatgaatcttaacatccacagatactggcttccaggaagtatctttaacaccggatacatagctgttgctgtacatataagtgttattatagctgtgacaaagccggctcttgacttcttatatccaaaaaacattcctccaaccgcaagtattgctgctgcaagtccaaagtaaaaatgagcatagtctgtagttattctgtctaccgggttaagtgtatacactatcttctggaaaaagttagccatattttctgaattgtcaagtgaggttattcctccgttaagcgaggcaaccagccatacacctataagcatgaagctaagcagtatggatatcactatatcagcggctgctcttttagaatatccttcaatcatatgaactatacagtatactagcactgcaagcgcaaccatacctgcatatccaagatgacaaagtgctatgagaataaagcttatcatgacaaaaggaattcttatgacctttctgtccttaagatactccgatacctcatatatgaacaacggcagaaatatcatgctgagtgatcttgccagattgccttcaacaaacagtgcacacaggttattaggcataaaaaaccatatgaagcctataaatgctccaagcactggtcttttcatccttatacctatatataaccagcttaatgctccaagtacagatattatccctacaaatataagataacctataagcatattgccgcccgcaagcatttcacagaatgccataaaatacgctgcaagcggcgcccagtatctcataagctcaacaccgttataccacatataatcgtataaaggataccagtttccatcctttatggagttgtatacataatcacctctgtatatatgatacatagtatctgagccagctggataggtaccattctgactcactattttaaccaccataaccgatacggatactatcagtgccacatacacaatacagcctattatcgacaaggtgtaatataaaacatgattttttccctgcttattcatataacctgcctcttaatatgttaaacatcttttgacactcacatcattatacgttaagacctttaacctttttaacttaacttcatttattatttttctttcgttgctgtcaggtcatctatcactgtgtctataacctctgacattattttgttctctatctctttatcgttagcagcattttcttcctgctctgacatgttgattatataacttcttgtaggtgtctcactcgcttcaacagatgtaagcatcccgcctatattatgtattatacgatagaattcttctgaaaaataatctgttacattttcaagtgttggaagtattgcatcaaaaggctcttcttcgtttaacaccttattctggtatttttcaaggaaatcgttgattcctttttcaaatatattaaactccacaaacgagcttcttccaaaccttatatcaagtgcaaactcccatgtatgcggatgagtttctcccttgttatcattaataatgatataatgacgcatattaagataaaacttaatcttatattctctgtacaacttaactgccatatgctcttccttcctgctgatatcctacagatatctttctcttagtttttccatatctgtatcattatctataagctctactctctggactgttacctctttatcttcaagtatgcttattccatgcttcaactggtctgtcgttatattgactgcgataagaactatatcacacgccccatactcgaacctgagtacatgcttatcaagaatatatactgcacgttcaaaaaacttcctgcggctttcctctgtctcacattctatgcgtgcaaatgtgacaggatgaacatttctttccataagcttttctacaaatggcactatagccttctgtttccatacgttattatgcgtatcgtgaagatccttatctgccagcatttcatttacctttgcaagccccatgctaagtactttaacatcagcttccctctcatcaagccttattgctgaccttcttatgataaatgcatatataacagctatcagaacaagcgccataagaataactatgacaaatgtttccatctctactttgattcccagatatgtattgttatctaataatacacttttctctgtcataaggcacagcttgtaattctggtctgcatacttaaaaagcacaccagacataagatatgttttattgtccacattgactatactgtgctgtatatggttaacctgaagcgaatccataaactcctttgatgcttttgagttataatatgtgtctgcagaaacctccttatacctgtttgtttccatgacatcctttacataaagcatggactggttccttgaaaacacccagtacttgttagatgatgcatccatggttttaagaatatcattaataatatcctggtcatccctgttttcttttaagttaatctgatcaaggacaagctgtacatatgaatcctgctgtgtcgcgcagacctccagaatccccttttcatatctgttaatctgaatatatgaaagccacccacatgctgctgccgctatcactacacatattgttgttattattagaatcggatgctttccaggctttttattactgctattgccagacttctgctcttccataattactccatttcctgatttgccatgtaaatttaactatttagcttttaatgtttatcactttaaaatttaacgctttcaacatttatcattttcaacatttattactttcaacatttaccacttttaacatttatcactttcaatatttaacattttcaaaatttactgcttttaactctctgacattagtacccttattaagttttcgggctatctacattaactttatgtctgattttttcaattttttcatttattatcttcatatcaccttttacaacatctgtaaatgctttacattcctgtgataagttcttagttttccatgagctgtcagtctgtatgctgttaattattcctgctattcttatgaaaaatacgataagattaaaaaacggaagtaataatatgcaccaccagtgccttatatagtagcttctcacatttttattaatcttcagataatgtgccgctgttataaaatataagaagccagttaatatatacaacgcaaatatgattcctgttgaaagcaatataacctttccagaatatcctacaaccataagacatataagcgccagataccatatcattcttggaaatgcaaatgtgtggtcatacagcaatgtctttacacttatgtcagacataaactttcttagcttgaagttcttatccataaacatttttgctacttcaagacttcctctctgccacctctgtctctgtgtatacagcttgttgacactctctatcgggtcaacgaaaaacagtgcatcctcacacacctctactcgttcatcctgtctgtaacgcatctggaatgttatatgtgtatcctcacatatcgtatctgtgttatacatccacgacttaagcactgctgactttctgaatgctgaaaatgctcccgaaagtgtatacaccgaattcagttctgaagcataacttcttcctgccagaaatgcctgtgcatattccatgaactcaagattacgaagcagtcttggtaaaccagccttatatttcctaatctgttccggaactgtaagaatagcaccagtcatacagttaagctctgtatctgcctcaaatctgttaatcatattaacaagtgcattcttctctaaaagtccgtcactatcaaggttgattatatatttaccctcactgttgtaaagtgcaagattaagtgcccttgactttccctgttcagaattcatccactgcatatgaagtctgggaaactttttctgacattctgcatatacatcaaagctgttatcctgtcctttattatttacaaggaatattcttatcttatcatccggatatgagcttttatctatggactctatgcactgatacaacgtatctgccgaattatatacgggaattataagagatatttccggataaacctttatctcttttctgttctttttatatttcatccctcttcttatgagcagtaccacactgcctatcgctggtactatctccataatgaatggaataataatccatccaccccaaaaaagaaaggaattaagaattgactttatcactgccatatgcaaaattccccactttcattttaataatctgcggttttgtgaacacataaaagtacagaagtacactcagtacataaaagaatattcttcctataaatgtatgcacaacatagtacgcacccataccaaagaagtgcactgaaagacatataagcacaattcttagtgcattacataccatgatataacagaatccaccgattcctactattatcttttcactgatgttatagacgttaaagaacgcaagcagcgaaataaacgccataatctctattattccggaacactcaaagtctataagcaatgtgatggatgacatacctgtatgtacaaatataatcccgtatttaaaatatgccgtaaatgcccctgtaatgcttccaacaacgcctgcaagtgccgatacacatcttgcaagaggcattgtaagcacaggctgcactgtcatcatcaatattgtaaaaagtccaagacttcctatgataaactcccacgcatgaagcttcgccctgtgtgtaactgatagaacatatagccatactgctataataaccaatgcaactataggattaactctcattataaagacacctgcctgttacctttctttttctgatataccagcacacctgctgttacacctacacataatataagtcctaaccatgcaccagatgatgcacctgctgttgttatccactgttgtccaagtcgaccaaactgtgcatcaatacgcttaaaatcactggcatcgcatccaaatttctttgctaccttttcaaggtcaagatagaattcacattcatcctgtacaccattttttacagtgatggtcatcttgccgtaccattcactattttctctatttatgctatcctcatatatatttcctgcattattccatgcatcatgagttgagaatatataaaactcatatgtaccatcctcatatccgccattaggtgtattccagttgatatttccagcttcatcaactgacaccaatcttggagaaaatacctgtttctcattattattaaacttaatggttactgcactcatgaactcaccaccagcgtctttttctttatccacatgatttggcatagttgtaacaacatgtccaagcagtgtgctgcctccatcgcagtaaagtgcgcctttggaatcaactatctgataatgtgtacccgctgtagcatattctatggttgtatgtggatacctgtcccagtcaccatatagtccttttaatccatcatatgttatatctgtacttatctctaccccctttgactcatcaagattagatacattttctataaatggctctgtaagatataatccgaaagatattgtgttattgtacgttggtaattctgacttaggaatcgctatctcccactgttttccaacatgcttacattcagctttatctacaccatttatatcaccatcctgtgttaactggaacaccatttcattgcccatatcagactttattgtatacataccattagaatgtgaaccagcaccatatgcactgcctgtatcaccatcttttatgtatatatatacataatctccatcaaacaccatggctgttttctcaatgcaatcctcatgcacggcattagggcagcccgcatcatactttgtaactgcatcccagtcactgaatctgccatctatcgttattcctttatatactgcttctttatcgtcttctttggtttcatcctttgtatcatctttttttgtttcatcattcgtatcatcttttttatcttccttagaatcttcttttgtatcttcctttttgacatcgcccctcagcacttccacatcacgtatatctactgttgttcctgcaaatgtcagtgtaaaatcagaatcagcaaagaactccatagggataactgcttctacaacatatggtccaggtgtattaagatgtgcttcattaacaacagatatatctgaaccggcaatatcgccattccatccattcttaaccttgtaactatcccatgcagtgaatgatatattgctcttttcattctgtgttccatcgtgataatccatatggacacgaagcatcttatcattcgctcccataaaattataatcccactgtgttgatgctgttccctcgtaacatatatacaattcagaataatctgaggctattgccactttccatgaatctatcttatctgtttttgattctctttctctaataccttcccagtcagatgtcttagcatctattgtgattttggaaccattaactttagtattaccatcaaatgcagacatatctactttggtattaatcagactgctattagctgcagctgtactgatattactggttttacttataatactagttgtacttatagtactggctgtactaattgcactggttgtactgttagcactggttgtactattagcactgattgtacttatattagaaatctttggatgtccgtttcttaaagttcctgccatagcagtaacaggcatacttgccagaaccagtgccattcctgctgaaagtgccattcttttataattgcgtttcatcaatgaccaccccttttaatatttattgccatcttatccggctgtcatatgtatttattttaccggtatatgtaataatgttaataatgctgccaatatgatgtatttgtattctttatatacttttaatacacaccatttattttcattgtaatggctgtaatatgttaagtcaataatctgatatttattgtcatgttttttcagcattttctattaatacgccaataacagagcttaacacatggggatttttatatattttgtctactactttttggggggaattgttgtttagcagagttgattcatattatttatgttgatgtattttattgatatattttattgatatattttattggtgtattttattgacgaacggacgctataaggcttatgagatattttaagaataatgctacagtcaccagaaagctgattggatatttctaagatattccatgtaggtattgtttacgaacgcaaacggcagaatataatattaaaattcaactgcgttaatacaatggagagctggaaaaaggttggattgaatacatcgtactcaatccaacctatgtattctatattaaagtggtagaatttgactctatatgagaaaatgttaatctgggtcatatttcactgcttgatttgcatggattttttgaccctatttgcaaaattgacaatctgggtcatatttcactgcttaatcagcatggattttttgaccctatttgcaaaattgacaatccgggtcatatttcactgcttaatcagcatagatattatgaccctatttgcaaaattgacaatccgggtcatatttcactgcttaatcagcatagatattatgaccctatttgcaaaattgacaatctgagtcatatttcactgcttgatttgcatggattttttgaccctatttgcaaaattgctaatttgagtcatatttgctgcaagaaaaagaaagaaaaatgtgacccagattagctttttcacatattgtgtcacttttccacttcctactttattaatagagattacatattaggatttagcgctttacgcacaattccgccctgtttcgccccttgatttaattgaatattcagtattacattatgccgtaacacagacaaatataagatacaggcagtcctgcatactatgcgaaatgcacttgaagtttgattgtgatagttcttagtctttccctttatccaccagctagcttcgtacatggatgtacgaagcagcgaagccgcgccatggacggcgcgtctgagcggtagcgtcagttatcatagtttatatggaaagacttagaaatatccagccataataaactcgcaaagcgtgtttattatggctatcgcggcagtcgccaaggtcatatcaagaatatgactttggctcgttgctcgcgtaaatcaaagcttctggcattgaacatagtgtgcaggactgcctgtagcttatatttgtcgtccgttcgtcacaaactaatattcaattaaacaacaattatcctatctcacttccagccacgatatcct

SEQ ID NO: 350 - DNA, 23406 bp, Unknown
  gut microbiota DNA sequence
aagattatccttatcatccatagctgcaagtatcataccctgtgattcaacgccgcatatcttacgtggtgcaaggtttgttactactgcaaccttctttccaaccatctcttctggcttatagtactgtgatattccagatactatctggcgcacttcatcacctacacgtatctgcgagcaaagaagcttcttagccttctttactggttcacacttaagcacttctccaacctgaatctgtatctttgagaaatcatcatatgttatctctggttttttctcaactactggatactctgtagctccgttagcctttctctgagcctcctgaagcttctcaacctcttccataactacatttatatcaagtcttgcaaaaagaatttccggcttgtcagtaacattttcgcctgactttcttaaaccgaacttatcaaggtcatcaaaatctctttcaccctctgatgggtcagctggataaagctgctttaatatactttcagttgtgtttggcataaatgacttaagaagattagcaccgatagtaatactctcaacaaggttgtaaagtacctcttcaagtctgtctttcttagcctcatccttggcaagtgcccaaggcatagtttcatctatatacttgttgcatctcttgaataaagagaatacatctgtcatggcatctgcaacatgaagtgtagacatcttatcctgaaccttatctcttgtagctgttacaaccgacttaaggtctgcatcaaagtctaagcttgtactattctcatcaacacctgcgccctcacttgtcgcacctgtcttagtaacaacaccaccaaaatacttgttagacatggcaatagttctgttaacaagatttccaagtgtattggcaagatctgagttcatacgctcaactaaaagctcccatgatataacaccatcattctcaaatggcatttcatgaagaacgaagtatcttacagcatctacaccaaacatatctacaaggtcatctgcatatataacatttccctttgacttactcatcttaccatcgttctgtaaaagccaaggatgaccaaacacctgcttaggaagtggttcaccaagtgccataaggaatataggccagtatattgtatggaatctgataatatcctttcctataagatgaaggtctgctggccagtacttcttgtactgttcacttgagctgccatctgcatcatatccaatacctgtgatatagttagtaagtgcatcaagccatacataaactacatgcttaggatcgaaatctaccggaataccccacttgaaggatgttcttgatacacacagatcctgaagtcctggaagaaggaagttgttcatcatctcattctttcttgatacaggctgtatgaattctggatgagtgttaatatgctcaataagtctgtttgcatacttgctcattttgaagaaataagcttcttcctttgctggtttaacttcacgtccacagtccggacatttgccatcaacaagctgtgactctgtccagaaggattcacaaggtgtgcaatacataccttcatatgagcctttgtatatatctccctgatcatatagcttcttgaatatcttctgtacctgtttttcatgataatcatcagttgttcttatgaacttatcatatgatgtattcataagatcccatattctcttaatctctgctgatgtcttatcaacaaactccttaggtgtgattcctgcttcttctgcttttagctctatcttctgaccatgctcatcagtaccagtctggaagaacacatcatatccctcctgacgtctgaatcttgcgatactgtcagcaagtactatctcataggtattgccaatatgtggcttgcctgatgtatatgcaatagctgttgtcatataaaatggacccttactctgtggcatatctataacctccattttccttgttttctctaattaatcctgattatttgtacaggttttccaatcatttaatgatagttaacttttgatgatatgtcaagttttgcaaacccctaaaaattctgtgtattcaaatccctaaattttgtgtatgcaaatccctaaaattctgtggcttttgaccacgacatcttataatgttatgatatgaataatcatcctttgacattccagcacttatattgacatataatataacatgcctcaatatgagcataaaagttggatgataatccaacgatgtgcgaatggcgggtgctatgtacccgtgacacatgtttagcacggaccgaagcgaagctaagacgtgtgagtgcgtagcacaaaacaacctgtatatatcaaaatcgggggcttttaaccacgacatcacaatgtacagatatataaaaatcaacagaatcgttaaaataggcttaaaagccggtggaatatatgaaaatccgcctgatatcaactttatatcaactttatatcagctttccatatgcgggatttttgtgtccgctcacacctgacacaaacccgatacgccctaaaaacgtgcgaagcacaaacttgagatgcgcaaagaagcagcgcaagaatggaggattattatgtttaaaacattcaaaaaaacaattagtcttgcaatatctttaatcctgtcagctgcaagtatatcactttacggctgcagcacacaggatatacacaatataacagaaaaaaacgactcttcaataacccaggaatacgcctatagccagacagacaataccgcctttaacgaatataccgataacttatttcgcgaaatagttaccgatgatactctttctcttcacacattgcttgaacatccagagaactatgggattaacgattataatatcactctcggaagaatcgacacagacaatctttatgatacatctgatataacacagtatataactgaacttaaagcctttgacaaaaactccctgtcacaaacccaggctgtaacttatgattatcttctttcgtatcttgaatcacgcctgtgttatagtgacctcgacctgtatgactctcagctcactccgacaataggcatacagatagagcttcctcttgtattttctgaatactcattccttgagcaaaaggatgttgaggaatatcttgaattactatgtgatgttgatggttattttgaaaatatgcttgaatacgaaagactgcgtgcagacaagggcttcactctcaaagactccttacttgaggatgtcataagctcatgccagtcagttatagattccataaaacaggagaattccactaaccgtctttttatagatgattttaattcacgcatcgatgctctggactttatatctgacagtgaccgacaggactataaaaaacgtaatatagaagctgtacaaaagcacgtaatacctggctatgaagcattaagagacggtcttaccctgctaaaaggaacatgccgttatcaagatggaataagcagctatcctgatggtcagaggtactttgaaggtcttcttgagcagacacttggatggagcaaatctattgatgaatactcttcccttcttgaaagctatatgagaaactatctgatcgtcatgagaaagctcatacaaaaaaatccttctctcaccgatgctttcagctcttattcctttggcacttccaacccacaggatattatagaagagcttaaacagaaaatgtctgatgactatcctgcccttgatgacattgactattcgatcaaatatgtgtcagaagcactttgtgattatgcaagtcctgccatgtactttatgccacagcttgataaccctgatatcaactccatatatatcaacaaaactggtacaacagacagttatatatatccaacacttgcacatgagggttatcctggccatatgtatcagacacagtactttcttaaaactaacccatctcttatccgttcacttataaaaccaggcggctatgtagaaggctgggcttcgtatatagaagtacattcatacgaatatggcaaagaaagccccgaactaaacacactcgcaaaatgcaactatgcattaatactttgtctgcatgccatgggtgatataggtgtcaactactatggatgggatgaggcccgtctttcctcattcttaagcaactggggctactctgatgtggacactgcacattccatttatacagcacttattgcaaatcctggcaactactgtaaatatgtacttggatttataggctttgaagaactaaaaaaacaggcccagaatgaccttggcagcaacttttctttaaaagaattccaccgttacattcttgaaatgggacctgtccagttcgatattctgttttcttatcttaagcagtgggaaaacagcctagtagtagtatcttccagggcagcataatccaccaccgccaagacaacagttgcaggcaagattaaggactatcagtttcatgcaccagcttcccatgctgctgcctggattctgatatgtctgctgtcttcctgtataccactcaccaccactgttcatccgctggtagaacatcctgtactgcatattatcaggagcaagttcaacagcccgccttgcatgttccatggcagttgcctgattgccttttccggcattggcctgggcactgtaataataccatcttgcatctctgtcctccatgctgttaagaacattaagtgcttcgtcaaagcttccattgtttatatagttagctgcagctctaagatgtatggtagtctgatcgttcccattcatgtcagaggcaccattggcatttccgcctcctccataatatccgccaaagccaaatggtccatatccccagaaatctccaccaaagttaccataaccgccattctggttgttattctggtaatcaccatcatagccataacttcctgtacctccgcgattctggctgtaggatgatgtataaccaccctccttttctttcattatctggttatatgcctgctgtactgtcttaaacatttcctcagccttatccttgtttggattattgatgttggcatccggatgatattttctgcttaatgttctgtatgccttttttatttcttcgtccgaagcatcccttgacactcccaatactgaatacggatcagtcataattcctccaatatatatgttatatagtctatcctctgccatagttaactaagcttagttaatatgttttaccaggattttcactttgactttcattttttgttttcaattctcttttattcctgcacagctcgaatcttgtccatactcctgaatatattatgtttcgtaaaagattagcattttctataacaggaagcctctcaaaggctgctgcacactgtgccataagtgattttaatatattttcaacaaaggcatcataatcaggtctttgtgaatacgccctgagtccattatatctgccctttttattatcctcttcaagatcctcatatgcatctaatatatatatgaaccttccaagtgcgctgcctgtcttgataagtatatctttccactcatcatctttcataagcaatatctgtgacattataatcccaaactgctccgcaggcatatcaacatttccctcgcctgccttttcaagcccgcttattttatccagtgctttttttataatatcagctttttcaggatatgctgcttctatacgctttactttgcctgacaatgtatctgcaagcaccttccttgtgactttcttttcatcattccagtcgtctatgcatttgtaatatgtcataagcacattcatatctgccacatagcctgatatatcattcctgctgactggatgtctgtgtagtggatgtgctatgcatcttgtctcatactttcttgtttccggctcgtataagccagtaagaagcagaagaagaaatgtcatatcatagcttatgcataactgtccgttaaccccataccgctctttaagttcatcacatagtccacaataatatgaacggtatacatcatattctttaatcttaagctctggcttgtttactacaacatatccgtacattggcactatctccctatcttgttaagtctgaggcttctgttataaaaatataacagcataaaaacgaaagcatatatctgtacacaacaaatactgctttcgcttatcatataacatatttaaaactcacgtcaatcaatgcctgaaagattaataaatcttttagattatttagaaatactggtcacggtaatccgtcccccatataagaaaatcctcataatctgccatggaattaaatctcatctcatctgtatacacatcttgaccactgtcagaagctttatctgcctcaacatcataagtttttctgtgaggaaatgtatacttgtgtatatctgttccatcataaccttcacaatcataaccttcaccatcatactctgggtacacattaatcacctccataatggaagtatcccctttgtgtgatgatttattctaatatataactatcgcctgtcttcccatatccttgtatctttcttctacaacttctttatcatattcatagatacctcttagcggatcagccataatatatgtatcagctgtataaccaataagcaccatggcatgctcatgtgatttccacactattgtttctccatcaacattccactcagctgctatatgtggctttgccatccacattgtttcccataccaacacaggatgtccattatctacatagtcaacaagctcactataatcagctcctgtaacattataaacattcatatccgaattctcgctgtatagatatctttttgcagaattcacaattaccggtgcaaatgccccacatgcatcctcatctcttggattacctacaaatgctttgtatggtgatgtttcacctacccttcccttatcaaggaagttatcagccagagtaagcttgtctacatcataaccaagatagttaagtactattgttaatgctgttatctcgcaccctgttggcagttcaggattctgaagcacacacttaacatccagcttcttatatgacttactccttgcagcagctgctttaagtgcctctttttcatccgatttctctttttcaaatgattcctctctctcaaacgattcctctttttccgctactttaacagttcctgcaccagtcttttcctcttctgcattttcattattttctttctcatatatttctgtctgttcaatcatgctttcttttaataacatctgttcttctgtctgccatacagtatcttcatcataaacagcatccacactgcttacagcttctatttcacccttcatataatcagctctctgaataaatcctgtaatatgcccattttttgtcctggctgcaactgccaccataactataactgctatcatgccagccagtataaatgctgcagcaatatttctttttttactgatttttttactaattcttttctgtctattcctctttttctccatacttacctcttttcctgcagaacacactgccgttccccttttttgtttatcatgccgatgtatacctttattcttcggccatgacataattcttttctttaatactaatataaatcattaaccttacaatattcttacagaacagtgttttatcatggaaatttcagaaaaagagaagagtaattttgaggaaatgtttttagaaaaagatttttagagaaatgtttaaagaaaaatgtttaaagaaaaagatttttagagaaatatttaaagaaaaaagggtagggaatttaaggaaaaagaaagttgatttttcaaattgatttttcaggaagagtgggggttttagaagattgattttttaagaaggttgaataaaaaacaaaaaataaaagcccctcaacctgactccatcgatcaaatcaaaagactttcctaaatgcaccgccaggggttcgaaccctggacaccctgattaagagtcaggtgctctaccaactgagctagcggtgcgtatattaaaatgtatgtgaagcttagcgacttgtgtcttacgacttcacaagtgcaccgccaggggttcgaaccctggacaccctgattaagagtcaggtgctctaccaactgagctagcggtgcatatataacaattcgttgccgtaacaacaaaagatatattatattcttttatggaaaaaatcaagtctttttttgtatttatttagatacaatcgactttttttatttttttcagcatattttagcctttttttacgaaaaaagggtttttttacttattgatatagagtatcatatgtataaagattttaaaatttataaagattttaaaatgttatacaagtggtgtaaccgccgcttgcaataaccacttacaataacagcacacaaggagtaaatatatgtctgtatataacagcagcaatactgatgacaatatgtctatgaataacaacagtaatactgacgacaatatatctatgcataacaacggtaatactgatgacaatatatctatgaataacaatagtactgctaataacgataataccagcgatgataatgcatataccatcattaaacacaaccgttttcagcctaacagcaagtattttactattatgctatatgggctggctttcgtacttggttcaatccttcttgtaaggatcgtaggaagcttcaacaacacagtaaaacttttaggacaggctattgaggttatagcaccttttcttgttggtgcatttatagcatttatactatatcctcttgtcagattcttttacagaagactgtttaaggaaaagtgccatatgaaatctgacaggcttgccaaatggctgtctatacttgttacctatgctatagcaatcggcataatcgcagtactgcttgtattcatactgccacaactgtacacaagtataactgatatactggataaactgcctgtatggtacaacaatgttactatatttataactgatttcgagaagaatcataaagaccttggcttcatagattataatattatcaatgaacaccttacatctttatatcctaagatattgtcgtatcttacagatatactgactaatattctgccatatgttgtaaacacttctatggctattataaaaggtttaattaaccttattatttctgttatggtttctgtatacatgatatcagaccataaaaatatcttttatcaatttaaaagacttttatatgctgtatttcctaaacaggcggctgacaccgcaagaacaatatgtcgtgaaagtgcaaacattttcattaaattcatgtatggaaaagctatcgattcattaataataggaatcatctgttttatatgtatgacaatattcaggtttccatacacagtgcttatcagtgtcatagtaggtattaccaatatgattccatactttggaccttatattggcggagttcttggcggcattattatagtgatcatcaaccctctgcaggttatatttttcgcgatcatgatacttattatccagcagtttgacggtctcttccttggacctaagattcttggcaatagtaccggccttaagcctttatgggttatattcgctatagttgtcggtggtgctatgtttggtgtacttggtatgttccttggtgttcctactatggcagttatatgctatatccttaatattattattgaacatttcttaaagaaacgtaatattacggtacagccttatgattcacctgataaaatgtagatatcattacctgcaatttattattttatatatctcattccaggagtgtctgaatcgtactattctttgattcagactgcgatgataataaaagaattcgttaagacgttttaatgaaaaacaacgattacaacgattacaatggttacaacgcataaaacacaccttccatataataatgtttctgatgcatccggattgttatgttgctgcacaatttgcgcaattcatgccattcacgcaatccttacatcatatgattattatattaaaggtgtgtttatttgttacactatgaatacgtttatatgctattttctgtcagctataagcttgcatatcggatttcccagctcggagaatttcttttcatactctgtcatgacattgccctcattaagtcttgtgtcgttatgaaggtcatatgtgcactcttcaagtatccaccctgcttcctttacttcttctactgaaaaatcaaacaatgctttattatctgtcttaaactcaactctgccttccttttttaacatctggtcatatcttgcaaagaactgtcttgatgtgagtcttctttttgcatgtctgtccttaggccatggatcagaaaagttaagatatattctgtcaacctcatctttaccgaacacctcgttgatattctctgcatccatacggataaatcttaagttaggaagctgcagctcatcctgcttctcaacagctcttaacagcacgctggaatatttttctattcctacatagttaatatcaggattctgtgatgcaagtgttgtaataaatactccctttcccataccaatctctatatgaacaggattactgtttccaaacacatccttccatgtccctttcattccttctggctcagtgaacacatacttattctcaatcatcacttctcttgcacctggtacatttcttaaacgcatatttcctccatctcaggctcttatattatttgttttacctgcttcttataataacattctatatgataatgctgtcaaaagtcaaaatatagttgtttaattactaaaaaatatatgttatagtactaagtaacatgataattatataactaatatctacagaaatgaggaatttagtgtgaaaaataagatttttcacacgcaagatttgtgctttgcacaaacttgagatgcgctgagaagcagcgcaagaatggaggattaatatgtttaattcatttagaaaatatataaaacgtactcttggcactattgccacagtttctatcatagcagttactacattttccgttactgccaatgtatctgcggcagcttccgatagcagtacagctcctaaagctgcatggcctgatgccccttcaataacctgcgaaagcgcaatacttatagatgcagatactggttcaatattgtatgaaaaggattcccaccggaaagcatatccggcatctacaaccaaaatcctgactggacttcttaccattgaaaactgtaaccttaatgataccatgacattttcaagcaaagctgctaattcagtcaatccttacgaggatgccaatcttagtatgaaagctggcgaacagatcactgtcgaacaggctttatatggactccttttatattctgctaacgaaatagcatatgggcttgctgaacaggttgcagggtcggcagatgcatttattgatatgatgaataacaaggctaaagagcttggtgccataaatactcactttgctaatccaagtggattatataatccaaaccattacacaacggcttatgatatggctatgatagcaagaggctgctataacaacgcttcatttgtcaatattgactcaacctcttcatcatacactattccagctaccaacatgtctgcacagcgtactataaagcatagacataaaatgcttaaaggtcgtgagttctactatgaatactgcaagggtggaaaaacaggatttactgatgagtcgcttatgactcttgtaacatttgcagaaaaagacggaatgcgtcttatatgtgttgttttcagatctcctgatgattcaacacgatatatagatacaagggctctttttgactggggatttggtaactttaagaaatcaactacttctaattcacagataagctccttattctcaactgataattattattcatcagatgtttttggcaaaagcaagcttggttttaaccttaatgcctcatttataactattcctgctaacggcagtacatctgatgttactatggatataaatactgactatgatgtatcaaacagtaatgataagcttactgcaaagcttaactacaaatatggtgataatgtagtaggcacaacaactcttactatatcatcgggcaatgctgtaaaggacagccagcttccatatcttagcaacgaaataaaagtcacagagctcactcctaagaagtgtcttaaagtaaatatatggataatagctggtttcgtcgctgtgatacttattattatcactattatcaacaacaggaagctttctaataatagaaaacatcattattcaaaaagaaatctaagattctagataattgttgtttaattgaatattagttggtgacgaacggacgacaaatataagatacaggcagtcctgcacactatgttcaatgccagaagctttgattggatatttctaagtctttccatataaactatgataactgacgctaccgctcagacgcgccgtccatggcgcggcttcgctgcttcgtacatccgtgtacgaagctagctggttgactaagggaaagactaagaactatcacaatcaaacttcaagtgcatctcgcatagtatgcaggactgcctgtatcttatatttgtctgtgttacggcataatgtaatattgaatattcaattaaatcaaggggcgaaacagggcggaattgtgcgcttttcgcacaattccgccattcatgcctctcccttctgatttaacacacattcatttttcgtaaattaagccacaaccagacataatataagtgaaaatcggtgctgcgcatacatcgtgagatgcacttgaagttcaattgtgataattcttagacttttccttaactacccagctatccacagacacggatgtctgtggaagtgagatatgggacatggatgtcccgtatcgaacggtagcggaaactaccattacgtatatgaaaagtcttagaaatatccaattgaaacttctggcatcgatgatgtatgcacagcaccgattttcacttatattatgtcgtcagttcgccaactgaatgtgtgttcaacaacaatattatgttaaataattatgaaaactcattttaccagtagaactatatcagaatttcgtgtaatattaatacagcattaaatgaggagcggtgttaaggatatgaaacgtagtgatagatataataatatattaagaaagaagaaaaaatatataccggttatgcttggagtgtgcatgcttggcagtgcattatcaggctgtggttttgtggcaaatccaatgcagtatatgaaggatgcagataaagagcttgcagctgcagaacagaatacagataatgatacatcgggcagtgcaacagattcatcttctggtaatagcaagaataacagtaatagcagtgataacaaggttgaagtaacagataataaagttatagccataggcacatatggaagcataagtgatatggttaatacaactgattataaatcacaggcagatatagagtgtattcaggaaacaagagattttgatgatacatcagatatgcttgcacttgtaaagaaagtgcaggagagctgcaatacagatgctgaatcagtgattgtgtcggtaagaagccgtgtatataaccagatagtatatcttttacagcacactataagtacatccaaaggtctgatagtcataaatgaggatggaaaagatatagattacaataaagtgtttgatgaagcattgaagatagcagttaatccgcaatcatatgttagtgcatcagcggtaagcactaacaatgcaagtaatagtaattcaggaaataatgtttcaggagatactgtgacaggtgctgataataacaaaggcaatgttatcaaagataataataataaagataataataataaagataataagacatatggcagctataaagtgatcgaaaagcttagtgacatggatgttatagatatatcaggcattaattcacttccatatgttaatatcatatatgactatataggcaatgatgcttatgcagcacaaaaggcagtaaatataagtgaggcagttgttgttgttacagaaagcagcgacggaagtctttcgccagatatgtcgcagcttataaatgatatttcatcctcaataccagtaataatcatatgcagtggcagcgatgcagcccaggctgtgaatgatgcgtataataactgcatagcttcatatggcatgagtgctgaagaggcacgtattatggctatgttatgtcttacgcagggaaagaatataaatgactggagagtgcattttacacaggtggatttataaaaatatatacaaaatatagttgtaaatatatataaaaatatagctgtaaatatatgtgaaatacatggaaatatatacaatatgttgattgaataatgcttgattttatggtattatgtacaatatgtgttgcagtgtattgaacaattcattgaacaacccaataaagttatcttgattgtcatagcattgcacatttcagaaaggaacagttaattatggatcagacaaagatacaggatatcgtaagacatatcactaaggacgaagattatggagttggcatgatggagaatctgactttatcagatgctgttgaggttatgacacagatgattcctgctcttaaaaaaagagctaaggaacagggaaattccaacgatcttgcgtattttaacagaatagagaatatttatgcaaaggttatggctgataagttaagaaatgaggaacatctctgggttgtatattgcaatacgacagcgtatccttatatgatagatgacgatataatggtactttataataacaagaatgcttcactacttgaaaagaagcttaagctttcaggctatgaggtatcagttggtgttgagaataaagaacagttcggcttagagctttgtcatatgtatagaaatggctataagaatatcagacttacagatggcgataagaacgtatatgttataccaagagaagaattcggtacatatgaagatttcttcagggaagattatgtgtctaatccgggtcttcagaacgccatgattgcatattttcaggagttcagaaagaatacagataagacttcaatagcccagattcttgataagagagagaatcagatgttaagagtcatggttaattcagagtttatggttccatgcgtaaaggaagaaacagaagaagaggtatctatagcacatcattttatagatgtaacagagcaggtaagtcataaggatggtgagcaggttatagctattccagcatttacagatggttttgaaatggaaaagtgctacaagggacagtatgaaaatatgctttattcatataaggagcttgtagcagctattgaggaattaggtgcatcaggagctatatttaatccacttggagtaagttattttataccgcttgaaacacttaagaaaatagaaaaagattttagcaggtaaagctgcgatataagatggtactttgtgtattgttgcttaataatcatttaatatggttattaagttaaatacaatacatagagtacctttttatatattatgatgtaagtgtaaaaagctcttttacaaaaatgttttataaaagtattggcaaaaaatgatttatgttgtacactaattatgttactaataagacagagtttattatttctggttatagttagaaaagaccaggataattattactggttatagtaaagattaagctgatttattaaacatattatgattatggaggtattttatgtgggtagcagatttacagaatggtaattacagaaatccggttctttatgcagattattctgatccggatgctataagagtcggggaagattattttatgattgcttcaagcttttctaattctccggcactacctatacttcattccaaagatcttgttaattggaaagtgattaattattgtttaaagcatgtgccagagttcagatataataatccacttcatggatgtggtgtatgggcaccatctataagatatcatgaaggtacatattatgtatgttttcctatgccagatgaaggtatctatatgacaacaacaaaggacccatggggagagtggagtaaacctgttaatataagaccaggagctggatggatagatccatgcccattctgggatgatgatggaaaggcttatcttgttgcaggtgttgcaaagagccgtatagggtataagagtgttcttcatatagtcagaatgcagccagatggtatgggaatatttggtgatgaagttaagatatttgatggtaatgagaatgaccagattacgatagaaggtcctaagatgtataaacgtaatggatattattacgtgtttgcaccagcaggtggagttaagacaggatggcagacagttcttcgttcaaagaatccttttggtccatatgaatataaggtcgtattaagacagggagattcaccagtgaatggtcctcatcagggagcctgggtagatacagtaacaggtgaagactggtttctgcatttccaggacgtatatgcagctggaagaataacacatttacagccaatgcactgggaaaatgactggccaataataggcgttaacaaggaaggaaacgattatggtgaaccagttatggaatatagaaagccagatattggaaagacagagtcagaacttgaagataagacaaaatatccagtatgcgagcctgatacaacagatgagtttgattcggatgcgttaatgttacagtggcagtggaatgcgaattatgacgacagctggtttgatacaaagactgatgtatatggtaacaaggcagaagatggttcatatataaagcttaatgcagttcctgcaactcctttaagaccagttggagattatcgtaatctgcttcttcagaaatggccggcaccagaatttacatgtgtaactaagatgagttttaatggacttgttgatggtgactatgcaggaataatatcacttggtgttgattatgcagcattaggagtagcaaaaaagaatggttcatattttttaagaacggttaatggaaagcagaattttgactgtgaggcagtatatacacaggagatggttgatgaaaagcctatagaagctgacagattcacagatgatacaaagacagtttacttaagatatacagtaaaaagaacaggagccacagaaactaaagagatggcactttctgttaaaaatgtacctgtagaagaagcatctcttgagataagctttgacggaaagacttatgaaaatgcagtaagttatacagctaaagcgggccgctgggttggcgttaagaatggtatgtttgtaagtcatgataacacagtaaagaatgaagaaaatggatttgcaactgtagactatataagatattcagaattataaaataatctgataacatttagaatcatatatcatgccatatatagattgatgagggtatttttgtacctgttaatctatatatggcattttatagtgaaattattttataataatgagatgtgagtgtctcaaagtaaagattaatagaacacgtgatcacctattacggtaccacccttatcaacctcactgttatacatatggaagtatagggcattgattgttatatgtccgttaaggacttctttggcggctttagtacactctgcatcagctcctcttgcaagtacaatggcaaaacggccgctggctacaggactaaactgtgaaggcgcatataaaactgcctgaagtgtatttccgaatttaggactgttgattcggtttacgataacgcttccaacagcaagctttccctcatatgactggttgcctgcctcacattcgattatagcagccatcattgcaaggtcgctggtatcatagttaacaggggtgttgtttatgacttcatcatttttggtcagattctttatttcttcaagttgtcttgcagcagcttcttcttcaagctttttttcatattcaaaagcaagggcttcagcattttttataccttcggaagcagcatctattttagattgtttggcagctataagattttttatgttatcagactgcgacacagcctgctgtttaagtgatacaagctctgtcatgtcattgttaaggcttattttgttctgattaagtgttgttataagctcattcagatttgataacatagagcggtcataatcagatatttgtcttgcataatcagccttcttaagcagctcagccatatcagcagagtccataagtacatccataaaactatactcgctgctttcatacatatattgtatgcgaagcttcatggcttcatattgtttatgtttttcattctccatatcggatatatcctggttgagtatatcgatttcctgctgttttgaagccatgcgttctgttatcaggttaagagtgtcactaaaagtttcaagctggctgttaagctctccaagctcagacgagagtgcagcctgttcttttttcagattgtcaagctgtctgttattctcatcatagtctgattgggtatcggcatagcttataaaagatacacttgtaaaattcagcattattacaaatgataaaataccgatagaaatatatttaataaatgttttaaaaaaatctgatttcatgtaaaaaactcaccttcatatagaatgttttatattatgttgtgaacttctttagtatgatttaaaattatagcatataacttagagttaaaaaagagaaaaatggttatacacatgcgttgcagatggctggaaaattgtatataatattgaaagcgttaaatgtgctgtctgaagaatttttgcacaaaacgtgtacagaaatgaggattagtgtgaaaaataagatttttcacacgcaagaatgaggattattatgaaatataagtatactatagatacacatacacatactcttgtgagtggacacgcttataatacaatagatgaaatggctgcatatgcttttcagacaggcgttactcatcttgccataacagatcatgcgccaaagatgccaggaagtgcgggaatattatatttttctaatatgaagataattccaagagttaaaaacggtgtcaggatatatatgggctgtgaggctaatattatggattatgaaggcagtatagaccttaaggaatacgggcttaaaggatgcgatgttgttatagcaagtctgcatataccgtgtataagaccaggtgatataggccagaataccaaagcactgataaaagcaatggacaatccatacgttaacattataggacatccggatgattcaagatatccggttgattatgaacagcttgttatggcagcaaaagaaaagcatgttcttcttgaagttaataatacctctcttaatccagatggtccaagacagggagcttatgaaaatgacattaaaatgcttaaactatgcaaacagcttggcgtgtgcatatcaataggcagtgatgcacatataaaagaaagtatatgtgattttgacagggcgtataaggtacttgaagaaacagattttcctgaggagcttattgttaacagcgactatagactatatgaagaatatataggacgaagaaatataaaataaatattttcataaatgtatttactgtaaaactttactgtgataaactgttgaaatgagataaaagcacgcatagaacaacgtgggaattgagggttatatatgaacgataaattaaagtcaaaagaagtagaacagctttttaaagctatactcagtcttgaggatgttaaagaatgttatgatttttttgaagatgtatgcactattaatgaactgttgtctttagctcagaggtttgaggtggcaaaaatgttaagagagcagaagacatatcttgagatagctgagaagacaggagcttcaacagctaccataagcagagttaacagatcacttaattatggtaatgatggatatgacagagtgtttgaaagactcggcatcagcacagaaaagcctcaggagaataagtaatataaatatatgtaaatatatattataccggttatttgtagtcgtgcgtttgcatgacctctgataactggtattttttatcatcctatatattatatacgatacgggtgatatatacgacactgtgacacctatactatgtcattgatactatgtcatcaaaactatgtcatcaataataaacctcttgatatatagtttttaatactatataataaaggttaaaaggcattgcaaaaaccaataagtatattggttaataattatagaagtgttaatgcggattgttttatggcagtcagcatataggagatgcatagtatgaataaaaatagtcaggaattcgttgatgttttattaaaaaagctcgtaaagcttaattatattaaaccaggagatgttcctaatattgacctttatatggatcaggttaccacatttatggatgaacatctctcggatattaaaagacatgaagatgataagatacttaccaagacaatgataaataactacacaaagaataatctgcttccaccgccagtaaagaaaaaatattctaaagagcatatatatgttttaacatttatatattatcttaagaatattctttcaataagcgatatccagaagcttcttaatccacttacagataagttctttaatacagatggagttccagctcttgatacaatatataaagaaatatatgatatggagaagcttcagttagaggcattgccacaagatgtattaggaaaaacagaactttcaaaacaggccttttgcgatgtcgaaaatgaagaggataaagatttccttcagcttttcatgcttgtatgtctgttaagctttgatgtttatatgaagaaaaatatcatagaaagtcttatagatgattatacagcaaagaaggcatcatcggataagccaaagacaaaggaagagataaaagaagaaaagagagaagcaaaagaagaggctaaagaagcaaagcgtgcagcaaaacagaaaaagtaatgaatatgcctaaacagtaagtacaatatgtgattaattataaaaaaatacattaaaaactaacaagcaattaaattatctgataaatatttataaacaatagtgacttttaataattgatatagtataatagttacattgatgctgaaagttaagtaaagacttttaatcactgttaaagaatgggaggatattatgggtattttaacaagatttaaggacattatgagtgcaaatattaacgcgcttttagacaagtgtgaggatccagagaagatgatcgatcagtatatgagaaatcttgaaagtgatctaggaaaggttaaggctgaaacagcttcagttatggctgaggaaacaagagcaaagagagaacttgatgaatgtacagagcagattaacaagatgcagtcatacgcagaaaaggcattaagagctggcaatgaggcagatgcaagatctttccttgaaaagaaacagcagcttacagcaactcaggcctcacttacacaggcatataatgtggcagcagataatgctgctaagatgcgtcagatgcatgataagcttgttaaagacatatcagctcttgaagcaaaaagagcagctatcaaagcaacagtaaaagcagctaaggcacaggaacgtatcaacaaggttggctcaagtgttgtaggtgccaataacagcatggaagcctttaaccgtatggaagctaaagctaacaagatgctagatgaagctaatgctatggcagaacttaattcgtcagcagaagaagcagatattaacagcctcgcagccaagtatgatgaagaacctgctgacacagcagtagatgatgaactagcagcacttaaagcccagatgggtattcagtaaatcaggaggaaactatggggttattcaggaatcagttttccaatgtggtagaatgggaagaatacagggatgattgcatattctggaaatggactaacaaagagataaaaaaaggaagccgtcttataatccgtccagggcaggatgcaatattcttatataatggtaacatagaaggtatatttaaggaagaaggggagtttgatatagattcccagattatcccttttttatcaactcttaaagggtttaagtttggatttaacagtggaatgagagcagaggtactttttgttaacactaaagaatttaatgttaactggggtactaagaatccaatatctattccatattcaggacttccaggtggtatgcctataagagcatttggtaactttgcatttaaggtgtcagattatgtatgtcttatagataaagttgctggtattaagcagatgtatacagttgaagatgtcaaagagcgagttgttgctgtgttagaccagcttcttatgaagtggatatctaaggaaggcaaggatatgttcaatcttcaggctaatgcttatgatattgcttcaggaataaaagaagatcttgatatgcagataagtaagcttggaatagaaataacagattttaatatagccagcttctcatacccagaagagattaccaagatgcagaacaaagcagcatcgcaatcaatggtagctgacatgggtaaatatggtcagatggctatggcagacaatataggtaaaggcggaaataacatcgcttcagatatgatgagtgtgcagatgggtatggctatgggacagcagatgatgaataatatcaataacggtaacagccagacatcatcaacagcagctggtacatacaagttctgcccgaattgtggagcacctgtaaatggtgccaagttctgtagtaattgtggaactaaattatcatagaaattgttgtttaattgaatattagttggtgatgaacggacgacaaatataagctacaggcagtcctgcacactatgttcaatgccagaagcttcaatcggctgtctctaagactttttatataggtagttataggtgacgctaccattcggacgcgccgtccgtggcgcggcctcattgcttcgtacatccatgtacgaagctagctgggagcgaaag

SEQ ID NO: 351 - DNA, 261837 bp, Unknown
  gut microbiota DNA sequence
atatcagattcatattttacttgatgtcctagctcatatcagattcatattttacttgatatcctagctcatattttacttcatcttctacttcatatccagcaatccaatcagcgtagctttatcattcagcttaggattttcaatcacgatttcaagcagatagtttagtgtatcaccaatctgggtgcctttaagaccatattctataaggtcaagtcctgtgatatccagatctttgatagaaaaacagtcgccacgcgcaagtatttcatcagccatagtttttagctttataagatgattgtgtctgcctggattggttataaaggttacttcctcacttgcttttacagcagcaagctcatacttgataatggattcaaatatatcacgtccacatttatggagtgcttccctgattgcaggttcagtttcttctacacggtcttttgaatatgtaagaatttttaccacagtatcaatggttttgttgtccattctcaggtgacggagtgtattatatgcatcctccggagtgccagtagaaaggcatgcggcgagtcttaaagcaaaattcttttctacatatctgcatgtcagaagaattcttttagactgccttgaagtaaaactgtcgtgtagctgtggcagtatatctctgaacagattagtggctccatataagcggcagaaatcaggattgtcagacatgagtgttttcttaagctcaacacatacacgttccatgcttaccttctgtatatttgtgcttaatttttctatagctttaaaagtgttatcatcaatagtgaatcccagctgtgcagaaaaacggattgcacgcatcatcctaagagcatcttctgtaaatctttctacaggattcccaacacatcttattattttattgttaatatcatctatgccgccatattcgtcgacaagacccattctgtcattatatgccatagcatttatggtaaagtctctcctgcaaaggtcatcagtaagcctgtcagagaattctacagacgagggatgcctgccatcaagataatcgccatcaatacggtatgtagtaacctcataacctgttgaatgaagcatgacggttacagtaccatgttgtatgccggtgtcaattgttttattgaagtatgatttgacttcttctggtagggcattggttgtgatatcccagtcgtttggaacaacacccattatagtgtcacgtacacatccgccaacagcatatgcctgatgtccgtttttttcaatagtgtttattataaatgaaacatcttcagggagttctattttaaagttattcgaagtgttaaagctgtaagcctgtttcttagatatatttttgttcataaaatctccaatcctgcactatgccataataagctgttaattataaatgcaaaatgattttatcaaaaaatattggtgacgtcaaaatcctatgtcgtttaatatcacaggaatttataaggacatgcatttttaataagttcatatcatatgataagtaggattaatgggaggtttatgtctgtgaatgagaagtcagaaaaggtattagaacagtatgatataggaataagacgtatggtaaggggacgtggggggattatagtgcagacagatcagggctataagcttttcatacaatgtgaaaaagcggacagatactatgagagagaaaacaagctgacacaggtgcttgatgggattggatatacgtgtattgatacttacatgagaaataaagaggggttaattatatctgaggacgaggatggaagaaaatatataatgaagaactggtttgatgcaaaagaaagtaatgtaaaagatgaaaatgatatgtgcatggctgtttcggctatggcatatatgcatgcggcgttaagacagataacaccagatatgttgtatgtgcaggataacgtgtgcgatgaaagcacggagcttgaagcatgtcagaaggtaagaaggattacaggctatacaaaagagacagagttaagaaaaacatatgcaaaacacacaagggagctgaaaaaggcatacaattatcttaaacaaaaaaagggaaaacagatatttgaacaaatagcctttaaaaatattgaagtcttttacgaagaagcatgcagggcaaatgaacagcttatgagtgaagcatttgatgaacgtcttatgatggcagcgcaaaacatggagctgtcacatggaagctatacatatcataatgtgttgctcaatggtaagaatacgtatattgttaattttgacagatacaaaaatgaatgtcagattaatgatctgtaccagtttataagaaaggtgatggagaagtataactgggacagccggatgttttacaggcttgttgatgaatatgacagaatatgtccattaagcgatgaagagatggggctgctcatggttttactgtcatatccggagaagttctggaagataatcaatcagtatataaatgcaaacaagtcatggattccggagaaaaatgtagaaaaattaaggaaggtcatagagcagaatggaagaaaaagagaattgattgataaaatatgctgtgtgtggtaaaattcaaccagatatactatattgagggtatatttatttgaggaaacaggctttaatcaggtagtaaagatgaataatatatatacaaaaataaataatatgcaaagacattctaactcttacaaaagaacggttaaaaggatgacggcattcctgcttgttatcattgttgttttatgtgcggcgggttgtaaaagtacaaaaagtggtgggacagttataccgggaagtgctgttacaccggcaagaaagcagggaaatatatcagatattactggcaataataaggataggacgcttgtaggactgcttgtggctgtggataccagccttaagaacatgcattttgtggatgtagagtctggaacagaatattctgtgatatatacaggaggaaccgatattcaggatgcatatggaaagataaaagcagcatctgttatgcagccaggtgagatatatgatgtgtattgtgataagacaggcaaggcattaaagatatatggttctaaggatgcatgggaaagaaatgatgtatcggatattacctttgatgaatcaaagaaaaatattactataggacagacagttcttacatatacagacaatatttttataagctctttggatagccagataagtatggcacagattgtaaaagaggatattctgacgttgcgcggaataggtgataagctttattccatagtggttgataacggacatggatatatcgagcttacaggcatagatgcatttgtaggaggatatataacacttggaagcaatggatttaacaaagttacagataatatgatggttacagcaccggttggaagctatgatgttgagatacagaatggagatatgaaagctgtaaagaaagttactgtaaggaaagatgaaactacagctcttgatttttctgaatatcagacaccagctactaagaagggaactgtcaacttccaggtaacacctgcgaatgcagttatgacgatagatggaagtgaagtggattattctaagccggtaagtcttagctatggaaggcatagtcttgtattgcaggctaatcattatacggcttatacagaaacctttgttgtgaattcggattatacgactaaggttatagatatgacgtcaacaagctcatcaggtactacatcaagtacagctaagacgacagcagctagtcatacaagcggctatagtgtaaagataacagcgccagagggtgcggctttatatgttgacagcgtatatattggaattattccatgcacgttcagtaagacaagtggaaacaggacgattacgttatcgcagtcaggatataataatgttagttatacagtgtcgattcctgacacagcaggagatatgacttattcatttccagctatgactaaggtagcatcatcaactgagcatacggcagcagaaccaacagcatcgtcatcaaagtagatatttaattcaggtatgtaagacaggtatttaagagaagatgtttaaggtgaatgtcagaattcacttttgacatttatataatagatatgtatagaaaagaggtatcaggttaataatgacaaagaggatgaatataccattttcaccaccagatatgacagaaagagaagttgaagctgtaggtgaagtattaagatcaggatggataacaacaggtcctaagactaaagaacttgaaagacgtatggcacaattcacacatacgaaaagaggtgcatgccttaattcggctacagcatgcatggaaacagccctaagactgtttgatataggaccaggagatgaggttattgttccggcatatacttacacagcatctgcaagtgtagtatgtcacgtaggagccacactcaagcttatagatgtagagaagggaacgtatcaccttgattatgatgcacttgaacatgcaataacagataagactaaggctgttattccggttgatatcgctggagttatggtagattacgataggataagaagcatacttgaaagcaaaaagcatttatttaagccagcatctttatatcaggaagcacttggaagagttcttatactggcagattcagcacatggatatggagccagccgtggtgggcttatgagtggggaatgtgcagactttacatcattttcgtttcatgctgtaaagagttttacaacaggagagggtggaggtcttgtatggagagaacttcctggtgttgatgatgaagaaatatataaaaatattatgcttatgtcacttcatggacagtctaaggatgcacttgcaaaaacaaagcttggagcgtgggaatatgatatagttgcaccactttacaagtgcaacatgacagatatagttgcttctataggtcttgtacagatggatagatatcctggtctgcttgcaagaagaagacagataataggcatgtataacgaaggcatacaggcgcctgatatagagtatctacagcattatacagatgaatacacatcgagtggacatctttatcttgttcgccttatgggaaaagatacacaggcaagaaatgattttataacaaaaatggcagaggcaggaattgcaactaatgtacattttaagcctttacctatgcatacagcatataagaagcttggctttgatatatcagattatccggcttcatatgaaatgtatcataatgaggtcacacttcctttgcatactaatcttacagatgaacaggttggttatgtaatagaaaactttaacagcattaagaagacggtataacagcacaagtgaacggagagtagctaatatgcagctaagaagatggaatgagcttcctggggttatgaggaccagggaagtcagaaaatattacaatataataaaaaaaagacagatgtcacttaagataaaaagattgtttgatatagttgtggcatctattatgtttatgtttcttgcagttcctatgcttgtcatagctgtctgtataaagcttgattcgagaggacctgtttttttcagacaggaaagagttacacagtatggaaggatattccgcatatacaagttccgtactatggttgttgatgcaccaaagcttggagcttctgtgacagtagataacgatgacagaataacaagggttggaaaagttttaagaaagataagagcggatgagttcccacaggtatttaacataatcaacggagatatgacactggttggaacaagacctgaggttcctgaatatgtaaaaaaatatacaaaagaaatgtatgcaacattacttctgccagcagggcttacatcaaggacgagcatagcgtataaagatgaagataagatacttgcgggagcagctgacccggatgaggcttatgttaaagaggtacttcctgccaagatgaaatataatcttgaggcgcttaagaagtttggctttgtggaagactgcagggtgttatgggatacattcacatcagtaacaggaaatgacagattatcagtaacaggaaggacaggaagcaaagctgctggaagaagcataaatgtataataataagtgcagaaagggaataacgtaagatggacaagttgtttataactatgtgtgtgattgcatacaatgaggaaaacagcataaacaatatacttagctgcattaaagagcaggattatgaccataagtctatggagattgtacttgttgatggtatgtcttctgataagacaagggatattatggttgattttgcaaaaaataatgaaaatgaattcgacagggtagtagttcttgataatcctaaaagaacacttccaagtggatggaatgtagcgttaagggagtataagggagatgcaatcataaaggtagatgcacatgcagttataccacaggattttgtgagtaagaatgtagcagttcttaacactggtgagtatatatgcggtgggcagagacctaatataatagatgagccaacaccattcaaggaaacgttattgctcgcagaaagcagtatgtttggttcaagcatagcagcttacaggaataatccaggaaaaacatatgttaaatccttattccatgcggcatacagaagagaagtgtttgaaaaggttggcttttttaatgaagagcttgctagaacagaggataatgagattcattatcgtatgagaaaggcaggatataagctgtgctttgatcctgatattatttcataccagtatacaaggagcagtctttcatctatgcttaaacagaagtatgcaaatggtttctggataggaaagacgagcaaagtgtgtccagggtgtcttagcatatatcattttgtgccatttgcgtttgtaagtgctattatggcatctgcgctctctttaacaggacttaaagtggctgatgatgtaagaatacggttatcacgcagcggtacaaagaaaaatggcaggaaaagcatatggctgccagggaaaataaaaaatattattacaacacttaccgttgttatgtgggtattgtatggaacattggcatgtactatggcagcggtatcatcagttaaagcaggtgaaaagaaaaatataacaaatatcctgcttccagtattattcctcatgcttcatgtaagttatggagcaggaacgattgtgggacttatggataagcaggaaagaggttagatatgggagagacaagaaaagataagcttcagcttattataagacgattttttcttataataactgatattatcctcattaatggaagtgtaatactatcacttgtaatgaggtttaatgttgatttttcagcgattgaaccacaatatatagatagctttaaggatacatggattccatttacaataataacacttattatattctggtgcttcaggatgtatcatagtctgtggcagtatgccagtatagctgagctgtataagatagtagaggcctgtatagttgcagaaggcgttcatatatgccttaccgcagttacaggtgaaatgcttccaagagcctgttatttcatgactggtgtattccttgttgtagcaatgtgcgcaagccgttttatgtatagaatgttaagaactgttatacaggaatacagacatacatcagaacaggtaaagataatgataataggagccggagaggcggctaacgtactcatgagagaaatagccaactcaagatatcttgataactcaaaggttgtatgtatcatagatgatgatgcaaaaaaggttggaaagtatataagaggagtaaagatagtcggtaacaggaatcagataaaagagtatgcaagatactatgatatagatgaaataatatttgctattccatcagcatcacaggataccaaaagggaaatactcaatatatgcaaggaaacaaactgtaacttaaagatcatacctggtgtgtatcagatgatggatggagagattaatgtccaggatatcagaaatgtagatgtagatgatcttttgggcagggatcctatcaaggtagatgtggagtctatattaggatatgtatctggaaagacagtgcttgttacaggcggtggcggttcaatcggttcagagttatgcagacagcttgttaagcataatccaaagtgtcttataatatttgatatatatgaaaacagtgcttatgatatccagcaggaattaaaaatgagtaatccagatgccaatgtagtcactctcataggttcaataagaaacaatacaagacttgagtggctgttttctcactatagacctgatattgtatatcatgcagcagcacataagcatgtaccgcttatggagggaagtcctaatgaggccattaagaataatgttgcaggtacatggaacctggcacatatggctgacaaatatgggacaaagcgttttgttatgataagtactgataaggcggttaatccgactaatattatgggtgccacaaaacgtatatgtgaaatgattatccagtattataatgggatatcaaggacagaattcgttgcagtaagattcggtaatgtccttggaagtaatggttcggttataccgctttttaagaaacagattgcagcgggaggacctgtaactgtcacacatcctgatattataagatattttatgacgatacctgaggcggtatcactggttatccaggcaggtgcctatgcaaagggtggagaaatcttcatacttgatatgggtgacccggtaaagatagatgatcttgcaaagaatcttatcagactttccggctatactcttggtgttgatatggagattaagtatacaggattacgtccaggagaaaagttatatgaggagcttctgatggcagaggaaggcatgcaggatacagataataagctcattcatataggcaaaccaatagagtttgaaaagaaggattttgagaaaaggttagaaatacttaaagaaacagcatatagtgaagatgcagcagcagttaaggtgcttgttaaggaattcgttccgacatacaagcctaacggcaacaggtagttaaaaaacaaagaaacagttgcaaagcaggaatcgaggttcggtatgaaatatattattgatggaagatttttatatggacaggttctgggtgtacaaaggtatgcaagagaaataacagctcagcttgataaaatgattaaggacaagccatatgatgttgaaatagcagttccgcagatagattcagaagggacatcagcagagattaacagctataaaacgaagtatgataatataaaaattgtcatacttaaaggtgtatctggaagaaaatgggaacagcttacatttcagcactatgttaacagacagaaagcaaaaccggtgtatctgtgtaacgaagtttcacttttaatgaaaaatggaatagtaacagttcatgatatagcatttaagacacatccaggtttctttaccgaacctggtgactggcatgaaatactgtttagaaagcttatgtatcttaaagcgtttaagaaagctgatgcgattatgacggtaagtcagtattcaaagcgtgaaattcttgataactacagtctgaagaatacagatatagttgttgctggtaatggatggcagcattttaacatagataacgtagatgaaataatatttgacaggtatgcctcaaggataaagagaggcaggtattatttctaccttgcatcgcttgctcctaataagaatcttaaatggatacttgaaaatgcaaagatgcatcctgaggttacatatgttatagcaggccgttctcttggtgacaggtcaggcatagaaaagctgcctaacgttgttttgattggttatgcaaaagatgcagaggcaagggcacttatgaaatactgtaaggcatttgtttttccatcaacatatgagggctttggaattccacctatggaggcattgtgtatgggtgcccgtatcatactgggggatattccggtactgcatgagatatatggagagtcggctttgtatattaactgtaatgatgcagatgttaatctggatgagctgcttgataacagtgatgctaaaaaagaaaaggaagcagcagttaaggtgcttgacacacattcatggaagaagtcagcagcaggtctggcacagcttatggacaggtatgcggctggtatatagagtgataattaagtatggaatcagaggaaggttatgaagatagcgattgatgcgagaacacttggcagcagaccaagtggagtgggcatgtatcttaacgattttttaaaacagcttataaagtatgaggatatggaattcgttcttatatcagatgtggctgaaagcgaatatattaaatcgtttcagaataaagggataaaggtatatacgcagggcaaaaaggtttataaaagtgctggagtgtattcatatttcgcatttgtaaagaaacagcttgagcttataaagccggatatattctgggaggttaatacgatcataccggtgaagcttaagggtgattacaggataatgataactatacatgacatgtttccaatagaatatgttgaatattttggaagagtgtataacatatattttaagcataatttaaaaaagacattaaaaaatacggatatgattctgtataattcagagcagacaaaacgtacaacagagaagttctttcccgaagctaaagatatagataatgtcaatgcatatataatatctaatccagtcaggaaaaaatggataagtacagacgaaaattatttcctgtatataggaaatatggaaaaaagaaaaggcgttgatcttcttataaatggatatttaaaatataaggaacttggcggaaaaaagaagcttattcttggtggaaagatgcaggaggatgatatcaatactcttgtacacgatgcaatggaaaaagataaggacataacatatcttgattatgttgcacataataaaaagcttgagttgtatgctggaatgtctgcgtttgtgtttccgtcaaaggcagagggctttggtatgccaataatagaagttatgagattcaataaaccaataattgcaagtaatcttcctatatttgatgagataacagatggaaatattaatacatttgatttatattgcagtgctgatgaacagataaagaatcttgcacagattatgctaaattataatgcaaatgtggatgaatcagcttatgaagcagtagtaaacagatatttacctgaaagacttggtaaaatagtgtatgattttgtaaatagatatagaaataataactaagacgtggaggataagcatgaaagtattagttaccggagtatcagggcagctcggacatgatgtaatgaatgaattagcaaagagaggatatacaggggtaggaagtgatatagcagaaaagtacagtggagctgacgatgggactgctgttgttaacatggaatatgtccagatggatattactgatgaaaaggcagtagaagatattatcacagaagttaatccggatgttatagtacattgcgctgcatggacagctgttgatatggcagaagatgatgataaggtagaaaaggtgcgtgcagttaatgcaggtggaacaagaaatatagcaagggtagctaagaagcttgactgcaagatggtatatataagtacagattatgtgtttgatggccagggtgataagccatgggagcctgactgcaaggattataagccgcttaatgtgtatggacagactaagcttgagggagaacttgcggtttctgagcttttagataagtactttatagtaagaatagcatgggtgtttggtgttaatggaaagaacttcataaagacaatgattaacgtaggaaagacacatgatacagtaagagttgtatgtgaccagataggaacgcctacatatacccttgacttatcagttcttttagtggatatgatagaaacagataagtatggatattatcatgctactaatgagggtggatatatatcatggtatgattttacccttgaaatatataagcaggcaggacttaatacaaaggttgttcctgtaacgacaaaagagtatgggttatctaaagcagcaagaccttttaattcaagacttgataagagcaagcttgcagcaaatggctttaccccacttcctacatggcaggatgcaacaaaaagatatgttgcattgcttatgaaggaagaacagtaattagtagaatggagaatgtatgaaagaaaaaatgtctggagtatggaacagattaactactaaagaaaaccgtaaacttgcatgggatgtatttataattttgtttatttcaaaattattctatatatttataggatgtgttactaactctgcatttggtaataatgtaacctttgccaagatgtttcttgggggagatgcagactggtatataaaaatagctgagaagggttatagccttgccagcagtataaaaacaggggatggacaggcaaactgggcgtttttccctttgtttccagtgcttataagatggtttaaatatatattctttttccttgactataaacaggcaggtataatacttagctctatatttacttatataacaggactttatcttgtaaagacagtaagactatataaacctggaagattaggatatatagcagtggtgcttctatacatgggaccatacaccttttatcttcattgtgtttattctgaaaccttgtttatgatgcttctttcaatattcttttattatctgaaaaaggatgtggatggtaaaagaaattactggataccagcatttgcggcaatgcttgcaagctgtacaaggatagtcggtgttatattagtgtttccgcttgtgcttggaatgtatcgggattcatatagtggaaaaataagccttaaaaaggctggcagttttataaaggataccttatgcacacctgtaagaatgctccagatatttatatgtcctgcgggaatattcgtaaatatgctgcatctttactgggtatgtggtgatgcgtgggcgttcagacatgtgcagacggcatggagagaggatggcgcaggatacataggtaatatgatatgggatttcttcaacaacatatatgctgaaagatactggataccactagtagttattcttgcaatagttgtatatgtatatatgctaaggaatggatattatgaagaggttctatttgctataataactcttataatcccactgacaggtggagttatgtctatgtgtcgttttatagttggaagttatgtaatatttataggtatatatgattatcttgcagataagaaggatataaaactctgtgcaacagctttagttgttattatggaagcgtttcttatatggttatggtttacagcaggtgttaacgcatttacagcctgatacagccggtaagtatgacagaaatgaggatatgtatgaagaataaaaagataattaatgtaatatgctatattataacagcggcgcttgctgtgttttaccttgcaacacttgtgcttggatcaaaaaggcaggtatcacaggagtatgatctgtattatgttgatggaaagctttcaaagtggccgggagagcatggacttgattataactttggagatattgatatatatgatatatcaaagcttgaggagtataagaagcttcttgaagaagaaaagctatatggagatccatcaggaagaaatgaacaggacgatgcagataataatgaagccgataaagacagcgtggaatctaacagagattcagccttagataagtatttccagaagatgcttgctgctgagaacagtaatttatctgacaatatagatgataaggctgataaagcaggtgatcctgacacagcagatactgacagcagtgaaaaaagcacagcattaaagttaaagataccatatagatattccaagggcttttattcccttcatactggaatatatacaaccaatggaaatgaagcagcgttatattacagatttaatacaaatgtgccttctgatgtagtgcttgatgtatatggtgcaagctataatacgtcaacaaaggtgtatgccaacaatgtgtatataggaacagttgaagcatatgataatacagatgtgtcagttatgtatcataagaatgagtatggtgacaagataagggaagataaggttaatgataataagaatatgtttactattccagcagatgcgattggaagcgatggtcttgttaagataacatttgttccggaagagaccgtaagcatatataattatattaacagcataggaaatgataattttaaaaaatataaaggttttagaataacatctgtggaaatgcgatattagccggatgattcagtatgcttacaggcagcggctatgtgtatacacgcagggctatgcataaaatatatagaaaatatatagaaatataaaaaaagacttgcaatgaactgatatgtgtggtaaacttcaaaaagtttcgttggcagatatgattcgttatgtctgcctatgataaatgggtggattcccgagtggccaaaggggacagactgtaaatctgctggcactgccttcgaaggttcgaatccttctccgcccattctacatagcacagacttgctggcagtaaagcttaacttaggctgcgccaagtacttgttatgtattaaaatataccaaagagccggtgtggcggaactggcagacgcacaggacttaaaatcctgcgggacttatactcccatacgggttcgattcccgttgccggcattaagttaatatacagcatgtagaagaaaataatatttcataccacaggctgtataggtgattaaagacagacctctaagtagattaatacagaggtctgttttttttaatatctgtaatatataagtatgatatggcagaaaatataaaatatcttttgctgcttacattatacctgcgtgataaactatggttgatacaatatatatattagtgtacaattatcagtattgtttatagggggaagtatatgattgaacttgacggaatgctgtctgttattatgccggcatacaacgaagaaaaacttatatattcaagtataatgaaaactttggatatagtttcctcgtttgtaaaaaatatagagataattgcagttaatgatggaagtaaggataacacaaagtccgagattataagggcacagaaagaggataagagagtaagactggtgacctctgataaaaacaggggaaagggtaatgcaataatagcaggagtatcgcaggcaaacggaaaatatatagcattcgtagatgcggatttagagcttaacccatcacagcttgaaggatatcttaacaagatgcttaccgacaatgtggatgtggttataggctgcaagttccataaggattcaaagcttaaatatccatttaaaagaaaagtcataagcatgtgctattatataatgcttcttttactgtttcatctgaatgtcaaggatacacagacgggacttaaggtgtttaaggcagaggctataaaaccagtagggcatcttataaggacatccggctttgcatatgacatagagcttcttgttgcagtccacagaagaggctttaagatagcacagatgccggtagaagtagttttcgtaagagaaaaagactcaaacaggattggaataaaagattgtataagagcttttaacgatacctgggcaatattctaccgcgtctactttaaacattactatgacgatgccagggtcagaaagtgaaaagccgttcgtgcttgcacgaaaaggcttttaaccttcagacccgcccaaacatgagaaaggagcgatttgcaaggcaaatcagcggagatcgaatgtttgtagaattgagggagcagcgaagctgcggagcaattcgaaggcatcgtcaaaaaaagtaaaacagccagggtcagaaagtgaaaagccgttcgtgcttgcacgaaaaggcttttaaccttcagacccgcccaaacatgagaaaggagtgaggttatgtatgattatttaatagttggtgccggtctgtacggcgcagtatttgcaagacaggcagcagatgccggaaaaaaagtacttgtagtagataaaagagatcacatagcaggtaacgtatatacagaaaagatagagggaataaatgtacataggtatggagcccatatattccacactaataataaaagggtatgggaatatcttaacagattcacagaattcaacagattcacgaattcacctgtggctaattataatggtgagctatattcacttccatttaacatgtatacatttaataaaatgtggggtgttgttacaccagatgaagcacgtaagatgatagaaaaacagaaacaggcagcaggcataagtaatccgcacaatcttgaagaacaggcaataagccttgttggaacagatatatatgagaagcttataaagggctatacaatgaagcagtggggaagaccttgcacagaacttcctgcatttattataaaaagacttccagttagatttacatttgataataattattttaatgcactttatcagggtattccaataggtggatatacaagaatggttgaaaatatgcttgatggaatagaggtaagactgtccacagattatcttaaacaaaaagaagagctggataagcttgcatcaaatgttgtgtatacaggaccgatagatgaatattttggctataaacttgggacacttgagtacagaagtgtacgttttgaaacagaagtgctggatatgcctaactaccagggcaatgcagcggttaattatactgatgaaaagagtccttatacaagaataatagaacacaaatggtttgagttcggtaaggatgagaatggaaatgagctgcctaaaacagttataagcagggagtacagttctgaatggaagccgggggatgacccttattatcctgtcaatgatgagaagaacagtttgctttatgctgaatataagaagcttgcagaagaactggatggagttatatttggcggaagacttggcgaatataagtattatgatatggatgctgttgtggcagcggcacttgataaggcagaagaacgtctgtaaaagaatagtaagacagaatatatgttgacaatggttttgtatgtatttatgaataattattatatctttacataaactataatcctagattataaatgcagctatgtataaaagcatatgcagcagattggagaaggtttatgacagcaaataaaggaattaattggaaaaggctgatactggcgttggttgtgagtctgggagcaggtgttatatcctggcttcttactgggaattcaatggagatgtataaaaatcttcataagcccatactctcgccaccaggtcagctttttcctgttgtatggacaatactttttgtacttatggggatagcctcatatatagtgtgtgaaacaagggatgatgaaagggcagaagctcttgtattatatggagtacagctttttgtgaatataggctggtctgtaatattttttaagtttaaagcattatggctggcttttatatggctgatgcttttgtgggtgcttataatatttacaatatggcgtttctttcatgttaacagggccgcagcatggcttatggttccatatctgttatgggtcacatttgccgcatatcttaacgttacaattgcaataattaattaaacactaattgaaaagtgtaagtgcatgtgctaaaatatgttaattgtagactagaggtgtatatggtgaatattgtgtcattatatacagaatacgaaaaagaggaatgaaaagtgaataaggcaaaagaactattaaacaaactaaaagaattcgtttcacttcataaggttgtctgcctgtcagcagcaggggcggtatgtgcagtggctgttacaggtatcgttgttgcagtagtgcttggaaatcactcaaaggctgatacagtggctggtgtagaaacggcacaggaagaaactatgcagactatagttatggctacagttgaagaagttacagaggaaactacagcacagactgaggcggaagaggaaacagaaacagatgtgatagaaacagattcatcacttgagtttgaatatgatggtaagaaaatagtcataagcgcggataagccggttgagcttataccagaagaggaccttgcagataagattatagaagatgattcaacaactgaaataggagctgatgtagatgttgatgaaccagattctggtaacagtaaggtaaatgaaacagaaaagaattatgatattatagttgataatgttgataaaacagttacagaaggtgaggaatatgcaccacttgcaggtgtaaggattgatgatctttataattcatcagcacctattggatttactataacagatgaagcgggtaatgtggttgcttcgatgacaggtgatgaggttaagaattatggtggtaatcctgaggatataaaggttacacttgagaatgcaggaaactacaaggttcattatgaatatacagcaccaggcatgacagtaacagaaacagttcatggaattgatgtatcacactatcaggaggatattgactggggtgctgtagcagatgcaggttacagatttgccatgattaaggtggctggaagatctataaaagaagatggtaatctgtatgaggatggttatttcagatacaatatagagcaggcaacagcccatggtatccaggtaggagtatatttcttctcacaggcattaagtgtccaggaagcatatgaggaggcttcatatatccttaatcttataaagggctataacataacatatcctgtagccttcgactgggagacatcaggcggctacagaacatgtgacagacttaacaaagatgaacttacaagcatatgtgaggcgttctgcgatacagtaaagagtcatggatatcagcctatgatatatatgagtaagaatgactgggtaaataaggttcacacaaacagacttacatcaaagtataatgtatggcttgcctggtatttctataagtattataatgtgaatgataattatagatatgagaaagatttttatgaagatggcgatgaagtaccagatcttaactttggatataatatatggcagtatacaagtacagcaacaagtgttccaggaataaacggagcatgtgatatgaatgttgcatttgctacaacatataagtcgggtgacactaaaacgaaggatataacaatcagggttgaaaagaaaaaaggagagcctgaaactactgcaccagacaaggacaatacaacagaaacaacaactggtacaacaacaggtactacaacaggaacaacaggtgcagcagaaacgtcaggaacaacagctgctaacaatgcagaaacagcagctcctgtacagtaaactgctaaacaggtttctgtggtaacataaaatataagtaattaataataaaagctgattcttaaaaacgatggttaaagattcagcttttattttatgtttgttagaaggtttcgcaggaaattcaaaaagagttaacatattgttaacaattaataagcctgacaatgatataatcagctgtaatgctttgtaatgaatataaaactaacaaataaaggaaacgaggcgtggtatgaaaaagttatggccacacattagatgcgtaatatttatatgtgtgcttgcggcagttatatgtgtatgtgactatctgtttgcagaaagtggatatataaggttcatatttaaccaggttaaagctgaaaatgcaggaacggataatggatatgatacaataattcttggagcatcccatacaagatgcagtatagatacaagcagtatagacgaaaagctgggagtgaattcatttaatatgggtattcctggtgaaacggttgatgatatgtattatgttttaaagtctgtatgcaaggataataaagtaaaaaaaatagttgtagatgttgattattattactggatgaatggacaatcgcagaatcatttctcaaggtcatttatatatcagcagataaaggatccacagattaaagcagaatatctgtggaagaacaagtcttatctggacataagaaatgtattttcaagaaggcttacatggaaatgcactttgaataaggcaaagaccaatattgagttaaagaaaacggaagaatataaaaactatgatatgtcagcaggacttgataaggatggatattttgctacagcaggtggaccttatatgggaaagggcttctgctatagatacaggataaatgaagttccgggaaatcctgaatatacacagacaatgaaaagaaatgccaataaggagcttgataagacagttatagcacagtttgagcagcttgttgagtattgtaaggaaaatgacatacagatagtatgtgtagaatcgcctataacaccagatgcattcagggatgcagaggttgataaggcagttacgaagcttaaagcactctttgacagctatggaatagcctattatgattttaataaggcacttatgtcagtacttccaagagatgattcagcatatgtggatgcagagggacatatgtatggagagcttgcagaaagctattcggagcttctttcggaggttctttacgaggatgcacagggaacgctggatgagagcagatatttttatgattcatatgagagtatgtataactctatggtacaggattatgaggaggccacaggacttgaatggaagtcatattagattggtgtcctatgatataaagaatggagagcagtatgtcttttacaacatttgaattctttctgtttgcgcttatggcgctggttgtatattatatcataccacaaaaggtacgctgggtatggctgcttatattaagctatatgtattatttttcatatcatgttacaacagtatggatgatgatactgactacagctgttacatatgcaggtggaatattacttggaaagcttaatagtgaaaagccggataaggatgcagacagagagacaaagaaagcatttaaaaaggatataactaacaaaaaaaagaaagtcgtgctaggtgtgattcttctttctttcggagtgcttgcagtatgtaagtacactaactttatgataggtaatatcaacgggatattatctgcttttggaagtaggggaagattaagtgttcttaagcttacacttccacttggtatatcattttatacattccagtcagtaagttatgttgttgatgtatacaggggaaagcatgagccacagaagaatttctttaaatatgcgttgtttgtatcgtttttccctcagcttcttcagggacctatcggccgatatgaaaggcttggtgaacagctgtatgagggacatgcctacgaccttaaaaatatacagtttggtttacagagaatactatggggcatgcttaagaagatggtgcttgctgacagggtaaatgcagcagtaacgcttatatttaacaactactggaattatgggggctggattaacgtttttggtgtgattctttacagtatccagctgtatgcagatttctcaggtggtattgatattacaattggtattgcacagatgtttggcatcaccatggatgagaatttcagacagccatatttttcgcgttctataggtgaattctggagaagatggcatataacacttggtacgtggatgaaggattatatattctatccattttccttatcaaaatgtatgaataagttcggcaaatggtgtaagaaaacatttggaaataatgttggaaagcttctgccagtaagtcttgccaatctgcttgtgttttttatagtgggtatatggcatggagccgcgtggaaatatataatgtatggcatgtacaatggtgttatcatagcagcaagcggcatgcttgcaccagtgtatgcaaggatacacgagagcttacacattaatcctaaaagctggtggtaccaggtgttctgtatcataagaacatttatacttgttaatataggtttttactttgatatggcgccggatcttcatgcagctaatgtcatgctttcagatacagtgactaaagcacatttgtcacagatatccatggcaacagttaaggcagttggccttacagcacaggatcttattatagttgcagctggctgtataataatatttgttgtaagtgttcttaaggaaaagggcattaaaataagagagacggtagcatcaaggaacattgtactcaggtggttcatatatatagtatttataatgtttatacttatatatggaagcacaagtactacctcagattttatatatgctaatttctagctatgatatcatcttatcgtcggattcatagatatcagttattaagctgtggctatgtgggaaggttttctgcatggtcgcggcttttaatatttcatggtgggattagtgatatttcccgatggtgttagtgatagtgacaattatgtaacaaggtgttataataacgggatagtaagtaaaaagtaagttatgagttttattatattaaaatagggagatatgtatgaataataaacaggataaagaacttgttcagcttatacaggatgttgtagatggtaaggtgcagaaaaaggagttgtgcaataagatatataaagaagtatatgcactctcatatccagtatataaggatgaagcaaagagtacaacacaggctaaaaaagctcttattcaggtatgcagtaagataaatggtatagatctgacgaaaaatattcataaacagattgcagttatcgtatcaacatatttttttgtaaatgcagtagatgagaattcaaaggaattaagtgaaaaaacagatattaaagaatataagttctcaaaaatacgtgaagatgaagagctccttatgtatatgaagaaaaaggcaaatgcattcagaagtccttcggtgtttgatgaggaggatgaaaagttaaaatctttagattctgtacagatggcacttgtagagttatatgcatatgagatgcagtcggtagatgctattgagagaatgacagatgttgacagctcatatattggaagctggatagcacagattaagtttatactgtcaggagaggcagttgctttagaaaacacagctgatgaagctaaggcagctgttgcgaatgataatatttcagatgagatatatgaagatgcatatgaaaattcagacgatgataaagaacagtatgatgaatcggatgatgagtcagaagaatacagcaatgaatatgatgagcaggaggctgtaagctctgtataccagaagaggaacagacaacatgaaaatgctgttaccctatttataagaagattgttcccagcactttcattgcctgccagaatggcaatgtcatggattgcaggatgtatagttgttattgcacttgtttctgtattgtttgtatctgttatagctggaaagaataataagaaaaaagttaataaagattatgattaccgtgacatgcagtattatacaacaaaacagccaacaacaaagcagacaggcacaacagctggcagcactactgctggacagacagaagaaggaaatacgacagaaaacaatactgcacaaactgaaagaagagagaatacacgggaagaaacagagagagagactacaagaaataacgaagaatcaagggagcagcaggaagaaagctctgtagaagaacagtcaacagaagaaccaacagaagggccaacagaggaaccaacagaaggaccaacagaagggccaacagagggaccaacagagggacaaacagaacagtcaacaacagcggaacagactacagaagagaaaacaactacagaaaaaaagacaacctctgattcagacgatgataaacaagacagaccaatttcaaacgaaaatagtgataataattaattagtatattttgggagggacatttatatgaagtgtgttatcctggcaggcggcagtggcgatagtttatggccattgtccagaaaaaattatcctaagcagtttatgaattttaaagaaggacgttcattgcttcaggaaacggttgtgagaaatatgccatattgtgatgaatttataatagtaactaatgaggcatataaaaatatagtaaatggacagatgaaggcattccagagtctaaggtacagactgattcttgagggaacagcaaaaggaacagcagcagcgattatacttggaactatgtttgctaatcctacagaattcgtgcttatagttaattcagataattttatagatggagaaggctataaggatgccataataagtgcaaaggatatggcaaagtcaggtgtaatagcagtaattggtgtgaaacctgaataccaggcaaagaatctcggatatatattaagggataactgtgatgtgtgcaggctcatacctcatgttgattttgatagctgttcatcagaaatatctgattgttactcttatgatgagggatatctgtggaacagcggaatgcttgtatttcgagctggagatatgataaatatcgtaagaaaagagcagcctgagctttatggagcatgcagaacagccaaaagaaaggttccagcaataagaagggcaatccgtttttcagagaatattatgaaggatattcctggtggaagcatagaatcactggtgcttaaggattgtgataagcttaaggttgttgaagctgatataacatggaaagatatagacaacgtatgtgatatagaacaacagcatgcagagggtaagcttgattatataattaagaatgactgcagtaacgtatcggttattaacaacgcacaaagaaagcttgtagtagctaatgaccttagagatatggttgttgttaatacagaggatgcagtgtatatatcatcccagaagtctgctgataatataaaagaaatagtaaaagataatatgaatcagtatgagacatattttgattataacagaatatcatacagggaatggggtattcatgagcttcttaactattcaaagggctataaggtcaagaaggtaacggtatttccaggtatgatgatgaatctgcaccagcatgagttaagagcagaatactggtctgtagttgaaggaactgcgactataacgctgggaactgaaacaaaggattatcataaatatgagagtgtctttgtgccagtaggaactaagcacagggtagctaacaaaacagataagaatgtagttatcatagaggtaggaataggtgattccatactcgaaaatgatcttgtaaagatatatggatatgaaacaggtaataatgagggtaactacgtaagatcagatagcagtcctatagtaaagttagatccagccttcaaggataacctgtggggtggaacaaagataagagatgtctttggaaagaaatgtgactatgatgttataggcgagagctgggagctttctgcacatccagatggtcagagccgtatagcagatggctattataagggcatgctttttaatgattatctgactattataggaaaagaggcacttggatggaaatgccaggcgcaggacagatttcctgttcttatcaagtttatagatgcaaagcaggcactttctatacagattcatccagatgatgaatatgcgcttgagaatgaaaatgaatatggaaagaatgagatgtggtatgtgcttgatgccgaaccaggtgcatatctgtattgtggactgtcaagggattcatcaagggaagagatagaagaacgtataaaaaacaacacaataacagaaattcttaacaggattgatgtcaaaaagggcgatgttgttatggttaaggctggaacaatacatgccataggtgctggtatattcatatgtgaaatacagcagaattctaactgcacatatcgaatgtatgattatgacagaagagataagtttggtaatccacgtgagcttcacgttgccaagtcacttgatgttgtgaatcctgttaagtatgtaagagataacaaatgcaatgtaatgcttacacataatgaacattatatggcaaaaagacttgtacaatgtaagtactttgaggtaattaaatacgaggttgaggacgaggcgaaaataccagttgatgaggcatcctttgtatcagttatagtagttgagggagaaggaactattatgacagatgattatgataaggagatgaagtttaaggctggtgagagcttctttataagtgcaggcaagagaaatatcatagtaaatggtaagtctacctgtatagtaacacacgtataaacatgaatggagatatatatgaataacagttctgataataaaggaaaaaagatactgggttatctgtttccgggattgataacactacttgttatgttaatagttcttgtggctaagggtatatggccctttggaagcagcagaatagacctttttgataatatgcagcaggtggcacctttgtatgcacatctgtgggatgccatgcatggtgatgccagtatatggtttgactggtatacaggacttggaacgaatgtgtctatgagtatgtcagcattctctatgataagcccattcaatctgtttttatatctttgtccaagagattatatacttgaatttatatcagtgcttactgttataaaaacatttgtcatgtcagttacaatgtatgcttttattaataaaagatataactcactgtcatataacataaaggcgttgtttgcagtagcatatgctttctgcggatatgttttgctgtatgcatcatgcttcacaccatggatggatatagttgcactgtttccacttcttatgatggcacttgatattatggaaaagacaggaaagaagcttttttatatcatcatggtagcagttatgttcataatcaattattatcttgctgctatgtcacttgtatatattcttcttgttggcggtatgtatcttatattcatgtgtgataagaaggaaagatgcaagaaggcgtggaatgtaggcattggcacattcacaggaattgctctttcagcatttatgcttataccagtatttgcacagctttcacagtcacaaagaaccggtaatacagagtcgcttgtaagccagtatttttcatggatatctaatcctaccttcagaagcttcagcctcggtgagtttgagagaataatgatgttttatggcatgggattattcttcgtgataatatttacaggaatccacagaagcatgaaagcagtgggatataagaatgatgaagctgcaagaagatttaactggtatgccatatcgcttatagctatcgttatggtacaggcaatagcggaaggtactaacattatgtggcatttcggctcatataatggttatacattaagaaatggttatattattgcatttacacttatatgtctttcctgtgcatatgcagataaggtgctggtaaatgactgtattaagaaaaagaaggctgttatacaggcagtggtaactgttattatatgtgcatttatggcagtgatatatgataaacttccagtgaattcatatgtagcagcatttgtattctttattgcggtatttgcagttatgcttgtaatacacattataggtgtaacagttatgaagaatggttataaggtaagtattgtcataagtcttgtgacagttgaagtgttcataggagcatttgccatgacaggaccacctaagttttacacatatgcgccatatcagtatggtgactatgtgcagcttgcagttaatgcaacgaataatcttggtataagctcatcacctgtagacagagtgacgaatcctgatttaagtatgaatgcaaactatccgcttgttatgaagagaggttcactttcaagctttacagcagcacttcagaagaatacacaaaaagaaactgtaagatggggacattcaaagtattttctctgggcacttgattcaggcggaacagtattttcagatgcacttatacacgtaacagaagcggttaatattaataagttagacagttcattgtatacattggagaaggaaggaacagaagataacgaatatgacctgtacaaggctaattatcagcttccttttgcgatggttacaagcagcaggttagcatcaatagattttagcaaagattttacaaagctctcagaagtgagccagcgaaacagcacagaatccggatataactggaacacaacagccagggactggatatatcttcataatcttatgtacagtgccttaagtggtgattcagataagcttgtaacagagtatggaaagctttcaggtacaggaacatacgaggtaagtgcagcacagacagcagatataaataaagcctctgataatacaacaccagataagtcaacacagacaacgcatgttgtacagacctataaggataagataagtggaaaagcagcagtgtatatgagtgttgcagattgtaatataggaacatcggatgctaatgtttctaatctgttcagaagccttacaataaaagttaatggaaagcagatagatataccaactataggtaatgtaagtaataagtattatgcaactgattataataatggacttatatatattggcacttttgaaaatgaggatgttaccgttgaacttgattatgcaagaccacttgataataatggtgaggtgtcagttggaaactacatatttactatgggtggtattgaccttgataaacttgattctttatgtaagaagtatgagaataggcagagtgaggttacatacacaaacaattcggttactgtaaaggttaatggaagcagcacggatgattatgttatggttcctataataaagagtgataactggacagtgacagtgaatggtgaaaaacgcgaaactaaagatattgcaggaatgtttacaggagtttctgttaatagtggcgaaaatgagatagtatttacatttaagccggttgctaaggataaaggattgctcatatctgttcttgtacttatagctatgattgccattatggttgttgatcattataagaatataagaataccgggatggatgcaggcatgtgcaagtggtgtgtatatggctattatagtagtacttgcagtgcttatgtttgcaatacctcttgttgcaagtataatagttaatataagatacgtattggggatataaatgttttcagtatttatagagcactataagaataatgaaaagctcagactttttactaaaataatagttgtttggttgttatcacgccttgtaatgtgggctatggttccagtcatgaatcttgtggcagatacaccacataatctgttgtattatatgaatccatgggatgcagaatggtataaggagctggcggaggaaggatataagcttccaaggtcttcaggcatggctaactgggctttttttccgctgtatcctatggtgtgtgccctgattaggattattacaggtggatatataaacacatatgctattggcatgctggtgtctaacatatgcataataattgcagtatattatgctgttagattcgcatggctggagcttgatacagataagtatgacagagtggatatagaaaatataatcatatttctgatgtttgcaggaccatgtgcagtatattatggttcaatgtatacagaaagcctgtttactatgtgtgttgtgctgtgtttctataacacaaagaaaaaaaactatatgatggcaggagtgtctgcagcatttgcaagtgcaaccagaatagtaggctgtacattgatagttgtgttacttacagatatgtatgtttctatgtataagcagcatagagatgaggaaagaaggattgtggcagctataaaagcatttataaaagatgttatatctgatgcaggaaagctgttggcacttgctatatgtcctttgggaatatttgtttatatgacatttttaagaggcttttgtggagatgcatgggctttttatcatgtgcagaaggcgtggaggacgcagaagctgtttcctgttatcggagtacttattaaatcatgtactggcaggcttggagagatgtcagatgttaagcagataaacggaattatacttggctggctgtgtgtttttacattgttgttgtatgtgatcatgctggtaaggaaacattatgcttgtggtatatttggcataattgcacttatgataccgcttacttcaagtgtcatgagtacattaagattcatagtcggttcatttgttgtatatatagggattacagaagccctgcttttaacaggcagaaatacaaggcgtgttattatggtacttcttgcagctgcagaggttatatgtatatcggcatggtatttctgggatggactgcttatgtaacgttaaagctgaatagtgatgtacaaaaacacgcattgtgtatactttgtgaaaatacttgcgaactttacataaaggtattataattaacacgctttttagaattactattattgtataaagtaatcatgtataagatgaatgtgactgcacattactttgcagatgaataagctacagaatgttatagatatcagaaggagaaaaatatgttatcagtagttgtacctacatttaatgagggaaagaatattagaaatctggtgacacagataaatgatgcacttaaggggatagattacgaaatattgtttgtagatgatagtaaagataatacaccagaggttattatggaggttgccaaagacttcccacaggtaaggatggaacacagaacaggagaaactggtcttgcgacagctgttcttcgcggctttgagcttgcaaatggtgattatatggcttgtatggacgctgatttacagcatccaccggttgtacttaaatatatgtataaggctatggaaagtggagcagatttttgtataccaagccgtcttataccaggtggagatgatggtggacttaactggtacagaaagttcgtatctggaacagctcgaaagataggacagtggatgcttccttgtttaagacagatatctgaccctacaagtggtctttttatgttcaggcgtgaagttatagcacatgcagaccttcagcctataggatggaagattatggttgaagtccttgctatgggttcatataagaaggttattgagataccttataagttccagcaaagaacagagggcgaatcaaagctttcaggcaaggttacgttagaataccttaagcagcttaaggatcttagaaagagatacaacaaggctaacaagtatgaagttgaaatctggtcaacagagaggatgatggcagaataatgggaaagtattttggcactgatggatttcgtggagaagctaatgttacacttacagtagatcatgcatttaaggttggaagattccttggatggttttatggtaaggaaaaggaagatggaaaagctaagattgttattggtaaggatacaagaagaagcagctatatgtttgagtattctcttgttgcaggacttacagcatcaggagcagacgtttatcttctgcatgtaacaacaacaccaagtgttgcctatgtaacaagaacagaggattttgattgcggtattatgatatcagcaagccacaatcctttctatgacaatggtattaaactcatcaacagcaaaggcgaaaagatgagagaagatgttataggcgaaatagaaaagtatcttgatggtgagatgggagatatcccatatgccacaaaggaacagataggctgtacggtagatcatacagcaggacgtaacagatatatgggatatcttatgagtcttgccatatattcctttaagggaatgcgtataggtcttgatgcatctaacggaagtgcatggacactggctaaagctgtgtttgatgcacttggagccaagacttatgttatcaatgcaagccctgatggaactaacatcaatgctaactgtggttctacacatattgaaggcttatgtgatcttgtaaagagagagcatcttgatgcaggctttgcttttgatggtgatgttgacagatgtctttgtgtagatgagaatggtgatgttataacaggagaccatatcctttatatatatggatgttatatgaaggagagaggaaagcttatagataatactgttgtaacaacagttatgtcgaactttggtctttataaggctttcgatgctgcaggtattgattatgaaaagactaaggttggagataagtatgtatatgagtgtatgtcacagaatggataccgtcttggtggtgaacagtctggacatatcatattcagcaagtatgcaacaacaggtgatggtatcataacagcacttaagatgatggaggttatgatagcaaagaaaaagtcattagcacagcttgcagcaccacttcacatatatccacaggtgcttaagaatgtacgtgtatatgataagcctacagcacagaacgatgaggatgttaaggcagcagtagacagagtggcagacacacttggtgagaatggacgtatacttgtaagagagagtggtacagagcctgttataagagttatggttgaggccggaacccatgatgagtgtgaaaagtatgttgatcaggttatagacgttattaagagtaaaggctatgtagctgactgattattgaagctataaaaatattaataaatataagcataaaggaatctccttgttaataagatattattagtcttattaacaaggggatttttttatgtctcgattatgtggatataatactaaggatgcaaagcaatctgtggataagtatacatcaaaagaatatttctgtgctttaaaaggatacatatacatattacctgcaatattatgcatcatagttttaagcatcatgactatgactggctgcagtaagaatgagtcaaaagagcatgaggtgattgattatacagtagtagagaatgaagatcttccggcagagctaaagaagcttatagataacaaaaaaacaaatacattaagaatgacatatacaacgaaagattatacatatgttgttgcaggttttggaaccaaggaaacatcaggatatagcattaaggtaaatgatgtctataagagtggtaacgctatatatgctgattttacacttatgggacctgcggaaaatgagcctgttaatgaagtgccaacaactccatacatagtattaaaatatgaaaaaagggatgagacagtggtgtttaggatgtagcatgacatatatattcagattttctatgatagatacggctgcctgtaatgtgaataagtaagattatggattaataaggaatacaagggataatcaaggcatagaatgatagtagaatcgagtggatccgctttaataaagcagttcactgtcagcaaacattgatatcaggaggtatatgagttggagcttaaatatgacaatattcatgaatatactataaaatgctctaatacaacgcagataacactggatgatgattataatgtaccagacagtaagacggatatagacagtataataaaggattttggattggttgtgactgatggcgtaagggttaatcaggataaagcacaggtggagggtaatctgaaatatgccgtgctatatataggtaaaggacaggagggaggcagacttataccggtaagactggatggaagtctgcattttgtggagaatgtgaatctgtcatgtgatgcagccgatacagatgtgacatgtaaagcatacatagaagacctcacaatcaaacctgttaactcaagaaagataagtgttaaagcgatagtaagtatcacagttacctgtgaagagattaaaaatgcaaaagtcgcagcacagatatcagaagatgaaggatgtaagccgcagcttcttttcaaggattatgagtatgcacagatggatgtcaatatgcgtgacaatctaagaattaaggagagtatgtcattgccaaacggaaaaacagatatatcagagcttgtatgggatgatgttgatgtaagaaatgtgagtacgcggatgacagaagatgggttaagcgtaagcggagaactgagtgtatttataatgtatattggaaatgatgctacgggctctgttcaatggtatgagacagcagttccatttacagggataatagatgtgagtggtgccgaccctgacagcatatgttatgtaggctttaatatgacggggaaaaatatcgatgtaaaacctgattatgatgggaataacagggatatagcagtagaacttgtacttgatatggatatccgctcatataaagacagtaaaaagacagcgttgtgggatatatatgttccgttaggaacaatgaataaaaaacagtcagatgtacatcttaagaagcttcttataagaaacaatacaaagtgcagagtttctgataacataaagctggcagattatattaaccttctgcagatagtgaatgcaactgccagagtccagatagatgactatgaatatgttccagagggtatagaagtaacaggcgcagttatggtaaatgtatgttatataacatctgatgataatgcgcctatgggcagtgtgaattctgttataccttacaccggggtcgtagcagttaaggagtatgataaagagaatatagaatatcagataagaccatgcatagaacagcttacagcatctatgggaagtaatgcaaagatagaggtgaaggcagtagtatcactggatgccatatgctttgaaccagtagattttcctaccatagatgagtgtgagtacataccaacagatgaagagtattatgcttcactgccttccatggtaggatatatatctgatggcagatgcagcatgtgggatatagcaaagaaatataatactacctgtgatgcaataagaagtgacaatgagaaggctgaaagattatctgacagtgatgttgtaccatgcggtacaaggctgctgctgataaaagagagcatgcaggagcagaaataaacaataaatataagccagataaaatatgtatgcacataagtaaatgtgtggcatattttatctggctttatcagcttattgtattaagttatattatgcttctgtggaatctgtttttttggaagagaagtacttatcaaacttatccataacagcattgtaagtgttcttagatatatcaggtagttctttaccccatgttttagtagcttccttgaagcctttttctacagctttcttcatagctttcatcttttcttcgtcatcaccagcaagagcctgtgcaaaatcaaagattctatctgatgtctgtttaacaccccagtagccatcctcggatatatcttcctttgctttggcaatagtatcagcatctgctgtgaagttaccactcgcaagcaccttccacatatcatcagcagttcctatagttattccctgcttcttaaacatattagtgacaagtgactgaagctgttgtaagcggttatcagagtcagctttaagctttgctatgagttctggattagcagccttgctttttacagaagatgcagatgttttatcagatacgtttgaagcctcatatgtggcagcaacatctgtattcttagaagctgttgtattgtctatgtctttagcagcagtctttttaccagagactgcctcgtaacctgtgtaataagaattaactccgtttaatcccatattattcctccattctaaccatcattagtgattgtgaattaaattatgtaaataaggtaacagccatccatggcttttgttatatttaatatatcggctggtctggcggaaaattaatagctgcaaatattatatattctcctgatttttcctatatttatttggcgatatacctttggttctgcggaatgcatctccaaaatagttgctgtcgttaaagccacattcaaaagcaattgtggttattgatttattcgtgttaagaagcagttcgcaagcgtgttttattcggacattaataatatattccttaaaaccaaaaccagttacacttttaaattttttagaaagatatgaacggctcaggttgaattgctttgccatgtcttcaagaacaagcttttcgctgtagtggttgtatatataagtggcaacctcctgcataatctggttgtctacatcgatttcttttataacattttcctcatactgtttgcatcttgcgatgaagagtataagctcagccagagccacacttacgaagccgggtgatagaggatcctgaccttcattttcaaatataagcttatcaagaagcttttctatataatcccttcttttttcaggtatagttataacaccagtctgcatgacatcggatacaatatcagttccaacgacgttactcagccagtcagtaacagatgttttaaaacttataacgatacgttcgttgataccttttcctgtataatcagttttatgtatggttccagctgggactatgacaatatcgcccttgctgaacttatatatattatggcttagaaatgccgtacattccccctttgccagatagaacagttcatgaaatggatgggaatgtggttccttcatcttacatgctgaacgtttaatttttttgatttcaaaattcttttgcatatcctgtaacatagtagtcctcatttctgcacataaaatcgaaaacgtacaaataatctgtaatttgcattaaatataaataataattagtagaaattactgctttttatgctaacatatatattagaaaaaataaagagtaaattacgaaataatgagcgcaaaagaaaaggaagcggctgcgaagcaggacgaaaaagcgcgcagcgcgggctcgtgagtgtatgggaaagagaggcagaaaacatggcaagaccaataagtgacagtaaaagagagatgattcttaatggtaatcttgtaagggcaatacttacgctggcaatacctgttatgcttaacagttttatacagtcaatgtataatcttacggataccttctggcttggaaagataggaacaacaagccaggcagcgataacgcttgtttcgccttttcagaatatacttattaatttcggagctggcataacaacagcgggtgcgattcttatatcacaatatcttggtgcaagggaagataaacaggcaaattctatggctaaccatatatgtataacttcacttgggttttctgttgtatgtgcatgtatatgctggttatgttcatcaggtcttgtaagatggcttggagcggaaggtgatatatataattatggacttacatatttaagaatagtagttatggatttaccattcctttttatgattaatctgtattctgcggtaaagcaggcacagggagatactgtaagaccattactgcttaatatacttggtgtttcgattaatctcatacttgatccacttttcttagttgtacttaagtggggtataggtggtgcagcatttgcaacacttatagccaaaattccaagtgcagttataggagtagttgcccttactggaaagaaccagcttgtgcgtattaacttcaggggcttcaggtttgataaaagcaaggttatgtctatattaaagataggtctgcctacagctataggcggaagtacaatgcagtttggtttccttcttatgactaagaatgtcaatgtgtatggagcaactgcgatgacagcatatggcataggtaacaagataaacagtatcataaccatgccggctaatggtatcggttctgccatatcaactatcgttggtcagaatatgggtgctggcaatgtaaaaaggactgataaatcatatcatatagcgcttagaataggggcgatattcctgtttgtatgtggcatgattctttcaagaagcgttattgcagagcctatggtcagattctttacaactgatgagcatgtagtaccacttgcaacagatttcttatcaatcatggcaatgtgctgttggacaaatgcgttttataatgttacacagggactgtttcagggctgtgggcatactatgataactatggcagtagatgcaacacgtatctggatattcagattcctaaccttatgggtatgctcccatgtgcttggaatgggggtagagagcgtgtggtatgcggttgtagtaagtaatgctacatcggctgtaatactatatatactttactggacaggtatctggaagaagtcaaccattaagattgaaaaaactaagaattcagatgttgaagcttcaggtgctgatgttaacgaagcagtttgatatatttatttaatgcttacacgattttatatctttatacattcccgaaactggccaataagttctggttccgggaatttttatacatattatgactggctttaagcagtgcgttaaaaagcaactgtttgcaacaatttacgtataatttggctcattgtacttgctttcatacaatatgttttatataatgatatgagtatgaaaggtgattttgacactaatacttgtataaaactggagataaaagatatggattcaattagacttaaggcgagagccaagattaatctaggtcttgatgtattgggtaaaagggagaatgggtatcatgatgtcagaatggttatgcagactgttggaatatatgacaggcttataatcacaaagattcccgaagatgagataaggattaacattaatcttaagtttcttcctgttaatgaaaacaatctgatatacaaggcttacaagcttatgaaggatgagtatggatttagcggtggtatagatgtagaccttaacaagttcattcctatagcagcaggaatggcaggtggaagtacagatgctgcgtcaacgatgtttgcaattaacagactctttgaacttggtttatccaacgaagagcttatgaaacagggggttaagataggtgcagatgttccatactgcattatgagaggaacagcacttgcagaaggaataggagagaaacttacaaagctttcacctatgccacattgtcatatagtggttgccaagccacctatcaacgtttcaacaaaaatggtgtatgaaagtctagatgcgggggctataacgaagcatccagatatagatgctattattgaagctattaacgaaggagatgttaagaaggtagcagagcgtatggggaatgtgcttgaggatgttacagtgcctatgtatcctgttattgccaagattaaaaacgatatgataagccagggggcgtataatgccatgatgagtggaagcggtcctacagtgtttggcatatttcctgatgagcagacagcacttaaatgcaaagaatacctaaaggcacaggaggatgcaaggcaggtatatataacagaaacattttaagtatagggattgtgtatattagaaaatatatgatgtcatacgaaaaccggaagtttactaatatagagatatacatatggaggattagaagatgaaaggcgaattaaagatggatgttaatgagtaccttccattaagagatgttgttttcaatacattaagacaggctattcttaccggagagatggagcctggtgaaaggcttatggagatacagcttgctaacaagcttggtgtaagccgtacgcctataagagaggctataagaaagcttgagcttgaaggacttgttattatgataccaagaaagggcgcagaggttgcccatataactgttaaagacatgagggatgttcttgaagtacgttcagcacttgaggagcttgcagcaacacttgcatgtaaaaatgttacagcagaatacatagaagagttgaaaacagctaacagggtgtttgaagcggctatagtatcaaaggatgtggtagcgatagtaaatgctgatgtggcatttcataatattatatattcaatgacagataaccagaggcttatacagcttatcaacagtcttagtgagcagatgtacagatatcgtcttgaatatgttaaggatgcaaggacccattctattcttataagtgagcacaacgatatcataaagcagctttcagataaagatgttgagaaggccaaggttatagtaagacagcatgttaataaccaggaaaagggtattataagacttcttaatatttaggtataattgatgcgtatatcataacataaagagtaacgatatcatatgaatcagtcagattgtatggtatcgttatttttatggtattgctatttttatggaaattgtaagagcttaggtatagatctccattatatgggaattatgtatgtgtgagtaacattaatgttaaacgtaaggcagcttataagctgctattattgttaaaagcttatttagtacataaatattatggagggaataatgaatagtggaaaatctggaggatatgggaaaaagcatattaataaaaaatgtgataaaaacaataaggctggctgggtatttatcttagccgcgacaattatgcttgtaattgcaggtggcaggttgtatagtgacagtgaggaaagacagcttcagaagggaattgcttctaatattatcaggtttcatgtaagggcagaaagtgattcaaaagaagaccagtggcttaaactgcaggtcaaagaggcagtgctggcttatataagtccggttctttcaaagtcacagtcagttgatgagtccagacagctgctttataacgaaagtgagaatataaggaatgttgcagctgcaacacttaggagtcttggagatgaaagtgatgttaacgtgtattttgagaactgttattttcctatgaaaacatatggagacatgacatttccacccggagaatatgaggctttcagggtagatataggagaggcacagggtaaaaactggtggtgtgtcttatatccacctttatgttttgttgatgctgtatatggtgaggttccagaggagtcaaaggaagaacttaaaggagtgctcacagaggaagaatacagtatggtatcaggggaaaatgtgaagtttagatttaagtatcttaagatatttaacagatttatagagtgattattgagtaattattgagtgatattgagtgatttattaagtgattaatatagtggttaaaaagctgtgcagattccggcagatgaaaaatacaaataaaaatggagtaaggaatatatgaaagataaggtgtatattaagttaaaagggcttgcgttagaagaacaggcagcagatggaagcattaaagaagaggctgataatatagaagtcataaatgtaggcagatatacaaagcgtggcggtaaggaatatataaagtttgaagaagtctatgatggtgcagaccagaagtcagtaagtcttataaaaatatcagatgactgtgttgaagtaagcagaaagggtgctatcacaacatgtatggaattcgtaaaaaacaagaaaacggtcagctgttataatactccttatggaagtattaatatctctatatttacaagtgtcctcatgatagaaaggcaggaggatgcaatacatattttacttgagtataccatggaggttaatgaccagcagatgaataccaacagggtagagatagagattactgacgaaagagtagagttgtacgaagcgtagaataataaaagagaatagttgcatgaaaatgtcaatcagaatataatagatgaaatgatggtcagtgcaaaacatgcgcaggaatggagattaatatgaagtcaacattaagaagaacatgggcagagatagatcttgatgctcttgctcataattataagacattacgaaaaagaataggtgataatgttaagtttttaggggtagtaaaggcagatgcatatggacatggttcagtacaggtaagccggcttcttgaagagcttggtgcagattatcttgcagtgagcagtatagatgaggctatagagttaagacacaacggtataacaatgccaatacttattcttggacatacacctaaggaggaggttggtgaacttataaagaataatataacacaggcagttacatgtaaggctaaagcacttgaatacagtgaagaagcagttaagtgcggtggtatattaaagatacacataaaggttgatacaggtatgtcaaggcttggctatctgtgtgatggcgaatactttgacagtggtgttgagggaatatgtgaggggtgcttacttccaggacttatgcctgaaggaatatttacgcattttgctgtgtcagatgagcctggtgatgaatgtaaggcatatacaaaacatcagtttgaattgtttacaagtgtaatagatgcggttgaaaagaagctgggaagaaagtttgcgataaggcactgtgctaatacaggggcagttgcaagatatccggaaacatggctggatatggtaagaccgggtcttttgctgtatggatatggtgaatttgcaaatgagctcgaccttaagccagtgatgtcccttaagacaacagtaagcactataaagacgtatccacaaggaacagccataagctatggtggaatatataagacagataagaaaacaagaataggcgttgttccttatggatatgctgatggcttctttagatgtctttctaacagatatgagcttatgacaagtgaaggactggcaccacaaagaggcaaaatatgcatggatatgtgcatgatagatttaacagataagacaggagtagatgtcggaagcgaggttgagattttcggtaaaaagaatcctatcgagaagatggcaaagatggctggaactattccttatgagctgacatgtgctgtaagtaagagagtgccaagaaaatatataaaaaatggtgaagtagtggaacaggaattgatgctgcgtggttaatagcatgaaaaatagatttctgcactaaaatcatgatttgtatgcagcagttgattataattaagaatacatacaggagagttatttatgaaacggatagcggcgttgatgcttgtttttattatgcttgtcatgactgggtgcagtggtacaggtaagaatataagatttggtgcggcagatataggtggagtgtattattcgtatgcgaatacattttcacagcttgcacatgatgatatgagtgattattcatttgaaactaaggctacagcaggatcagtagcgaatctcaggcttttatccggaggctatatagatcttggaatagtccaggctgatatgttaagtgatgcatataatggtaaagggacttttaaggacggagattataagaagggttataaagccgtggcagcattgtatacagaagtctgccagataatagtaagaagtgcttcaggtatcgaaacgattgatgaccttgtgggtaaaactgtaagtataggtgcggcagagtccggaacagagaagaatgcagaagagatacttaaagtaagcggtattacagatgagcttgtaaaggcagttaacatggattattcagaagctgtggataagctgatagcaggcgaaatagatgctatgtttattacatcaggaataagaacaggcattatagagcagctttctaagaaatgttctatagatgtcataagtattgatgagaaatgtatagagaaaatgttaaccgcatatcctttgtatgagagatatacaataccagctgatacatatacaggacaaagtgagcctgttaatacaattggtgtgagggcagtgcttgtggcatcagctaacctgtcagcaggagtaacggaacagattacaaaccttatattctcacatagcatagatattaagaatgctacatctcttgattctttatttgatgtgaaagcagcagcaggtggtatagatattccttttcatgccggagcggcggcgtattataaaaaacagggtgtgagtgtcagaacagaatgacagaataacagcctgcagcagatatttttaatacgttaaatgaaatggagagatatatgaagattcagttagatatgtatcagacgatggcagttgctgttgctgtcctgatgcttggaagttatttacgaaagaagatagatatacttgagagattttgtattccagctcctgtagttggtggatttctgtttgctatatttacatgtatatgttacgcaacaggtattcttgaatttgagtttgatgatatattaaaggaagtgtgtatggtattcttctttacgtctgtaggatttcaggcgaatcttaaggtgctaaagaagggtggaaagtctttgatagtatttcttgggcttgtgatcgtgcttatatttacgcagaattttgtggcagtaggactttcaaaattattaggtctcaactcacttataggaatgtgtacaggttccatacctatggtaggtgggcatggtacagcaggtgcatttggtcctgtacttgaagattttaatgtacagggggctacaactatatgtacagcagcggcaactttcggacttatattcggaagtattataggtggacctttaggcaagaggcttatagagaagaaggatcttttaaaaacagctattccagaggatgatagtctgttagttgaggatgagaagaagcatgagcgtcatacacagatgtatgcggcagcggtattccagcttattatagcgataggaataggtacagtattttcatgggcacttacacagacaggaatgacatttcctatatatatcggagctatgatagcagcagcacttatgagaaatattgcagaatatgcagaaaacgataagtttgttatacatatgggggagataaacgacctcggtggtatagcgctttcgctttttcttggaatggctatgatcacacttaagctgtggcagcttgcatcacttgcacttccacttgtcatacttcttgtggcacaggtagtgttaataatactttatacatattttgtagtatttaatgttatgggaagcgattatgatgctgcggtgcttgttgctggtacatgtggcttcggtatgggtgcaacaccaaatgccatggccaatatgcaggccttatgtgataaatatgttccatcagttaaggcgtatcttatcatcccattaataggaagtcttttcgcagatttccttaacagtcttgttattacgttgtttattaatttactataaatgtaaaagttaaaacagttaaactgtgggtattggctgatagtcatagctgttttaaatcagggggaacgatatgtttaattttattaaaaaaatcaggaataaagataacactcctaaaaaaggttacaatctttcatatgataatctggcgattccagagattcatataaatggtcaggatgatgaaagccctgatatggcagtgacaaaagaaacagaacaggacacagaaggcgtggataaaaagaaaacacatgtcacatatgaaggagtagcagttccagaaatacattttaagagtaaagaataatggctctttttaaaaaatatgttgttaattgaacaatcacgtggtacaataacaaccagtaaagcaaataaataaaagctatgacggaaagagtagtgtatgtggagcatacagagagagctgcatatggtggaagcagtttatgtgactattacatgaaaaccattcctgagctgtgcgtaaaagaggctgaaggaggctttaagctgctgtatgcttcgaagcgttaccgtatggtgtacgttacagaccatgaaagtgaaataataaggtggaaccgtgtgaaagcacccttaggcaggcgaaagtgtacctacctatgggtgctttcgttgtaataacagccagatgaagttgttataacaatatatttaatattaaaacaactgtataagtatgctgttataggaatgctggcagaatagggaaagaatttaagaaatgatttattagaaggagaaaaacaatggttaattttaaagaagatgaacagttaaaaacattaaatcattcatgtgcacatcttatggcacaggcaataaagcatctttatccacaggctaagttctgggttggaccagtagttgcagaaggcttttactatgatgtagatcttggtgatgatgttataagagatgaggatattcctaagattgaaaaggaaatgaagaaggttgcaaagtctggcaagaagattatccgtaaggaaatctctaaagaagaggctatggagatgttcaaggatgatgagtataagttagaccttatctctaatcttgaagatggaacaatctcatgttatgagcagggtgactttacagacctatgtcgtggacctcacgtagataatgttaagttatgccgtaactttaagctgcttagacattcaggtgcatactggaagggtgacagcaataataaggttcttcaaagaatctatggcgtgtgtttcccaacaccagaggagcttgaagcacacattcaggagcttgaagaagctaaggaaagagatcacagaaagattggcaaagatatgcagcttttcatggttgatgacttagtcggacgtggacttcctatgtatcttccaaagggatatgttatatggcaggagcttgagaattatataaagaataaagaaagaaagcttggctaccagcatgttcttacaccttgtgttggaacagtagatctttataagacatcaggtcactgggatcactataaagaaaacatgttcccagcgatgcaggttgatgatgaaagctttgtgctaagaccaatgaactgtcctcaccatatgatgatatatgctaacagacttcattcatataaggatcttcctataagaatcggtgagatagcacatgatttcagatatgaatcaagtggtacattaaagggtatcgagagaggaagacatttctgtcagaatgatgcccatcttttcgtaacaccagagcagattaaggatgaaatatcaagtgtagttgatcttatattcagcacatacaaggattttggaattactaactatcgttgtgtactttcacttcgtgatccagaaaacaagacaaagtaccatgatgatgatgaaatgtggaacaaggcagagaatgcattaagagatgttatgaacagccttggaattgaatatacagaagaaataggtgaggcagcattctatggacctaagcttgatgttaatgtaaagccagctgtaggtaacgagattacactttcaacatgccagttagacttctgtcttccagccaagtttaatctttcatatgtagacaaggatggtgagaagaagacacctgttgtgcttcacagagctatacttggttctcttgacagatttatggcatatatacttgaggaaacaaagggtaaccttccaacatggcttgcaccagtacaggtaagagtaatgcctgttaagacagacaatgaagaaatcatgaattatgcacacgaaatagtagatgcactttctgcaaaggatgtaagagtagaacttgatgacagagcagaaaagcttggatatcgtatgcgtgagggacagatccagaaggttccatatcttcttgttattggctttaacgaacaggaaaacaagacagtatcatatagacttcatggtgagcaggatacaacaacacttccacttgatgagtttgttgaaaagatatatacagagataaagaataagacaagataattgttgtttaattgaatattagttggtgacgaacggacgacaaatataagctacaggcagtcctgcacactatgttcaatgccagaagcttcaatcggcttactctaagacttttcatataggtagttataggtgacgctaccattcggacgcgccgtccatggcgcggcctcattgcttcgtacatccatgtacgaagctagctgagaacgaaggaaaagtctaagattcagcacgattgaacttcaagtgcatttcacatagtatgcagaactgcctgtagcttatatttgtctgtgttgcgacataatttaatactgaatattcaattaaatcaagtgggacgaaacagggcggaattgtgcgctttacgcacaattccgcccttcatgccgctccctttgatttagccacacattcatttttcgtaaatttagccaacgtcagacagcatatatgagaaaagcaggtgtgcaaacatcataagatgcacttgaagtttaattgtgatagttcttagacttttctttctctacccagctatccacagacacggatgtctgtggaagtgagatatgggacacggatgtcccgtatcgaacggtagcggaaactaccattacgtatatgaaaagtcttagaaatatccaattgaagcttctggcattgttgatgtatgcacacctgcttttctcatatatgctgtcgtccgtacgttaagaatgtgtgttaaacaacaatatagaatatatttatatggaaacaaacttttaataaatatgaaacagaattttaataaatggtactaatttactatgttatcctatgtacttttttgtgtgatattgctaagattagcaagtaagacatcatatgttaaagcatattgcacaaacatgtgcatgaggaggtaaaacatgaaagctaacattagcaagggtgcccgcaaaggatgggcgtggatacttgcagcattgatggttgtaagtgtcattattccaactacaatatctaccgcaaaggcagaggttggaacagtacagttcaatggaacagcgcagggctggcttgaatcagcttacgctgagtggtctattgacaaggaagccgatggatatacagcatatatcaaaaaggcttcacagtcagattcagcatatgcaagaatcgacaatgaacttataagaaggtataagagttactacagggtagatgccatgggtctttcggcaggagactatgttatcagggtagtaccagtaaagaatggaaaagaagtaacagctaaggctaaggttacagatgttcttaaggtaagctcatatgacagatcaggctttgcattttcttctgaatcaagatacaagacaggttcaggagcatataacgaagatggaacacttaagagtgattcaatcgttctttatgtaactaatgataatgctaaaactgtaaaagcaggcattatggaaggaaagggcgagaaggagtacacaggactccagacaattattgatgcatatacaaagagtgccagtaagggtgtagaaacaagggcacttgatgtaagagtaataggatgtcttacagattcgggtatggataagttttcaagctcatctgagggtgtgcagataaaaggagtaagtgcttattctaatattaacatgacttttgaaggagttggcgaggacgcaagcataagcggcttcggtttccttttaagaaatgcaggtaatgtagaaatgagaaacctctcaatacttaactttatggatgatggtatctcactagatacagctaactgcaacgtatggatacataacgtagacctttactatggcaaggttggtggggatgctgaccaggctaaaggtgatggatctatagatataaagggtgattcacagtatataacagtttcatatgtacatttctatgattcaggtaaatgttcattgtgtggtatgaagagcgagagtggtcctaactacattacttatcatcataactggtttgatcattcagactcaagacatgccagagtaagaactatgtcagtacatatgtataacaattattatgatggtaacgcaaagtatggtgtaggttcaactatgggttcttctgtatatgtagagaacaactacttcagaaactgcaagtatccgatgctttcatctaatcagggttctgatgctttaggcgaaggcacattctcaggtgagaacggcggcatcataaaagcttatggcaacgaaatagttggagcaacaggtatcatatatgctaatgcagcatcagttacaggtgaagctgccaatgcagcaacatttgatgcatatctggctgcttctgcaggtgaaaaggtaccatcatcatacaagacagtagctggtggcacaacatacgataactttgatacaactaaggatcttggagtaaaggcaggaagccttgtagcagcaaaggatgttccagcacttgttacatcttctaagggagcaggaagccttggcggtggtgttattgactggaagttcagtgatgaagacgacacagcttatgttgtagataaggatttaaaagcagctgttacgaattataaaaacacagagcttgtggctgttggtggaactaatgccaacatagtaactccagagccttctacagatgaaacaacaaaggcaacagaagaggaaactaagactacagaaaaggctactacatctaaggcaacagaaaaagaaactaagactacagagaaggctactacatctaaagctacagaagcaacaaaggtaactgagaaggaaactacaggtgcaggttcagatactaaaaacagttatgataagacaagtctctcatattcaggtgcatatacagatttaagtacaaagaaggattcagattttaagaatgcaaagtatgtttcgtcagcatctgatattcttacagctataagcagtgctaaggcaggagatgttatcatagttaaggctggaacttacaagtttacagatacgatagttattaataatgccatgaatggaaaaagcggcgcttatatagttgtaaaagcagctgatggtgcagaggttaagtttgatttctcagcacagacacttgatggcgcaaacagaggtgttgttgtagatggagattactggtattttgagggaatcaacttctatggagctggtgataacggcgtgttacttgctggtaacaacaacatatttgaaaaatgtgtattcgaagcaaacagagattcaggacttcagatatcaagatatgacacaacagcagcaactaaagatttatggccatcaaacaaccttataattaactgtacagcatttgataactgtgattatccagaccagggtggtacaggtgaaaatgcagatggttttgcagcaaagcttacatgcggcgaaggcaatgtatttgatggatgtatatcatattgtaactctgatgatggatgggatcttttcgctaagtcagctacaggtcctatcggtgtgataactataagaaactgtgtttcattcggcaatggaacattatctaacggagttcattatgctaacggagatatgaatggctttaagctcggtggttcaggtgtaggtacacctcatgttgtacttaactgtctctcgtttaacaatggggcaactggattcactgacaacaacaatccatcaggtcttacaatcatgaatgccacagcatggggcaatggtaagtcagcaaagaagggcaacttcttatgctacagagcatcaaataaggcagtgtacgtaggtcttgtttcatcaaatgctatagactcagataaatttacaggtaatatgagtgattctatatactataatacaggtaagtattacagattatcaggattattaccaacaccagttgttagtggcgacaagaagggtacagtagttgataatccatctaaagtatcaggaatgtttaaaaatgctgttgattttatcaatcttaatggtaatgtagacaagcagttaagaaattctgatggaactattaatatgaagggactttacgaaacacagggaagttattcaacacttggagcacattttggtgtagctaatcaggttataagtgttacaggcaagacatctggtgaagtaaagccaacagagaaaacaacaacagcaacagaaaaaacgacagaagcaacaaaggcaacagaaaaaacaacagaaacaacaaaggcaacagagaaaacaacagcaacagaaaaaacaacagaagcaactaaagctacagaatcaaagacagattcgactgtaagcggtaccaagcttgttctaaatgctaatgatgtaaatacaggaaagttaaaatcaacacttactgttgacggctttaagattgttgccggaagcaaagcaacagttacagtagataagagcagaaaggaatataaaggaatagactttacaagaagaatcaagctttctggtaaaggcagtacaagtggaagagctattgcgtttaaaacagctggagaagctaaggtgaaggtatatgcaacaagctcaagcacagatgaatcaagacttattaagatagttgataagaatggaaaggatattacatctacatcaaagattccaggaaattcacttaagtcagtttcattcagagtgccagttgcaggtgaatattatcttatatccgagaatggcggagttaatatttactatgttgaagtatctaatggagttgcatactaagtaagcgttaaaaaatcttatcatgtaggttaagaaagactttttgtcttatgacgtttacatcatatcagttataaaatataagcggatgtttgttattcaggcatccgcttttttggtaaaataatagtatgaacaataggtaaaaaataaaataggatatgaataacagtattgaaaataatagtatgaaataataggttgataaagcagcagattgcaaatataataaatatgaataagatatttttggtgtaagaaatataagtatatggccaagtatattcagaaatgtatccataagtataactagaaatatattttatagaaaagaggaaagagaacatcatgaagataaagaccgttgctatattaggagcaggagctgtaggttcatatgttatatggggacttgcaggcttaaaggatgtaaggctggggctaatagcacagggagaacgtcaggaaaggctgagaaaagaaggttgtcttataaacgatgaagtatacagaccagaggtgtggacacccgaagaagcgcataatacaggcgttgaccttttgatagtttcgttaaagtatggagctttaaaaggagcacttgacaacattgctacagctattggagaaaacactatagttatgagtcttatgaatggtgttgacagtgaagatatcattgcagacaggataggcatgtcacatattgtatattcacttataaaggttgcctctcatagagatggcaggggatattactttaatcctgatacaacaataggaattatttttggggaaacagcagataaggtatctgcatcagacaaaatatcagaacagacacttgtgagtgacaggataaagttgatagatgagctttttgcagccagcaggcttaactacagagtgacagagcatataaaagaagaaatgtggagtaagttcagacttaatgtaagtaataatcttccacaggcagtacttggtgcaggtgtcggatgttacagggatagtgaacatatgaaggctataagcgatggtttaagacatgagcttgaaacaatagcaaaggcaaaaggaatagatttaagtgttattgataattcatcgttacgtggaagtgcagtgccgccaacagcaagatactctacacttcaggatatagatgctaaaagacataccgagatagatatgttttccggtgcacttatgcgtatgggagaagaatttggaataccaacgccttataacgaatacacttatcatattattaaggcgatagaagaaaagaatgatggtaggtttgattacgataagggaaatgaagaattgacatatgcaaggtgaaatttgaaaagagttactactgattgaaaaataggaacacaaaaagtaccttattcttgttggtacaagctatggatttgatgccaagcttgcagaaataaaaggtatgtttaaaatatgcggtattaatcctggtgagttcatcttagatggtaagcctcttgctgaaaagggagcagcagttaaagaaacagtagttataaattcagttgcaagaaaagttgatgttgataaagaaatattgccaccaaataagctgaattattttaaagcgaagaaagaacatatagttgatggaatatcttattacgtaagtacaagatataacagagagcagggaatagcacaacttgaaaagatacttgttttatgtgagggtagtgtgaatgcgtttgttattactgctaaaccagaaaaggctactcataattaatataattaaaaataattttttgatttttaaaactaaggagagggtatgaaaattttgattttcatgcacagaaatggagattaatatgaagcgaaataaatacaaagattatctatggtatacggcacttgcagtatttattatatgtgtgattgaaggtatatttttctaccataatgtagataatccgtttcttaaagtaacattaaacatacagaatgcaattaaagcgtataagatagatccggatataaagcagaaagaagctattgcgtatatgcaggcaacaggtggtggcatattaagtggaataataacatatgtgtattgtattgctgttattgttgcgccattctgtacaataggtgcattagccgttcttatcagaaaaccagccagctatgtcagaggcctgtttagccagagaaataaaaagcgcgtattggttattggtgaaggaaaatataagtttcctcttatagatgcattgactaaagattgtcgtgttacagtgcttgaaagcactatactttcagatgataagaagcttaaatatataaataaaggtgtaaagtttgtgcagaagtatcaggatatgcatatggaaagtgtaataaaaatgcttgatatgtgtaaattcagtgatgtttttctgtgtgatgataattcaatagagaatattgaatgtttaaatgcatttacaaagagctttgaaaaaaatataaatgcatctgaaaataaagggtatctgcagattcatctgtgctgcaatgacaattcaatggcagaactgataagacagtattatgataaaatagaaacaagaacttttgatcttgacatagtagatgttaataaaatggctgtcaataaaatgtataaagaacatcctgtgtatacagctaataagggtgatgattatgatgttcatataggaatcattggatttggagattttggccagagtgcattaatacaaggacttaatatgtcggttttatcagcagagtctactatatgcatagatgtatttgataaggatatggaatcaataataggaagtttcatgaagaatttttcagttgatgtcctgaagggattgaagttcatagaagaagatatatatgaaggtaagagtattggatattatgaattgaaatttccatttgatacaataccagagcaatttggtatagatggaaatgtatgtttaagatttttcaatacggatgcaaggacattacagtttaacagtatttttaaaagatgtaatgacgacaaattatttacatatcttattgtggcaatgagtgatacacattcaatgtctaatacacttattgaattgaagcagctgttatacaataagggtgatagctgtattaatattcctatagttgtcagggctaaggaaaacaatgattttgctaatatttatggtgagaagaatctatttacaataaacaggaataaagatattttttcatatgcttctataactaatcgtgatattgtaaatgatgcaaagatatttaatcatagatacaatatgttgtatgaaataataagcagatataaagcagataaaaatattgttgtggatgataagtttatgttatctgaagatatagaggaacgtcttaagaaagattcaatagagcttaaagagaataagaaaatatcagaagaaatagatgaggtatggcataataagggcatatttgacagggaatcaagtatagcacaatcattgcatcaggatattaaaaaatggattatttatgaaaaacatgcatattctcttacagataacagagaagagcttgaaagaattgaacacagaagatggaatattttcatgataacacatggctttaaatatgagaaagctgaaagaaaagatatgtatgctaaaacacatccatgtatttcaaaatgggaagttttgaaggtagaaaagccagatacattagagtatgactttacaccatattacatattaaaagcagacagatgatttagttaaagcagcaggtgtttaacacagttgattcattctaaataacggacgacagcatatatgaggaaagcaggtgcgcatacgtcaacgatgccagaagctccaattggatatttctaagacttttcatataggtaacggcagttgtcgctaccgttcgatacgggacatccatgtcccatatctcacttccacagacatccgtgtctgtggatagctatgaagtaacggaaaagtctaagaactatcacaattggacttcaagtgcatcttatgatgtatgcgcacctgctttcctcatatatgctgtctgactttgacttaatttacgaaaaatgaatgttatgctaaatcagaggagccgcgccatggacggcgcgtctgagcggtagcgtcagctgacatagtttatatggaaaggcttagaaatatccaatcaaagcttctggcattgaacatagtatgcaggactgcctgtatcttatatttgtcgtccgttcgttatcaactaaaattcaatcaaactattgtttgaaattgttattgtacattattgttatttggtgtattattgccatttatatttctgttatcgttcatatttctgccgccattcatgttacctccacggccaccaccattaaaaccgcctggattgctgccaaagccgctggcattggatgcacccatggttcctgcagattgtgtccagtttgttaatgaggaaccatcgcagtaaagagtgtattcagtgtttgttgtaagagcagatgcgcatatccagccatttgagtaactgttgtttaaagtaaagctgattatttcattaccgctggaatcttttactgagtagcttcctgcgttaaaggatacagagctgaatacgtaagcattaactgaatttacaggagtttcacatataccgcctaaagctatacatgttccaccagttatagtaatattgccatcaacatcaatagaaccagatacctgacctgatgaactgccgccttttacaagaaccatgccgccagactgggtgtagctgccgttagaatctatagcatctgtatcgccggaaccggttgttacatcaatgtatccaccagttatattaataagaggagtagatgagccatctccggtacatgcattaatgccatcatcagctgcatatataaagctttgtccaccactgatgttgattgttatagcctcaagaccctcgtaggatgttaaaacatttatatatccatcagttatattaagctctttatctgcatgtattccatcatcacctgtagagattgtgatagttccacctgatatagatattataccattgccatcttcgccggtttcaagaacaccagaatctgagttggcatgaataccatcatcagttgaacttatgttgatggctgcaccagatatatttatttcgctctcggctttgattccctttgtagagtaagactttttagatgaatttcctgagctgttattgcctggcataccattagcagctctgtttccaccgccgaagttacctttcatgccaggattattgccagaattgctgctactgttattcatatcaggaggattgcccatgttaccattgttctgagtattgttcatatcgggtggagttcccacgctgctggctgaagaaccggagttgtcggcagccacggcttcactataattagaataagtatctgtatatatattcagatttccatcacctgaaacatctacaccatatgcagcatctatgccgtcacaggcagcatatatatcaatatttccaccagatattattacatttcctttccgttttcctttgtttgaaagactgctgtttgatgttttgatgccatcgccttttctggatatagctattatttcaccagattctatagctacctcatcgtttccttttatagcattatttacagcattaaccttgatggtaacatttttaatagaaatgtcatctttgctctggataccgttgttatagttgccagttactgataatgccccttttccaaccaatttaaggtcacatgctgcatagatggcagcattaccattttcactggaagaattgtctgaattgtcgtcagcttcagttcttgcatcaactatacagttataagtgttttcctcagatttgatttttacattatcagcatttttaatataaataggtgaatcgttagaacgtgtgatggatgtaccattcaatacaatggtgatttcggcattatcgtcagcattaactacaatctgtccttctgataagagcccggtaactgtatattcgccagcctgtgttatggtatatacggaatcattctgtgttattgtagaaccatcagttgatgtaatgctgaattcacctgttatttccgttttgtagttatcggcatcatctgcgtgtgttacattagtatcctgggcggtaatgctggaagctatggtggtatcagtatttttgttgttggttgtatagttttgtgaaccacagcccgatgtcataagacacatggcaagaataactgcagctacgcaggatttgtttattcttttaaaattaatcatatacattcatcctttcattcatcctttcattcatcctttcattcattatttcattcattatttctatagttgatatagagattgttacttttgccccttacatcttatctatagtgtaggtgggaatagtgaagaaaatatgatgagaatgaggatattttgtgtcctggagaatgacaaaagaaaaagccgaggcagggtttttattcctgtatcggctttattggctttattggtgttatggagtgtttattagcgctttgatgtcttcttctggtgtggtgataggtgctatgccatatttttccacaagaaagttcagaatattaggagacaaaaacgcaggtagagaaggaccaagacggatgtttttgattccgaggtgcagaagtgttaacaaaatgcagactgccttctgttcgtaccatgaaagaacgaaggagagtggaagctcatttacagtacatccaaatgcatccgcaagtgccagagcaacctgaatcgccccataagcatcgttacactgccccatatccatcagtcgtggcagaccattgatttctccaagattaagatcattgaaacggaatttgccacatgccagggtgaggatgatactgtcagaaggagtttgtttaacaaaatctgtgtaatagtttcgacccggtttagcaccatcacatccggcaaccaggaagaaatggctgattgcacctgattttacagcatctactatagtatttgcatgtgacagtatagctgaatgaccgaatcccgttgtcaccttggtacctccattgataccttttaatgtctgattttctttatagccaccaagttcaagtgcttttttgataactggcgtaaaatcttttttctcatcaatatgaacagcgccagggaaagcaaccacctctgttgtaaatactctgtcagcataactgctttttggcggcatcagacagttggtagtgtaaagaatcggagctggaagatgatcaaactctttctgctgattctgccatgcagttccaaaatttccttttaagtgtggaaattttttcaagagtggataggcatgggcagggagcatttcaccatgagtatatatgttgattccttttccttctgtctgttcaagtaaaagctgcaggtctttaagatcatgacctgtcacgacaataaaaggtcctttttcgatggtaagtgtaacatcagtgggctctggcattccatagctgtttgtatttgctttatcaagaagtgccatacacctaaggttgatctcgcctactttaagtactgtaggaagcagtgtttctatactttcttcgtaaccaatcttaaataatgcttcgcagaagaatcggtttacttcatcatcttcataattcagaacatttgcatggtaagcataggcggccattccacgaataccaaaaagaataagagattttaaagagcggatatctttatcggcattccacatctgctgcatgtcgtattcgtttgttttaccacatggcgactgacatttgctgcagtcaggaaccagtcgttctttctcagctctgactttttgtatcatatcttcgattgctgcattatcaaaacttacatttgtaactgttgtaaacagaccttcaattatgacttgtacggttcttttagaaatagctgatgcactgtctacagctcttgcaagaccaatcaatgcacctgtcagctcatcctgtaatttggctgtatctgcattttttccacagacacctgcatttcctgtacagccagtacatccggctgtctgttcacactgaaaacaaaacatttttttattcattccagtaatctccttattaatcaataatttttccatcaatacttattgttacaacctgccatggtatgaattttccactattttgaagtgcattttttactgccatctccagaccaccacagcatggaacttccattcttacgattgtcacactttgaatgttgttattctgaataatagcagccagtttctcactataatcaacctggtctaatttcggacaacctattagtgttaccttattctgaataaaatcctgatgaaatccagcataagcgtaagcagtacaatcggcggctatcagaagttttgcaccattaaaatatggtgcactgataggtgcaagtttgatctgtaccggccagttctcaagttgtgataccgaatctgcacctgaaaatggttttgcggtctcaggcgtttttgttcgctgtatctgcatgattttagatcctggacagccggtgtgaggtgacattgcatggttttgagcagctattttactctgtgcttcttttacagcatcttcatcatatgcaggtgcttctctttcctcaaatgaaatagctcctgtaggacattctgggaggcaatcccccaatccgtcacaaaaatgttctcttaccagctcggcttttccatctataatatcaatggcaccttcgtggcaggcagttgcacatgcaccacatccgttacatttttctttatcaatacgtataatttttcttatcattttaccctccattaatagaattttatttttgtttctgttagaatcatattataataaatacaacttgtatgtttgatttccaacaggaggtgagattttgaaaaaatatttacctattttaaaaaacagtcctttttttaaaggtcttactgataatgagatattatctgtattgcactgtgtagaggcagtaacagtttctaaagagaaggattcttatattttcagagcagcagattctacacaggtaatgggattagtattgtcaggttgtgttcttattattcaggaggatctctggggacatcggaatattctgtctaaatgtcatgctggtgatttttttggagaaccatatgcggcaagccctggtgctgttctgaacatcagtgtggtagcagatgaggattgtgagattgtttttttaaatatacagaagcttctggttacttgtccaactgcatgtgggcatcatcagaagctgattcgcaatctggtcagtgtactggcaaataagatactgattctgaatgataagattacacatgttggcaagcggacaacaagggagaaattattgtcatacctgtcagcagaatctatcagacattcgtccttgtcctttgacattccttttgacaggcagcagctggcagattatctttgcattgaccgcgcagcaatgtctacggagatatcaaagctgcaaaaagaaggttttataaaaacaaatcgtaatcattttgaagtgctttgcaataataatacaaatgtattgaggtagaagatgggttaaagcgtaaatcggaggtgctgggaataagaaagaaatttggtaaaaccatcacagaaaatataatctataaatacagaattggaaagaatatttgggtgtgtaggaatctattttattaaatctatctcactaggaaacagttattacatcggctaaaaaatagtgcaatggataaaatagatggtgtttttgccgatggtgtgatatactagtcaatagattagtacgttttggatatggtttatgatttgtgatggaggattgtagatgaaataccttttagttgctgatatagcaaaaaaatggaatatgtcagagcgcagtgttagaaattactgtgctaagggacgtgtgaatggtgcgtttcttactggtaagacatggaacattccagaaaacgcagagaaaccagagcgcactaacaaaagaaaagaagaaccgattactctgttggatattctgaaagagcagagggcaagtaaatactctggtgggatttatcataagacacagattgatttgacctataactctaaccatatggagggaagccgtctgacacacgatcagaccagatatatctttgaaaccaatactattggcgtagaaaaagaagtgctgaatgtggatgatgtgattgaaacggcaaatcacttccgttgtattgatatgattattgatcatgcgaaagcaactttgacggagaaattcatcaaagaacttcacttggttttgaagaatggcaccagcgattctagaaaagattggtttgctgttggtgattataagaaacttccgaatgaagttggtggcagtgatacagcccttccagaagaagttgcagataaaatgaaggccttgctgacggaatataacaccaaagaagaaaagacctttgcggatattctggactttcatgtgaagtttgagcgaatccatccgttccaagatggtaatgggcgtgtgggcagattaatcatgtttaaggagtgtttgaaatacaatatcgttccgtttatcattgaggacaatttgaaaatgttctattatcgtggattgaaggaatgggacaacgaaaaaggatatctgacagatacctgccttagcgcacaggacaagtataaagtgtatttggattattttaggattatgtattgaaattgaataaaacaatattgcaacaatgataaaagtgctctactacacacttactatacgtttttttgagaaatagctcggtatggttactttaaatggataattgacattatggcatatatgccatataatatttacaaaagagattatatgacagaatttctggattctgttaatcctaagatgcgagctaaaatatttggattgctgggtatattacaagaaaagggaaatatgcttagagaaccttacagtaaacatctggatgacggaatatttgaattgcgttgtaaattcgggagtgatattaccagagtcttatattttttctattatgaggagaaaataatactgacgaacggatttgtaaaaaaacacagaaaactcctatagaggagattcagattgcaaaggatagaagaaaagatttcatagaaagggtgatgaaggatgagaacatttgatgatatgctttctaagcagttaaaagatgatgagttcagaaaagaatatgaagctattcagcctgagatggatgttataagagctatcgtggatgctcgtacttctcagaatatgacacagaaggaacttgctgaacgtactggtattaatcaggcagatatcagcaagcttgagaatggaacacgaaatccttctgttaatttgcttaaaagattggcggatggtatgggaatggctcttaagattgagtttgtacctaaacagaaagcgtgattatatgacctcactggattggtgtctggtgaggttatttttgtaggttttgagtttagtttaatacatattattatttttttgaatattatgagaaagggtgatttttattttagatacctctgttaagaaaatagatgtaaagattggaatgaagtttggatgtttgcaaatcttggatgatggcacggaatatttgcaaatgaaagaaacgtgtatttcagatattaaagaagaaaagatggagtttcttcaagctgtgaaagaaggtaaatatgttcgaagagattggactggatgtgatggtggaaagacaattgttacaccagcatatatatataagccgattaattttaacgtgtatagagaatcagtaacattttcagattttgataaagcaattgaagagttacagaagagtacaggagtaaagcattataaatgtagatgtagaaaatgtggaaagataagatattattctgaagaaacattgcagacagaacctaagttttgttacaagcccgtatattattcgtcaaggtttgcttattctataaaggcaagtaatgccaattataataaaagaaagaagtacgagaataatgaggcagtatgtctagtgaatgataaggaggatgttattccagcagatgaatattgtagcgtttggaatgataagcgagagaaagagttattcaaactagcagaaaaagatgccaaaattattgcagcaattccaagaaaaaatgcaataaattatgataaagattatacgggattgatatatgagtcactagaggtgcttgaatgtgtaaacgataaattggaaagtgccccaatttcttattatacgcaaagacatcaaaagaaatatcaagatattattgtctataaagaatatagatgtcaatgttatctatgtggaaataaaaaaatggtgacttgtgataagtttggtatctttccaccaactaagtatggttacagagcttacaatggatattggagtgctgtttcttgtgaatgccataagatatcttcttttcaatggattgtaaatgatattttaataaaaaatgggattaattatagagttgaagtagcagttgatgaggtatatggaatagataatgaaactcctttgagatatgactttgcagtttataaacaaggggaaattgttgcatttattgaatgtcaaggtgagcagcactataagcctgttattgaatttggtggagagagaaggtttgtaattcaacaaagaaatgatgaagaaaagcgaaagtatgctaaagaacatgaaataaagttgattgaaatttcgtataagaataaaaaatatgaaatagtagaatctatattacgaaataaccatattatttaggttgacacatatataaatttaaggcggtgattgtaaatgaaatatataaatgcaagaatacaagatagcttaaaacaaggtgtaatggaattcttaaacctttctgaaggtggattgatacggttatttgtttctgtttatgaagatacggagagggaaccgtgggagtgtgttgaagcttttctttctgaacacattgtagatgagaaacttgaatatattcaaatgtttcatttgtcacgaaggctgaatggaactgacttgaaagctaacaacaatctggagaaactcttattagggagttctccgctgtctaatttttttagaaagtataagataacttttgaatctggtgaaggacacattaatttgtattataatggaatactacaatctcttgataatgaatttgcgtataatgatggcaatgtttgttatgtaaaatccagacttggatattttaaaaatcaagattattgtataaatgggtttgcattccgctcatatttagaggaaaatcattattattcttcgttggcgagttatcctgaattggtgggtaatatcgaaaggcttctgggaatccatggaatgtgtgctgattattatagtaatagcaaatattattgtattgagtatttgatacctatgtcggaggtaatttttgatatggggaatccgccagaaactgactgcggaaagactgtggaatttttgaaacaggcaatattaagattgtatgatgaatggctaggaagtagttttatttgtgatgagaatctcatattaaggcttccagatgatgaatgcattgagtcagagtggtttgtgaaagcagaagaattagcataaaaaggcatacttatttcaccccactttcattaaataatgcacacccccaaccgtagtctgaacccccttaactgactacgatttgactaccacacattgccttgaattgcaccattttgaagtattttgcaaaaagtgtagttattaacagggaaaatacaatgctcgaaaaagctgataaaaccttgcaaaactcggaattacagggcattttagaacaggagaattttatgataaaagtacttttcatctgccacggcagaatccgtacttttgtctgaaatgccttaaaatcaagggtttgtgggatgagtaatgaaatttgtacccctgttatgcccctattttgtttgagtaacgaggaaagcggccattaagttttgtataaatggctgtttaacacaaatattacgatacttaatgaaactttaggggctaaagattatattaaccagactgtcctcgattaatttgcatataaaaatgtgagaacttttaattgagtatcgagtaagtaaatgaatacttgaaagtattcgccccttcgaatataatataaaataatgtgttgtgccttagtggaggaatatcaatgaaatacattacagcaagtcaagcttcaaaacgatggaatatttcacagagacgagtacaaatattgtgtgcggaagatagaataccaggtgtttttaagctaggagaggcatgggctataccagcggatgctgaaaagccagaagatccaagaagaacaaagaataataaagaaggatgaatgaaacatgaatgtaatagatttattttcaggtgcaggtggactgtcctatgggtttgagtctgctggatttaatgttttattaggaatagataatgataaaaaagcgttagagactttcgaatttaatcacaagggggcaaaatctatttgtggtgatattacaaaaatcacctatgaaggagatattaagcccttgataggggataaaagcatagatgttataataggaggaccaccttgccagggaatgtcactgtctggacctcgaaagtttgatgatccgagaaataaattgtatctttcctatattcgtttagtagaggaaataaagcctaaggcatttgttattgagaatgttccggggttagtaggtttatttggtgggcagattaaagatagtatcatagaaaagtttaaattaatggggtataacattcagtataagattttgtgtgcagcggattatggtgtacctcaaaatagaaaaagagttgtttttgttggaatgaaaaaaggggagtttcattatccaactccatttgaagaaaaggtgacttgtagtatggcactggatgatcttccatcattagaagatgagttgggtgaggataatgcttcatatgctacagaaccgagaaatgagtatcaaaaactgatgagaaccaattctacatctgtaagaaaccatattgcagcagctcattcagataaggtaaaaaaaataattgcgcttgtaccggatggcggaaattataaagatttaccggaagaatatattaattcaaggaatttccatgtagcatggacacgatttgcgagcaacaaacctgcacctacgattgatacaggacatagacatcattttcattataaatataatcgtgtgccaacagttagagaatgtgcaagattgcagtcgtttccagatgattttattttcttaggaaataagacacagcagtttaggcaagttggaaatgcagttccaccgctaatggcacaggcaattgctgaaaaattgaagaaagaattggaggatatctatgagtgaatataaaattccagaagaatattattttcgaattcaccatgtcagacctcgtttcaaaggtgatattgaaaatgtactgatttatatggcggaagaaattacaagagtaggtgaaaagcctacagatgaatttataaaaaaaataaatgaagcaatttatagatatccaggaaatgcccacagggaactgaaaaccatcaataactggagaacagagatatcagcactttttgggtttattgaacatacaaatgaaacggataaaccaggtaggagagctaaagaattggctgctaatgaggatttggtagaatgttttaaggtgtttttatataattttcagtatccaggagcccatatcaagcccaagaatgtattggaacagattgagaatggaattcactttaagccggcacaatatattttaaagatgttgaaatttgctaatcgagagggtggtaattctgttggaattacaaaatatgaagcttgtcattgtatttttaatgatcttcgagtgactagagataatgagggggtagagaagacgtgggaaaggatacttgccaatcgacagaatgaagttcaatatgatcagacgggagatgttgtccgctatgccggagacatccttgattatatggagattgctaatcttcttaaaacttatgatagttatacctattatcttaataccctagaggaagaggcaattatcaagtttatcgaatccacagaatggtttgatggatatgatgagatgattaagaagaaggcaggcactttggatgctgtgaagaagtgtgttaacagttggttctcatatgttaaccgagatattgaggagactgatttctcaactgatattttggcatatattgcatctgatgaagatgagttaaagaagcttaaggagaatactacaactgatagcattggaggtcttgctgatctcattgaaagagaaaatgttcttgaaaagagaattgctacatattatgacggatttacaacaaaggacattggagatataggtgaaagtcttgtgcatggtcatgaatgtatgcgtattaagactggtggtcgtgaagatttgattcatttgataaaacgcatccctacacagtttgctgttggatatgatataagttctgttgaattagatgaacgaaagagatacattgaagtaaaaactacaattagttcaaaaccattgcattttaacagaattcatcttacaaaaaatgagtggaatactgcaagtagcactcatgacagatactatgtatacagactgcttcttagtaagagtgatagaaagttatttttattgcaagatcctgtaggtttgtataagaaagatttgattgatatgatacctagcgatggcgcggatattacttttgatccgtccaaggtaggtcaatttgaggagttgttaacatggacaaattaaaagttgcatcattattttgcggatgtggaggtactgatgtaggattgcttggtggctttgattttcttgggcaaaagtataatacaaacaatatggaaattgtgtatgcaaatgatattgatgataatgcctgcaatatttttgaggaaaactttggaattaagccagacaatagagatatccgagaggtaaaatcagaagaaattccagactttgatattttaacgggtggattcccttgtcaatcgttttcgattgtagcacagaatccaaagcgactaggcgtgaaagatgaacgtggaaagttattttttgaaatgtgtagaatccttatagaaaagcaacctaaatgttttattgcagagaatgttaaagggttacttactgcgaataagagaagtgcatttccacttataatggaagagtttgagaaaagtggatatgatgtaacatactccatacttaatgcagctgagtatggggtcccacagaaaagggagagggtcattattgttggctttagaaaggatttgaacattcagttctcttttccagatattgcattgaagaaagaagatttatatgagccacttagttcagtaattgaaaaaacagtagatgaaaaatatttctttagcgagagagctgttgcaggaatgatgagaaaacgtgagtttatgaacaaggggagagctcaagacatagagaagccttgtaatacagtaggagcccatttggcaaaagtttccttaaatagtacagatcctgtgctaaaaataggcgatagatatagaagatttaccccaagagaagttgcacgaattcagagttttccagagaattttaaattggtaggaagtgagaccgctcaataccgagctttgggaaatgcaatccctccagttatgttctggtatgttgctaattctgtgtgcaagtatttgaatttggaaaatgtatgataggttacaaaattagaggattttgcatataagtttcgttaatgtgagtattgctttagatagcggataaagcaagtaaaagcttccggatgtggtattaggtattctggaaaagatatgcaattatctaatttatatgataataaaaaggagaatttgaatggaacatacaggacatattcgaattgacagaaaggtgatcccatatcatttaaaagataagaaggtacatttaattcctaataatacatatgcatgcttaatacctggtgaaattagagaaaaagaagtaataaaaggagcaactacagggaatagagaagttgcatttgtaggatgccgttataacaataatagccttgggtataaagcattggtgatatcagattgtaatactggcttatattccggaataacaaagtttgatcgtatttgttttgaaggtaagccagttaatgtatttgcaggtccgggaagggcatttatatcagaaagtggatttgatatttcagaacgaatgaagtcaattacaccgaaaaagtgggaggatataaatatatcatctcaagtagttatcaattcagacagaattaatataggtgttaattttagtttttggcataatttaaaatatgctgaaacatcaatgggtgatgcaatacctaagtttacattagaatttcaaaaggcagtgaatataaaaagacttccacaaatatatttgatggtatatgattttttttgctttttaaatttctgtagaaatatatattttgaaaaaataacgcttcagatcaaagaaaatgataaatttcgtacaagtgctacagtttatattaattcagaaaatgatgatgattatgataaaaatgaaaatacttcgattatctctcaagattgcaaatcttattttcctgaattatttaagactgtagcactaagacgaaatcaaaaaatatatgataatttttacatcccaaagaattcaaaagaagcattgacggtatcatatgaaaaatttttagcttgtgcgttaagtttagagagtgagtatgatcgtttgtacccaaccaaaaaggaagacaataatttatatgctgatgtatatgaagtttttcaaaattctgcagatgagttggaaatgctatttattgcaattaaagagaacaaattaacatcggaggaatttaaaaaattatattttggaaaggttgataatgagtataatagccttgtgagaaatttgtcacaaatcaaaaagaaaaaaatgaatggatattgtgaaaaagtaaaagaggcattgtcgaagatagattatagtcttgctgaaaaatataaaaatgcattaacaaataacttggaatatattcaacctgtagttgataaaatgagtagagcaaacaaagttgagtttccttcagtaagtgaggcaggtaaaaagttcgctgagttcagaaatggaattgcacatggtaatccacaagaaatagagccgattcatgtggttttatatgaagtcgctagagcactgatatatactatggttctgaaacaagcaaacgccgatgatgacagcataaaaaatgtaataaataaattgttctaatttttataatgcaatcatgtctatctagaaaatgattttatctagcccttaggaactaagggcgcacttctatatctacttattggcaggtattggtgcgccttttctcatgcgaaaaggaattgcgcgaattctcccggacaagccttcgtcttgtgattattttttcttcctgccgcggctgttgcccattatcggtttgcataaatctgagtagcgttgcagaatatcggtaaaggtcttgaattcataaggatccattttcgtaaagttgattttgaaaagtttactgtacataatcatctgtgcctgagtggcattgtttgttttcttgagttcttcaaaagcgccaagcatatcttcaaccggagtaattgttgtttagcagattaaatgataccttaatcgtcatattaaatgtagtaaatgttgtattaacaagaaaacttccttcagtttatttaagattaattatgcagattaaaaattcatcattcaaataaagtgaatgaagaattataacatcagccaagttcacaatcattgagagcctgcattacgatgcctcctagattcaatatcttacattttaattataccatttattcgaattgttagacagtttgacatacggtactgtgagaggacggcggttaatcaccgcttcctactagatttgattattgtatttggaaaaattgagtagtataattagttgtacaaatagtgcaacaagtttcatatgaggaaattaatatgattaaaaataatattgaactcgatgttaaagttaaatgcatagagcaaggaactacacagacagagattgccgagaatattggaactacaaaatcctatgtgaatagggtaataaaaaaatctgatggtgtaattaataagacttatgtgcaaataatggaatcattaggatatgatattaagctagtttatgtaaaaaaagaaaatacggatgaagattaacacatccttaagctaaaggagaacggattatgcaaccatatagagtgtggcttttttcggatttgattgaaaaaaataagagagtatttaagattccagtttatcagagaaattacgactggactaatgttcagtgcgaaaaattataccaggacattatgcttgcacacgataatgatcataagcattttactggaactatagtgtacatcgtaggattgaacagtagcaacttaaatgaggttcttattattgatgggcaacagagagtaacaacagtttatattcttcttaaggcactctttgatgcagcccaaggtgtgtcaacaagaatcgaagaagagataaacgaggttatgtttaatcgaaattgtgaagaaaaatataaggttaagctcaaaccaattaaatccgataatgaacagctactgttactaataaaaaataagattgatgatatggacagaaattctaatatttataagaattatgttctgttcaaaggaatgattgaagatagcattaaccagggctacgaactgggagatattctcgatggtataaaaaagcttgaattggttgaaattatccttgataaatcacaaggtgacaaaccacaaaaaatatttgaatcaataaattctaccggactagatcttagtcttgcagatttgattagaaactacttactgatggaagatgataatcaagatgagttgtacgaaaaatactggtcagaagttgaaaagaatgtgggatatcgaaatcttggggattttgtgataaattatttgaactcacaaataactaaggctgtcaattcgaggaatgcatatcagctttttaaggaacattgtgaaatcaataaatttacccatgaagatgtattagcagatttaaagagaacatcaagatattatggagcttttatcggagagaataagtattatagtgatgaaataatgcattatttgtggtctttctatactataaagcagacaactgtgcttcctttaatattcaagatattcggtgactatgaagaggggattattgatgatgtaactctatgcaaggtgcttaattatcttttaacttattatgtcagaattacagcttgtgagatcaataaaaatttatctaaatttatgaagtccttatactctagggtattcgatggaacaaactatgacgggtattacgaaaagtttgtattattcctgaataaccttaaagcaaatgatcgtatgccatctaataaggaattcgaagatgcattgatatataaaccactttacaagaagcctatatgtaaatttgtactctcatcaattgagaattctacgaaggaacatattgacattagtaatctgacaattgaacatatacttccacagaaggaaaatgctgcagtatggaagaaagaagtgggagagaattatagcagtgtttatgaaatttaccttcatactttaggaaatcttacaatcactggatataatggtgaactgggtacaaagtcgtttaatgacaagaaaaatatcatcaaagaaaattctaaagctgtaatacttaataaagaagttttagcggcagatagatggaatgaagaagcaatccttaatagagcaaaagtgttagcatcatttctttcatcacagtttaagtatgaagaggtaaagaatgattcggaagattctggaaatgatggcatctcattagatagtggattaaatctttctaatacaaagccagacagctttacttttatcggggaatacacaaaggtaagcagttggtcggatgtgctcactaagtttttatccatttcatatgacttaaatatggaattattttcagacttagcagcaagtgattattccatccccaatgcaagtaatgtatatatcagtaatgataaaagaaaactacgtaaggcaaaacagatagataagagtggaatttactatgaagcaaatttggcagccaataatattatgtcatttattcgtagtataatttcagagatgaatctggatattgatgattttacatttaccttatcagaagtaccatttaatattaatgatgagaacacctgggaacagggaatgatacctgttgcaaaactattctttaatttagtggatgacttaataaagaaagatttgttacaggaatcagaagtagaaaaattaaaaacaaaagaatacacaaaatcattatttgcagcatctgattatccagcacttgcgaataatagaagtgataatagaggtaactctagccagtataggtacagagcaaaggcattaatattccaaggaaaagagttatttgtatcaactcaattttttgatgataatcgtgaagcaataattgaatggtataaggggcattaaaattcttgcaccccctaaatcgactactatttgactactacacactgccacaatttgccccattttgcgtagtttactacactatccgaaatagacagtttatctcggatatgtcagaaccccttgcaaaacagggcattccggggcaaaacaaggagaaacaaagcaatgataaaagtacttttcatctgccacggcaacatctgccgcagcaccatggccgaaagtgtcatgacatatttagttaaacaagctggtttatcagaccagttttatattaattcagcggcaacaagccgtgaagagataggcaatcccccacaccatgggacggttgccagattaaaagcagaaggaataccggttattccacatagagcagtgcagatgacactggatgattatgaggaatatgattatctaataggcatggatacagagaacataagaaatatgcagcgtatatcaggtggagatccagatgaaaagatatataagctgcttacatttgcaggttcaggccttgatgtagcggatccgtggtatacaggagatttcgaagcaacatataaagatgtaaaggctggctgtgaaggtttgcttcacacgcttgctgaagaaatataacaaataaaataactaaaataacaaaacagaatatttttataatccctgcataaactgtacaaacagatatgcaggggtttttatttttgaaaacttatattgaagaaagggtaatagatattgctaattacataatagataacaatactacagtcagaaaggcggcaaaacagtttggagtaagtaaaagcacagcacataaggatgtaacaacaagacttttagagattaatcctgcacttgctgcgaaagtgaggaaagtgcttgatgtcaacaaacaagagcggcatatacgtggaggaatggcaacaagagaaaagtatgcacatcataaaaattaaagataatgaagaacaaagcaaatctaaactaaagtatattcaggcattacaagaatattttcaacaattccgtcaattatataatatatgagcagcgattatataaaacagaagcaatataaaagcagtgaccatataaagcaaataattgacaggaggaatacactaatgcaatctgatttaacaagaaattctgataataaggatagccagcagagcagtacagtatacacacaatctgactttgccggtggtgtacctatgaatgaacctatggcagaaagatattgttcacctgaagcatatgagtgcagtgatgggatagaagcaggctgtcttgataatccccatattccaccagatgaagttaacaatagtaccttgaagatgatggggcatagacatagaaagcttgaaataaagaaggttattggaagggaaatactggactcaagaggcaatcccacagtagaggcgcaggttttgcttaacgatggaactgttggacatggtatggttccaagtggagcatcaacaggtgcttttgaggctgttgaactaagagatatggatcagaaaagatatcttgggaaaggtacgcttaaggctgtaaaacatataaatgttgaacttaacaataccgtacttgcaatggatgcatctaatgtatatgcaatagataaagctatgataaaagaagatggaactaaagataagtccagattaggtgctaattcaattcttgcagtatcaatagcatgcgccagggcagcggcggcatcatttcatatgccattgtacaggtttataggtggaaatgtggctacgacacttccagttcctatgatgaatattataaatgggggtaggcacgcagttggaagtgattttcaggagtatatgatagttccggcgggtgcatcaagttttcgagaggcacttcgtatgggaacagaggtgtttcattctttaaaggaaatacttactaagaaaggattcgcagttactgttggtgatgagggaggttttgcaccagatgtggctgatgcatttgaagtgtttgaacttcttatggaggcggtgattacagcaggatataagccaggcgaagatatttatttcgcgatggatgccgcagcttccgaattatacaatactgaaagcggattgtatgagttcccaagagaatatgcaacaagacaatcaaaagttcatgaaaatgtagacatgaaacaacaaaaaatgacttatgatttacttgatacaaacaatgaaatgcttgcaattaagcgggatagcaaacaacttgtagattattactctaaaattatcgacaaattcccagtgatatcaatagaagacccgcttaacgaagaagattgggacggatggagagatataactgataagttaggcaaccgtgtacagcttgtgggtgatgatttatttgttactaatacagaaagattaaaaaagggtatagcatcaggctgtgcgaattcaattcttataaaatataatcagataggaacgttgtcagaaacaatagaggcagttaagatggcgcataaagctggatatactgctatatcaagtcatcgttcaggtgaaacagaagatacgacgattgcggacatggcggttgctttgaatatgggacagataaaaaccggggcaccatcaagaggtgagagaatagcaaaatataacagattactgcgtatagaagatgagcttggaagttccgcagtgtatccggggataaaggcatttaatataaaaactgagaaataaagtaagattaagaacacaccaagaatcaataaaaacaaagtaaaaattaacaatacatcaagaaacaataataagaaatttcagtattttgcgtgtcaacaggtcaaaaatgtacatttgcactgatgcagccgtattggacctgctgacacctgtataatataattacatcagcgaaacaatacttaatccgctgtttttagaaagatttacataatcatttccacactgtacgataggtttgtcaagagcgttgtcatttataagaactacctttccagtacgtccatctgaaagctttacgtttgttccaatatatgaagcaactacatttttaagaaatggaatagcatatataggatcaaacttggtaaatgcatcctgatacatcattttaacaacttcaaaaggacatataggtgcacgatatatacgtgatgcagtcatggcatcatatacatctgcgatagtgataatcttggcaacagccgggatatcagggcttttaagaccaaatggatatccgcttccgtcacatttttcatgatgcagcagtatagcttctttaacagggagaggaagctttttgtcttttatctgttcatatccaagattaacatgatgcttcattatctcatattcattgtcagtcaatgtacctggtttatttagtatattatcaggtacaagcagcttgccaatatcatgtaagagacctgcaagagtaagtgttttaatctgttcatcattaaagttgagccatttgcctataatagatgcgataagtgcaacattgacagaatgaacgaaagtaatgtcatccttgtttcgcatggcatgcagcatatcaaacatctgaagtgaattacgcgcttcagacagaatattcatagttcccgataccatggtgtctgtgtctatattgttttcggcagtaaggaatgagttgagattatcttttacggaatctacattaacattatattctgattcaaaatgcttgaattcatcagagttacggacacgctcataatagttgatattgtcagcatcagttctggctaaagcagcatttctttcagcctgtgatgcagagtcttcatcctcattataaatgtttatttcaagaacatgcagacttgaaattttagcgataagcgaaggcgtaagaacagtatctttaggtgcaagcagagagccatcgcttaatataatatcacgtgaaagcttcattccggcatgtgcatcaaatataaatatagtattgtcattcatatataacattctccttaaatttcaaatgtaatagaactgtttgtatatatcatatgataccagggtcaaaaggtctgaatttacatgagttcactcatagttggggaaagactttgaatccgctcatatatgagcacaaaatactttatgaaccctacatttaaatatgaaataattataaatttaatagtttaaaaagtcaattatacttgacgtgtaacaatatattgtgtaatatttttatggattacagatggtgcgtgcagcattatgtgatcataattaaatatatgattatatcccttatttagagcggtggagatacataggatctgagaagcccggcaaccccttgcatttgaacagcataaggaaggtgccaacctgagcgagattattcgaacaatgagaggatttcgaagcagatttcgggtccctttaagggacctttttctatgcatagatatatcagatatgtatgttatgtatgtaaaaatgaacgtacaatttaaagacatacaatttaaagtataagtatgcatccatacgaaattaggatataagcatgtcgaattatgctttaagccaggctgtacaaggcataatcggagatacttaataacaaggaagtttattttagaaggagaaagattagtacgatggaaaaaagattatttacatcagagtcagtaacagaaggacatccagataaaatctgtgatcagatatcagatgcagtgcttgatgcactttatgagcaggatccatattcaagagtggcatgtgaaacacttactaatacaggttttgttatggttatgggtgaaatcacaactaaggcttctatagatatcccacaaattgtacgtgatacagttgtagagataggttatgacagctcagaaaagggctttgatggtaacacatgtgcagttatggttgcacttgataagcagtcagcagatatagctatgggagttgataaggctcttgaagcaaaggaaggtgttgataaggacgatgaagaccttggagccggcgaccagggtatgatgtttggttatgctacaaacgaaacagaagaatatatgccatattcagcagcacttgcacagaagctttcaaagcagcttacaaaggttcgtaaggatggcacattaagctacttaagaccagatggcaagacacaggtaacagttgaatatgatgaaaacaacaagcctatacgtcttgatgcaattgttgtatcttcacagcatgcaccagaagtatcacaggaacagattcatgaagatatcaagaagtacgttatagatgcaattgttgacccagctatggtagatgctgatactaagatatttatcaatccaacaggccgttttgttataggtggtcctaacggagattcaggccttacaggtagaaagattattgtagatacttatggtggagcagcaagacatggtggtggagcattttctggtaaggattgcacaaaggtagatcgttcagcagcttatgcagcacgttatgtagctaagaatatagttgcagcaggtatcgcagacagatgcgagattcagctttcatatgcgatcggtgttgcacatccaacatcaatctgtgtagatacatttggaacaggtaagttaagcgatgaaaagattgttgaaataatcagagaaaactttgatttaagaccaaacggaattataaatatgcttaatttaagaagaccaatctataagcagacagcaagctatggacattttggacgtacagaccttaacctcccatgggagcagacagataaggctgatatacttaagaagtatctttaaaatgttgttgtttagcacatattattaatatacggacgacagcatatatgaggaaagcaggtgtgcatacatcaacgatgccagaagctccaattggatatttctaagacttttcatatacgtaatggtagtttccgctaccgttcgatacgggacatccgtgtcccatatcgaacttccacagacatccgtgtctgtggatagctgggtagttaaggaaaagtctaagaactatcacaattggacttcaagtgcatcttatgatgtatgcgcacctgctttcctcatatatgctgtctgactttgatttaattgaatattcagtattacattatgccgtagtacagacaaatataagctacaggcagtcctgcatactatgcgaaatgcacttgaagtttgattgtgacagttcttagtctttcccttagccaaccagctagcttcgtacacggatgtacgaagcagcgaagccgcgccatggacggcgcgtctgagcggtagcgtcagttgccatagtttatatggaaagacttagaaatatccaatcaaagcttctggcattgaacatagtgtgcaggactgcctgtagcttatatttgtcgtccgttcgtcaccaactaatattcaattaaacaactatatttataaaaaaatcatattttttctcattaagtacttttaaaattccttgtttatgtatataatgttgattagctatgaaatgtattttttattgctaatatattaataaagtaaaaatgtttgtatatgtttataagatgtattgtttatgtaaaatatgcagattggacataattaatgataacaaacaataagctgattaacgaacttgatcaacaagtcagattaacaagtcagattaacaagtcagattaacgaatttgattaacgagtcaggttaataaacttgattaacgagttaaattaacaggttagattaatgagctggattattgagtaggattaatgagttggattttaggaggaaaacagaatgttatcaactgatattggaatcgatcttggtactgcaagtattcttgtatatataaagggaaaaggcgtagttttaaaggagccttcagttgtcgcatttgacagagatactaacaagattaaggctattggcgaggaagcacgtctgatgcttggtagaacaccaggaaacattgtagcggtaagaccacttcgtcagggtgttatttcagattatacagttacagaaaagatgcttaagtactttatccagaaggctatcggcagaagaatgcttaagaagcctagaataagcgtatgtgtaccttctggtgttacagaagtagagaagaaggcagttgaggatgcaactcttcaggcaggtgcaagagaggttgctattattgaagagcctatagcagcagctattggagctggtatagatatttcaagaccttgtggaaacatgatagttgatatcggtggtggcactacagatattgcagttatatcacttggcggtacagttgtaagtacatctatcaagattgcaggtgatgattttgatgaagcacttgtaagatacatgagaaagaagcacaaccttcttatcggtgaaagaacagcagaagatattaagataaagattggatcagcttatccaagaccagaagtagccaaaatgaatgtaagaggacgtaaccttgttacaggtcttcctaagacagtagaggtaacttctgaagagacagaggaagctttaaaggaagctacttcacagatagtagaagcagttcatagtgtgttagaaaagacaccaccagaacttgcatctgatattgcagacagaggaatcgtccttacaggtggaggaagtctgctttcaggattagaggatcttatagagtcaaaaacaggaattaatactatgacagcagaggatcctatgacagcagttgctataggaacaggtaagtttatagaattcctttcaggttacagagaagattagaagcttatgttaacagtatatatgttatgatatctgttataacatataaaatagctgttaacataaattcgcaggaaaagaggtcaggtatggtaagaggtttatacactgcttatacaggattagtgaatcagcagaagagacttgatgtagtatcaaacaatcttgcaaatgctacaacaacaggttttaaaaaagaaggtgtaacaacacaaagctttgattcagtatatggaataaagataaaagatgctacagttggatatatgaaccagaatataggtagtatgagtcttggagcaaagataggtgaaacatatagaagctgggatcagggctcacttagaaacactgacagtaattatgattttgcactttctggtaagggattcttctcaatatcatttactaacaaagcaggtgaaacatcaacactttataccagggatggatctttccagatgaatcaggaaggttatctggttaccaaggatggtgattatgtattaggtgaaagtggagacccaatactacttcctacagatgcatcgcagttatctgttgattcaacaggtgctatatacgcagatggacagtatgtagatacatttggaatagttgattttgaagactatgattatatagaggcatacggtgagaatctttacagagcggttgatggagctgttacaaaggattctgatgccgtggttaatcagggatatattgaagcatctaatattaacgtagttacagagatggtagacatgattaacatagccagagaatatgagagtaatcagaagatagttaatgcagttgatgatatgctaggcaagatggtaagcatatcagagttataaagtatttattagagtaatcaggaggacaagcattatgatgaggtcattgtggactgcagcatcaggtatgatggcacagcagacaagtgtagatacaatatcgaataaccttgcaaatgttaacacagtaggttataaatcagagtcaactgagtttaagtctttgctgtatcagaatcttcaggcaagaacaacatcagccaatggtgagtttaagccagtttctgcacaggttggtcttggtgcaagagtatcatcaataacatcacactatacacagggtgccatgaatgcgagtgacagtgcaacagattttgctattagtggagatggtttctttgctatacagaatgaagatggagatacattatatacacgtaatggaaatttctatttttcaacatcaacagagggtatgatgctgtgtacagcagacggatatccagtattaagctcagatggacagcctatagttgtatcatcagatgaatatgatttaacaagaatcagcatggattccgatggcaatgtaacatataaagaagatgatggcaatgttacacctataggtgtaaagataggactttttcagtttacgaatccatcaggacttgaaaagcttggtggtaattatcttgctgagacagatgcatcaggtatcgctttaaatgaagatgcagatgccgttggcaaaaagagccagttaaagcagaaatatcttgaggcttctaacgttgaagtggcaacagagatggttaatcttattacagcacagagagcatatgagttatgttcaaaggcaataacaacatctgatactatgatggaacaggctaatgcacttaagagataaacttaagatataataggagatatgtatggattatatgacaggtattaatacaagttatgcagatacatatgataaaacatcatcagatcttacagataagataaatggtacagatttttccaaggcatctgatgatgagcttatgagtgtatgcaaggattttgaaagttactttgtagaacagatgcttaaatctatggaaaagatggctaagatagattcagatgatgatagcagtacttcgttgtttaacagtatggcatctataggtggagagtcagactctgccatgagtacacttggaagttacttcggtgatgagatgattaaaaactatgctgagttgtttacagaatctgataatggtaagggacttggtattgcacagacactttaccagcagatgaagcgtaactacacagtagatgaagcgtagctataattatagtttggtaaaaagttataaagagagggaaaagcagattggattacgagtctgttaagtatgtagaaggatttgtagaaaacattatctttcgtaatgaggataatggttatacagttttcgaaatagaatacaaaggtgacgatattacctgtgttggcacactaagcagtgttgacacaggtgaatttatagctgcagatggtgtttttgttaagcatccatcatattatacaatgcagtttaagataagttcttatgaattcaagacgcctacagatgcagaatctgtaaagcgttatctaagttccggggctataaagggtataggcgctaaaatggcagaacgaatagttaaggagttcggcgagcagacctttgaaatactcgacaaagagccggagcgtctggcagatattaaaggaataagctacaacaaagcaatggatatagcacagcaatatgccggtaaaagagataccagaaaagctgttatgtatctttcagattatggtatccagatgaatcttgccaataaaatatttaaaaaatacggtaacagcatatacacgataatcactgataacccttataagctggcagatgatattgaaggcataggctttaaaaaggctgatgcaatagcgacaaaggtaggaataaagggcgattctgatttcagaataaaaagcggacttttatactgtcttaatcaggcgacactgcaggggcatacatatcttccatatgataagcttaaatatcaggctgagatgctgcttgacgtcaagataacggattatgaacattatataagtgatcttgctattgataaaaagatatatattaagaaaaatgcggatgacgtgccagatgatgaaaaggatatgtcatacagcataaaggaacaggaaagtgatggacatacatcatggaatgtatattcagccatgtattatcgcatggaacagaatgttgcaaagaatcttcttgagcttaatatacaatgtgatgaagatacaggaaatgtatatgaacgcatagcagatatcgaaaaatcagaaaacataatactagatgatatacaaaaacgtgcggttgcattagcggcactcaatggacttattgtaataacaggtggtcctggtacaggaaaaacaacaacgattaacgccataataaaatattttgaaatggaaagactggatatacggcttgctgcaccaacaggaagggctgcgaagcgtatgacagaaacgtgcggtgttgaagcacagacaatccacagattgttagagatagcaggaggtgggctttctgagcttgataacgaaaagcgtaatgcttcttcaagtcttggcatgcattttaacagagatcaggataatcctctcgaagcagacgtaataatagtggatgagatgtccatggttgacattaacattatgaatgcattgcttaaggcagttcctgtaggtacaaggcttatacttgtaggagatgttgaccagcttcctagtgtgggaccaggaaatgtgttaaaggatattatatcatcaggatgttttaatgttgtaaagcttgaaaagatattcagacaggcagcagaaagtgagataataaccaatgcccacaagattaataaaggcgaacaggttacgttaaacaagtatagcaaggattttctttttatacacagacagggttctgaggccataatagctgcattgaaaacagttattaaggataagctgccaggttatgtcggtgcagatataaacgaaatacaagtgcttacaccttcaagaaaatcagcagtaggtgttgaaagacttaacaatattcttcaggatttcctcaatccttccagtgcctccaagatggaaaaaaagcacggggataatgttttcagggaaggcgataaggttatgcagataaaaaatgactatcagcttgactggacgaaaaaaaatgatcgtggaatggctatagaacagggaagcggagtgtttaacggagacacagggatagttatggagatagtaccatttaataaaagcatgacagtaagatttgaagatggaagatatgtcgaatacagctttgatgatcttgatgagctggagcttgcatattcaataacagtgcataaggcacagggaagtgaatatcctgctgttattataccgatgtatgctggtccaagaatgcttatgaaccggaatattctatatacagctatcacaagagcaagaaaatgtgtgtgtataataggagaagagcaggtgtttatgcagatggcaaaaaatgaatctgaagctaaaagatacacttcattggacgaaagaataaaggaaatatcagaaattaagtagattacatatgataaaatgcgaaattaaaaataaagaaaaaagatatttgaaagaaaactatatttaaggggaaaatgtattcaaaagaaaaaagatattcaaaagaaaaaatagaaaaaatcatccaggatataataaaaaatacagaagatgttttgtatcctccggcatgtcccatatgtggaaaaccgcgtgtagtaaagaacaaagaaagactggatatatgtccgtggtgtcttgacaaaataacatatgttgatgagccgacatgcataaaatgtggcaaagctcttgatgatgacagggaatactgccaggattgtatgaaaacagaacatatttatgaccaggcagtaagcttatatgagtattcagatggaataaagcagtcgatatatagatttaagtatcataataagagagaatatgcggctatatatgcaagagaaattgaaagaatgtgtggcatggttataagagcatggaggcctgatgtgattatacctgtaccaatacatgaatcaaagcttaagcagagaggttataaccaggcggagcttattgcagatgaactttcagtcagtatgggaattcccatcaataataaatatattatgcgtatcagaaagacaacgccaatgaaggaactgagtaatgaagaaagagttaaaaatcttcaaaacgcttttcaaatctgcaataatagtataagatataataaagtattaattgtggatgatatatatacaacgggtgcaacggtagacgcgtgtgcaagatgttttaaagaatctgggacagataaagtatatgtggtcacgttgtgtataggaaaaggattttagacacaagaatggaggaaaattatggatgtaagaaattgcagaatgtgtggtaagttatataattttataggtggtccttaccgcaatctgtgtcctaactgtatagagaagatggaagaaaagtttgacgaagtcaaagaatatatagaggaacataaagctgcaactatcaatgaagtgtcagaagaatgtgatgtaagctcaagacagatagaacagtggataagagaagagcgtcttatgatagctgaggattcacctataggtatcagatgtgaaagatgtggggcaacaataagatctggcaggttctgtgaaagatgtaagaataagattgctaacaatcttggttctatgtatggagaatccaatgcggctgttgaaagcatggaaaagcgtgcatcagcggaagctaaaatgagattcctcgataaagataacaagtagaattcataaaaagaatttatagcaggaattataacaaaaatcataataaagtaataaaagtaagggtgttgacactgagaggtgtttacatccttttttaaagtcagagaaactatataaatatataaaaatttaaaagtgtaacgagtttaaatatatttgcaacaaataaaataaacctaaatatttaaaattaacaaaaataaaaacatatttaaaataagtgaataagtagctgaataagtggaaaacatattaacatcgcaagcaataagtgcataaaactataaatgtatctggtgaacggcttgtttattaaaatatgcatattatgcatggaatggaggttaatatggataaagatagaaggaatacagtaaagatagtatctacaattatttcacttggtataattgcagctcttattattggtgttgtttcggttataaaaaatgtaaatgctaacagaaatgaaagcggcaatattgttaatttgaacgaaacagaggaaaatgttgcaatgaagacagaggatgcagaagaaaatatagatgagtcagatgcacaggatgagctgttagaagcaaacgcaaggggaagaatggctgaaaaaaacgagtctgtggaaaagaataatgatgagctgatgatatctgataaagaagatacaacaatgcaggaagaagctacagttccaccaacattatcatctgaagaggttatggcagaagctatgagaagttttacatttgatgaaagtaataaaatggcatggccggtattaggacatattacactggattatagtatggatgaaacagtgctttttaaaagtcttggagtatataaatgtagtccagggattatcataaactcagaagtaggaactaatgttgcagcagcagcttcaggcgtagtcacagacgttgcagagctttctgaaacaggtacaacagtaacggtatctatcggaaatggatatgagacaactacaggaatgatagaaaatgttaatctgaaaaaaggggataaggttacaacaggacagcttataggtacagtggcaagcccaagtgcatactatattgaagaaggtcctggggtatattttaaacttacacagtacggagaaccagttaatccagatgcatattttgttgagtagaaaatcagcgcctgcttgctagattgcgtttataccagaagtgaaataaacatcagctgatatgtcttttttgaaatgaatttcaactttatcaatatacggtacagcaggcgcttaatatatattttttaattatttatttagaagagttttctattagttccataatgataggaatagcattgctttctttacttttagccatattgtttatataagtatgtctgttttcatacagttcatttacagcatttaaaagaacttcaggagtaaggtcttcttcaaatataacactcgaataaccatgctctttaaaagactttgcattaagtatctggtcgccacggcttgcattggcagaaagaggtatcaaaaggttaggcttcttaagtgcaagcaattcacatattgagttggcacctgctcttgatataacaatatcacttatggcgaaaagatcccgcatctgttcacttatgtattcaaactggatatatccgcctagattgttaagggaggtatccatttttccttttccacatagatggacaacctgaaagctttttagaagctctggaagaatctttcttactgcctcattaacgtgtacagcaccagtgctgcctccgacaaccattattataggcttatcagttgtaaatccacacagttcaagaccagcaagcttattaccaagaagaagctcctgtcttataggagaaccagtaagcacagctttatcctttggaagatatttaactgtttcggggaaattacagcatattcgtgttgcttttttcatagctatcctgttagccagaccaggtgtcatatctgattcatggatgataacaggaatatgcttatttccagcagcaagtactactggtaccgatacaaagccaccttttgaaaacacgatatcaggtttaatgcggcgcataagctttcctgcctgaaaataacctttgataaccctgaatggatcagtaagattcttaaagcttctatatcttcttagttttccggaagatattccgtagtaaggaatatcaaggtcttctataagagttttttcaattccgttgtacgagccgatatagaatacctcatatccagcctctttaaggcttggaagaagtgctatattgggtgttacatgaccagcagttccaccaccggtaagtactatttttttcattatattctccattcttgcgctgcttctcagcgcatctcaagtttgtgcgtaagcacaaatcttgcgtgtgaaaaatcttatttttcacactattctccaattctgtcaaaatatattttgtctacatcttatgtgcgaatctttccttgaaagagcagtgctgacatagtggttctacagcatatttattatggaacccctttgtaaatgcagaacttctctcacattccagaatatttttaagtggtgtgtcaaagatatttccaagcttcataataccattgccatcaagacagcatggtgttacagtaccatcactcagtatagctatatgtgttctaagtccctgacagaaacctcgttcattgcaataactgctgtcaagctcaggccattcaaatggactctgtacattgacataaagatgtttttttatagtacagtttttctttccaaaaagagctggctcatttttagtattccataatctaagagatatctcagtatctgtttttttcaatatttcatcacatgagtagaaaagttcattaatatagttatccatatctatgcagtcgttatcatctgcgctatgcatagatacatttatctgatgtacaggatgttttataagagtgaaaagcttcctataaagcagtgtgccatttgttgtaaggttgacagtaaggccggcatcctggcacatggaaagaatagtatcaagttcaggatgcagcataggttcaccttttacatgcagatatatgtaattcgtatatggttttatttcgtcaagaatatgtccgaattcttcaatagacatgaaatgtggcggacgttttgtttcctggcagaaagaacatctgagattacaggtgcttgtgatctctatgtagattcttttaaacctgcttactgatcccattctattctccgtttctaaaatgtttaattagccttggcaaggtactgctcgagtgcagaagcaagctgatctggacatgatgttggcttaaaaccacatttgatacctttcatacgcttaatagcctcgttaacatccatgccctcaacaagtgctgcaacaccctgtgtattgccagagcatccgccctcaaacctaacacctgtaaccttattatctactacatcgaattcaatcgaacgtgagcatacgccctttgttgtatatttcatagtcattcctccgttttatgttttttgttattgttattattattatgctttgtatatgtcagggtgaaaaatttcagcatgcagctgtgcatgcattttaacacgcagtcacaaatgcattttaacacgctataaatgcattttaacatgcagccacaaatgcaatttagcacctggcatcattcatatcataaatgcttataaagtataacacatattacagtaattagcgaattgacatctataaaattcctgtaaaatatgtgggaaatatgaattctgaaaaatatataaagagtggataagaaagtagatgtaattaaagaagatacaaagagtgggtataaagaaaagatataatagagaagaaaaaaagagtgggtataaagagaaaataaaaagagaagatataaaagtaaatataagatagataaaaatagatgtaaaaatagatatagaaagcagcatatcataatgttgaatgcagccaattactatggtactatatttacgatgaaaataagtcgttaagttattgatatacgtgtaaagactttgtcataatcagataagaaggatggtataagtaatgataggtattataggagcaatggacgaagaagtagctcagattgttgaagttatgcaggttgaacgaaaagagaacaaggcttgtatgacatttatggcaggaaaacttaatggtaaggatgttgtagttgtaagaagtggcattggtaaggttaatgcagctatatgtacacagatattagtagatgatttcaacgcagattatgttataaatacaggtattgcaggttctcttaaggcggaaattgatatagcagatatagttatatcaagtgatgttcttcatcatgatatggatgcaactggttttggatatcctcttggacagataccaagaatggatgtattatcgtttgaggcagacaagaagcttatcgagcttgccgataaagcgtgcaggaaggtactgccagagataggaacacatataggaagagttgtaagtggagaccagtttatatcagataaagtggttaaagaaagaatcgcttctaactttaatggctgttgtacagagatggaaggtgcagctatagcacagacagcatatcttaataaggtgccatttgtaatattaagagccatatctgataaagctgatgatagtgctactatggattatccaacatttgagaaaaaggctatagaaaattcagttaagctgataaaggaacttgttttggaactgtagaaatgttgttgtatagctgatatattgtttaagtaacttattatttatcttgattctgcggattaggttttattcaacaacaaaatatgacccatataagcagttcattttctgcctattgggtcataattacattcaaaatctcccagcatcccaatctcccggcaaaataaattggatattcaacttcgatatagaatacatatatggggattgagtgtgctgtgcaaatgtcgatatcataaaaatattttaacattcactagtttgaagtccttttaatatgtcataagctgcctgaatatcaattatatattaagcagttcactatatactttaagtgctccatcagtgtcgtgggcaagtacgcgctttgcaagaacttttccgagctgtacaccttcctggtcgaagctgtttatattccataagaagccctggaacataatcttgttttcaaagtgtgcaagtaaggcaccaagtgtggcaggtgtcaggacatcaccagtgattatgcttgaaggtctgttacccttgaagttcttgttaagattctcatctgacttaccgcaggcaaatgctacaatctgtgcagctacattagcacataacttctgctggcttgtgctgtcctggatagtaacatcattagcaagctgactgtttctaaagccgataaactgaagaggaactatatcagtaccctggtggagaagctgatagaatgagtgctggccgttggtacctggttcaccaaagataacaggaccagttggataatcaacaggttcaccgaatctgttaacagacttaccattagattccatatcaagctgctgtaaatgagcagggaatctgcttaaaccctgtgagtaaggaagaacagctgtacatccgtaaccaagtacgttgcgttcatatacacctataagagcatcaagcatttcaggattcttaagtggatcgctgttcatggaaagcttgtcctctgctgtggcaccatcaaggaatgcagcgaatacttctggtccaaaggcgagtgataatacggcaccacctacagatgaagtagaagaaaaacgacctccaatgtagtcatccataaagaaagcatcaagataatcagaactcttggcaagaggtgaggtttcacttgttacagcaatcatatgtctggctggattaagtccggctttcttaagtgcatctttaacaaaagattcgttagtaagtgtttcaagcgtagttcctgacttagatacaagtataaataatgaatgggcaacatcgatagaggcaagtatggcagatgcatcatcagggtctacgttgcttatgaatttagcctccattttgaatgtattattcttcttagcccagttttcaagtgctatgtacatcgcacgtggacctaagtcacttccgccgatacctatctgtacaactgtagtgaacttttcaccagctgcgttagttatttcaccgttgtgtactttgttggcgaattcggcgatacgttcctgctgggttttatagaagcttctcttatcaacaccatcggcgttaacagcatcaccaagctgaccacgagtcatgtgatgaagtacaagtcttttctcgccggtattgattacttcaccattgtaaagagccttgaacttatcagcaagctgagcctcatcagcaagctttacaagtgcatttaacacctctgaatcaacttttttagcagcgtaattgtagttcaggccacatgccataggaacattatagtttttcacacgttcagctccagcctcaccagacatgacatctgaaagatttacctctttagtctttttcagttgtgtaaaagacgcaagtgtatcaagattattccaattaatcataaaaaatatctcctccttttttatcgtacatcagtcatgggcaaaatccccgttgaatccgacatctaattatacaagaattatactattattaaatgtcgaaaacaaggcacaaatccgatattttgccataaaaaatccaacattttacaataccttacgctaatattttgacaattaagtctaataaatacattgaaaaatatgtgttcaggacttataatgacgttagaaaacttttgttatatatattgctaaaagatactgcctgcagatatagaaaaggaatcatataaatgcaggtgtatatatggtatggagattagtgtgaaaaataagatttttcacacgcaagatttgtgcttcgcacaaacttaagatgcgcaaagaagcagcgcaagaatggaggattattatgaagattcttatgttggatgcatctacatatggtgaggatgttaacatagacaagttctatgcattaggtgaagtaaaaagttattcaacaagtacaagggaggaagcgcttaaaagggttgccgagcataatccggatgtcgtcattatcaataagatagcggcagataaggaatttatagatgcggctccagctcttaagatgatagctgagaccgctacaggatataacaatattgatattatgtatgcaaaggaaaagaatataagagtggctaatgtagccggttattctacagattcagtagtacagcatacatttgcacttggattatatcttatagagaagatgagctactatgatggatatgtaaagtcgggtgagtatgcaaaatgtccgattttttcacatttctcaaatgtatttcatgagcttacgggaaagacatggggaatagtcggacttggaactataggaaaaggagtggcaaagattgctgcagattttggatgtaaggttgtatattattctgcgagtggaaagacacaggatgttccatatgaaagaaaggaacttgatgaatttttgaaagaatcagacattatatcaattcatgcaccactgaatgataaaacacagaatctttttgatgcagcagcttttgataagatgaagacaagtgccatactccttaatctgggaagaggtcctatagtaaatgatgctgaccttgcagaagcacttgctgatggaaggatagcagcggcgggactggatgtgcttggaaaggaacctatagaggcagataatccactgatggaaatcaaggacagtacaaagcttgttataacaccacatgttgcatggggaacagttgaagcaaggacaaggcttatggatgaggtttacgagaatatagccgcatttagtaaaggcgaaaagagaaatgtagtatcataacaaatcaaaacaaaacataattgtggaaaggatataaaatatatgcagatattatcagtaacagataatgaattcagaaaatatggtcgtatagtggataatattgattttacggcacttgtagaggaattgaaaagaacacccataccagcaggtgttgtatacgagccggcagtaaaggagcttgaagcacttcctgtaagacttgatatatctgaggttgcatatggtgagatgcctgtgcagataggttattgcaacggacataactcaaagcttaatgctcttgagtatcacagagattcagagattaatgtggcagcaacagatatgatacttatgcttggacttttaacagatgtggaaaaagaccatacatatgacacatctaaagttaaagcttttttagtaccagcaggaacagcagttgaagtgtatgcaacaacacttcactatgcaccttgtggtgtggatggaaagggctttcaggtagcagtagtacttccaaaggggactaactatccacttacatcaaagcatgcaagagtgcacaataatattgctgacagtgaggatgcacttcttgcagctactaacaagtggcttattggccatgaagagggtggacttgatgatacagcatttatagggcttaaaggggttaatcctgatataaacggatagtgccataggctaataaataatgcagtattaatcttcttcgataacttgcacttccatataagaaaaatcaatatcgtcaataaagttatcgcttgtgaagcgtaccttggaatgacgtttgaagtctgctatattcgaatcgaaccacataggttcacttaagtcgaattcatagcaggcttcttttattccatcaaatatttttttagtcctgttaagcttttggtcgtcattaactgcgaccatatctttaatcatgtggttagaactgtcaaataatttacaccataatctaaacatgtctatatttcctttttgtatttattttatattatttttaaatttctatttgaaattattttgatgctttcctttttattattcttaataaataagaagtcttctacagagtttttctataactgcttggagactgtttaaatacgcgtttaaaggtatctccaaatgtgttgctgtcagaaaagccacattcacaggctatttcggtcatagaaagctcggactgccttaaaagctctgcagcggcatgcgttcgtacatcaacaagatactcacggaagcggtgtcctgtaaatgctttgaattttttggaaagactggattcactcatattaaacatttctgcggtgcctgaaagagtgatattgtctttataattagcaagaatatattcaactatgtgctgtatagtttcattagataagtccatgcgggaaactacattatctttataagtctggcatctgagggcatataaaagaagctcatgaaagtaagctgttgcatatgcaggggaaatgctatctacaccatggaattcatatgatattttatccagctgctctttaatgtatgactgttttcgtgcgggaatctgaatgacaaagtttcctcctaaaatgtcagatatatctgttattccatgttcgttaaaccataaaagctcttcatcatcaaagtaaagaaggcttcttatattttcttcacctgacatataagtagtcatgtgttctactccaaaaggaatgagagctagagaacctttttttagcatatacatattttctttgatatataatgtacagtttcctgatataagatataaaagctcccatctgttatgcgtatgaaaatgtgacattttgtatgaagtaggaactgtttttatgtctggcagaaaattcgccggtatatattcatgatgcataaaattacaccttcttttataagtattgtaaaactttattgtttaaaagctaacatattttaagtgattttacaagtttcttacagtttttatgtattaatataagtacaatatatattataatcaattcatagttgcaacgtagataataaaatatttttgacacttatcatcttattattttaatgaaaggtatggtaatagatatgatacgaaggaaaagattagtttcatctattatggcaggtattatgtcgggcctgctggttgttggaaatataggagcatttccagacagaatcgtagcgcaggagggtactgctttgcagacaaaaaacatttatacagcagtgaaggatataaacaatgatgagaataactacaagccgcttgacgtaagcgaccctatagagtttggaggtacttatattaagtacgattctgaaactatacagttgtctgaaacagcgatttatcttgatggttcattatcagatgaagttgctgataaatatccatatgtatataacgatattacaaaggcacttagtgacagcagtttaaagaatggaacaaaggaagcacctatgacggtatatgtggcacctttcgtatactggatagatgatccggcagctactgatactaagcagccggataagacatatggtgttccttatggaatgattattaacagtgattatcttactataaagggacttacaaaggatccgtataatgtagtatttgctggaaacagaggccagtcacatgcttgtaatggtaactacacgatgttcagattcaactgtaagggagcacttacagtaaagaacataacgataggtaactattgcagcgttgatcttaaatatcctcttcttccaaaactggatatagataagagaacaaaaactattacacaggcacagcttgctgatatgtctggagataagatgtttgcagataactgtaactttatcagccgtctgaatcttgatcctataggcggtgcggcatgaagcctttataacaactgccattttgagagtacagacgatgcgattaatggtaatgcagtgtttgttggctgtgattttgatttctacggaaacagaccattatattcatcatataatacaggttcaacatttttaggctgtatctttaacagtgttgttttaaatgttgaagctgagccaatgcagtacttcacaaaggaaggcggaacaataacagcagttgattgtgcatataagagcaacttcagtattccttttggaattgcatggacaaagtacccagataagtcacttaagtgctatcagtataacataacacataacaatgaaagcataataatagcaggaaaggatgctgctgaaacggttgatatgacaggaaagcaggtccttaatgcatatagaatagaagatggtggaaaggtatattacaatacttacaatcttttaaagggcaatgataactgggatccacttggtgttaaggatatagcagttaagaatggtgcagacagcatagctacacagcttaatatagaaagcgaaggtaaggtagaagctatagagtcaggaactgaaacagctaagctgacggcaggtgttaagtatttctatggtgatgcagataagaatcagaagattacctacagtgtggctgatgaatataagccatatgtatcaatagttgataataaggacggaacatgcgtagttaatggtactaataacgaagatgaagcaaaggaagtagttattgaagcaagtacggagagtggcttaaaagcatctatagccataacagttaaaccaggtaagcttgcagctccatcatggacaaagcttccagaggtggttaacaatggtgatggcacacttaaagcagattataagctgaatcttggtgacagggcagatatgtcagttattaactggtatagatgcagtgatgcaagtggaagcaatcctgtgttaacagcagtgtctacaatgaataatcctcagtacacatatacacttacagcaggtgatataggatattatatctgtgcttctgttgctccaaagaatataagaagtgacttaggtgatgcggtaaaagttgtatattcagaggctgtgagtgcaaaggatattaaagctaagaattacacaacagatttttcagacttccctactgttaaacagccagagataaaggaaggcttctggacagtggattcgtacagaccagcagatacaaagagctttggaagctggaagggtgaagatacagaaacaccttgggtatatggtgaaactggtaacggttcagttggtgccggaatctatcagggaacacagggagcaagacttatgtatacaccagttgaaggcaaatatggtgatatgactgtcaaggttgtggctgatcctgcaaagacggcaggtcagggctttggtagtgcaggacagtatatggatgtatgcattaagtttgatactaaaacacttacaggctatgcgttaaggataataagaacaaggtcagcttctaatgcagttacatttgtacttgttaagtatgataatggcaatacaacatatatatcagatgaagttatagcaacatgcttccttacaggatgcgagataaccttaaaggcagagggaagcaagcttacagcacatgtagaaacacctacagcacagcttgcagaccaggcagcagctggctatgttcatgtggttgacttaaatgcagatatagaggctaacacatatggaggagcagctatacagcatacaggaacaacaggaactggtggatggcagaatacaactatgcttcacagcttaagcatagaatgggctggtgatacaaaccagaatcctgttgtagaagaaacgacagataatccatcgacagatgaaccttcaacaggagagactgctgaagatgaaacagcacagactgattctacagagaatgttaagacagcagatacatcacatgctggtatatatgctgcattacttacagtaagtgttgcatcgcttatagcacttggatatgtctgcataagaaaaagaagaatataaaaagaatattaagaagataattggaatcataatctaacataatcccggtttaaagttacatatgaactttaaaccggggttactgttttataaagcttgtaatgattatcaaaaatcacattagctttattaaattagttttactacattgtttttactatttttttactgattcagaaaatattatatcatactgatcagatggatatacctgatatatgaaagaggatagcagtgttttggcattttcaagagccttgtcatataatccatttgctatggcatcatttaatgcctcatctgttagctgctttaatgcatcgttatgttcagtaagagttataggtgtaaatatgcttgtactttcgtggagcaccttgaaggaatcaaggtcaaggtcggcagaaagagttttaacctcaggtacagttacatatatgttatgctttgtgtcttctgtatcccccaaactccatgttacatcactgaagttgattccagccttgatgttagtgttatatgtgtatatatactttgattctgtcagaggtatagatatattaaaaagctttctgtccttagtttcaacacgcacagacgttgttgttacagactgtgtagccagctcgccgatattttcaaagcctatctgagtgaccttgccatctgtctggtaactcgttgatgcagtctttttagtgtatatcaaggctataacaagcagggctattattataatgtttattattgtttttaaccctggaaaatgagggcttaataaggacctttttttagtacttttttttgcttctttcaaagcttcattatcatggtattctttattcatattttaatattaatctccattcatgtattttatatgatgtatatcagttatgacaacatgcatgtatcaatcacatcataacacataattgtaatattttggaaaaaataagattaaaaataaagttaaaaataaagatgaaaataaaagtaccccggatacccgttatgataaaggtatccggggctataaagcctgtaagctttgatgtgcggaatagctgccacacgggggattaataaatgctgctcatatcttaaataaaatattggcattatctattaatgctggcactagtccatatttacattgagatgtcttggaagaccatcaaccatgattggtgaaagttcagcctgaatcaatggtcttatgtaatgaataaggtcttctgtaacgaaatcatcttctgtgatccactcaagtggaactttcttttcgatgttagcaatctgatgaacatcatgagtttcagtgatgcacatatatggatcatcagatactctcttaagtactacaactttaccagtttcaccttcaaatgcagcctttacagcagcaccaccaacgttgaaggcttcagtgatatcagtacgtgaagtcatgtgagctgcacaacgctgaagagtagataactcaatagctcttgtcttgataccaagttcagaacctaccttgttggcaaggaacttggcagaaccagctaactgcttgtgaccgaaagcatccacgaactcaacatgctctgaaagctcgaatacatatcttccgtccataaccttgataccttctgaaacagcaataaccatagaacgacctttagaagctatctctttaactctttcaaggaagtggtcgatatcaaataccttctcaggaagatagataagatctacaccttcacaatcttcgcctcttgcaagagcagaagcggctgtaagccatccggcgttacgtcccataatctcaactattgtaacagttgggtaatcatatacaagaccgtcacggataatctccttcatagtagctgcaataaacttggcagcactaccaaaaccaggagtatgatcagtaacagcaaggtcgttgtcgatagtcttaggaacacccatgaacttaatatcgcttccgataagaagtgcatagtcagaaagcttcttgatagtatccatggaatcgttaccaccaatatagaagaagtatgatatattaagttccttaagaatctcgaaaatcttctcatatgtttctctgtcgtcagagatttcaggaagcttataacgacatgaacctaagtaagaagaaggagttctctttaaaaggtcaatatcgatatctgtcttaatcttttcagaaagatctacatactgcttgtcaagaagacccttgattccgtgaagcataccatatactttattagcccctctgtccttagctgtcttaaacacacctgcaagacttgaattgattacggcagttggtccgccagactgtcctacgataacatttcctaacataaatgtcctccgaattataaaaataattaaataataaaactcaggtcagaatccctcgtgacttctaacctatgacaaatatgatgcaagggtcgcaagatcaaagtcatatcatgcaggcacgaaagatttttggatgtgaacttttaactcttacaacataaacattttattaaaattatattaacataattagagcaatcatacaactcaaatgtgcttataaattaaataaattcataaatttagtaaaatctttaatcatatagtggaaactttcaaaaaatttgtagtatactgataataagcacaaggtatatgacagatatctaaaaaagacaatacattataaagaaaagtataagcagtaaaggagatgtacattatgagtaaacagacatggaaaccaggaaatatgctttatccagtgccggcagttatggtcagctgtcagagaggtgaagaaaaacccaatatcataacagttgcatgggcagggactatatgttcggatcctgcaatggtatctatatcaataaggaaagaaagatatagccatgatattataaaagaatcaggagaattcgttattaaccttacaacgaaaaagctgtgccgggcaacggactactgtggcgtaaagtcaggtaaggatacagataaattcaaggatatgcatcttacacctgaaaagtcagttaagataaatgcacctgctattaaagagagccctgttaacatagaatgtaaggtgaaggatatagtggagcttggaagccatgatatgtttattgccgaagtcgttgcagttaatgttgatgaatcacttcttgacagcaagggaacattacatcttaaggatgctgaacttgtagcttattcacatggacagtattacgcacttggtgaacatctcggacgctttggatattcagttaaaaaaaggtaaaattataaaaataaaatatctctaaagcacgtaaaacccctttacaaacagttatatgcgtggtagtatacaattgttacaaaaatgttacggaattattacatggggaaagaattccattgtatatacgatatatggaggaacgtatgacacgcattacaagatatggaagaaaggtgaaaactacctttatctcaactatgtttgcagcatgcattgcaatagtgataggtattccatttgtatctaagaatatgtttaacaatgatgtgggatattacagcatatcgattcgtggtacacatgttggagcagccaacacagaggaagaagttaatgtggcactggcaaatgcacgtctgcagttaagccagcagcttgatgattatatatatatggactgtgatgtccagattgataaagaaaacagggctatagcgtcaagaatgtcagaaaagcagcttgaaagttctatatacagccagttgtttgactgtatacttgatgttgaaaagcagcttgcatatactgtaagaatagatgattatacagttaatctgtcatcaaagcaggatgtagaagaactgttttcaaagcttatacagccatataacagggctgatgagtttgagccggttattaagtctagttcggcggcagatggaacatatatagtgtctatagataagaatgaggagacaacggtgcaggatacacagatagttgcatcattctttgaagacagtactggttctaacggtgaaagcaagaagacaccagatgagatacagtctataggttttgcacagaatgtatctgttaatgctgtatatgctgataaggtagaggtatcaacagtacaggaagcttatgatacaataacaaaggtaaacaataccaatgtttattatattgttaaagagggcgatactcttgagagtatagctaaagataataacatatcagttgaagatttgttaaagcttaatactaagttaaaagaggactcagttatagttccaggtgatgagcttgttataacagtgcctgagtcagatataacagtagtgacaacaaagcagctttcttatgaggaagattacaacgcagagcctgagtatcttgatgataacaacaactatagaggtacgaattatattcttgatgaaggaacaacgggacatcattcagtagtagcaacagttacatatgagaatggtaaagaggttgcaagacagataacaagcgagaatataacagttgaatcaaagccggcaaagatagcagttggaacacttacaccaccaacatatataaagcctgtcagtggtggaacattttcatcaggttatggttcaagatggggcacaactcattacggagttgactggtcatgcaaccagggaacatcagttaaggcttcaagagacggagtagtaacaagggctggatggtattctgcttatggatattgtgtagatatacagcatgaagatggcagcatgacaagatatggacataacagtaaagtaacagtgactgccggccagcaggtaaagcagggtgaagagatagctcttagtggcaatactggtgatagtacaggaccacatgtgcattttgaaatatggatagatggcagaagagtgaatccacttgattatgtaaacaagaattaagttaacttatgaataagggcgtggatattaataatccatgccctgttttaaactttatggatatataacgttgacataataaaaaggtatgatataatcattaagatattgatttaaataccaatattattttagataataaagtaaaagtatacacatgatgaatgttttgacggctttatgtcactaatgcatgatagttgtttttgtgataagccgtgaataccatgatatattgaatataaatgacagatatgtcgataattaataaagaaactaaagcaggaaactaaagttttagatatgatgagtaagtgatattgaggtgcaaagtatggaacagtatgttgtcaaaggtggagtgccactttgtggagaagtgtccataggtggagctaagaatgcagcacttggtattctggcagcagcgattatgacagatgagaccgtaacaatagagaatgtacctaacgtgagagatacaaaggtgttgcttcaggcaatcgaaggaataggtgcaaaggtaaaatatatatacaataatacagttcagattaacggcggatctatatgtgatcttaatgttgaatacgaatatataagaaagataagagcatcatattatcttcttggtgcgttacttggtaagtacaatgaatctaatgtagcacttccaggtggctgtaacataggaagcagacctatagaccagcaccttaagggctttaaagcacttggtgccaaagtgaacatagatcatggcgttgtcagtgctaaagcagaaaaactggttggcggacacatatattttgatgttgtaacagtaggtgccactattaaccttatgatggcagcatgcatggctgatggagaaactatccttgaaaatgcagctaaggagccacatatagttgatgtagctaacttccttaatgccatgggagctaatatcaagggtgctggtacagatgttataagaataaggggcgttgagagacttcatggatgcacatattctataataccagaccagattgaggcaggaactttcatgatggcggcagcagctacacatggagatgttgtcataaaggacgttattcctaagcatcttgagtctataactgccaagcttcatgagatgggctgccagctcatagaaggtgacgactggataagggttatagcagaaggtgagataggaagtactaatgttaagacacttccatatcctggctttccaacagatatgcagccacagatagcagttgcacttgcacttgctaacggttcaagcatggttacagagagtatatttgagaatagattcaagtatgttgatgagcttaacaggatgggtgctaagataaaagttgagggcaatacagcttatatagaaggtgttaagcattttacatcagcacagctttcagcacctgatttaagagcaggagcagcacttgtgatcgcggcacttgcggcagagggcatatcagaaatagacgatatagagtatatccagagagggtacgaagattttgaaggcaaactttcagcgcttggtgctgttatagcaagagtagattctgaaagagaacttcagaagtttaagttgaaaataggatgataatagactgcggagaataatattgtgcagatatccggagtgataatggcagatttatcacaagatatcgcaggcatgatatatttccgcagtttttttatatatttttatcatttttttacaaatattctgttaaaatatgttaaactattatcatgatggttgtaaatatattaatatgacttatatggagaaaacatgaaattaaaagataagttaaaggtttcattctgcgttatggttatacttccggcgctgcttttatgcgtgtttgttgtcggaatatttaagatacagtcggatagtatatgcaagacatataatgtagaagacgatacggtactgttatatttttattcgcctatgacattgtttggcagtattacagatgatgtgtatgagcagataaaagaacaggcagaagaagaaccaacgacatttaacaacagggcataccttgagtcacttggttccacattaaatgacagactttcagagcttgttgtaagaaagaataataatgtcatatataattcaacacaatattcaaacacagatcttgcaaggcttcttccagagtatgagacagatgagaacaacataacggatgttgctacatatagaggtggcatatatcatagtcttataaaacaggtagacttttcagacagcttaggaaatatatacagtgtgtctatcgtcacatctgttaagcagagcataccacagataagacagatgctatggcagcttgtttttatcatcatcatcatacttgtaataaccagccttgtgcttaacctgtggatatacagttctatcatcaagccggttaacaagctgaagcttgcaacagataatataaaagaaggaaactttgactttgagatgccaagggttcctgataacgaaataggtgatgtgtgtaaggactttgaagagatgagacttatactaaagaagtcatcagaggataagcttcagtcagataaagaagagaaggaacttataagaaatatatcacatgatttaaagacaccgctcacagctattaaaggctatgttgagggtctacgtgatggaatagccgatactcccgaaaaacaggcaaagtatattaagactatttccaacaaggttaatgatatggataagcttatagatgaacttactatatattcaagacttgatgctaacaggatactatatacatttataaaacttaatgtttcagattattttgatgactgctgtgaagaaataggcacagaactggatgcctctggcatagagctaaactacaggaatcatatagacaagccggtaatgatagtcgcagacccagagcagttaaagagagttatcaataatataatcagcaactcagtcaagtacatggtagaaggccgtaagggaaagatagatatagacctttatgacgagggcgagtatgtacatgttgtcatggctgacaatggcaagggtatagctggcaaggatatttcaagaatatttgaaagattctatcgtactgatgaatcacgaaactccaagcaaggcggcagcggcataggacttgctattgttaagaaaatcgttgaagaccataaaggcaagatatgggcagagagtgttgaaggcgaaggaactacaatgcatcttaatctgcttaagtataatgagaataaccagcttggaattctgcaaaaataaaatataaaaggaatagaaagggacaattgtatgagcaaagtattgatagttgaagatgaggaagcaatcgcagatattgaaaaggattaccttgaattaagtggattcacggtaacaacatgcaaggatggaacaacaggtcttgcagaggcacttgacggggattatgacatatatattcttgatgttatgcttccaggtgtagatggttttgagatatgcaaaagaataagagaagttaagaatactcctattatcatggtatcagctaaaaaagaggatatcgataagataagaggacttggcgtaggtgctgatgattatatgacgaagccttttagtccaagtgagcttgttgccagagttaaggcacatctttcaagatatgaaagacttgtaaacagtgcccagcctgaaaatgatattatcgaaataagaggcatcaggatagataagacagccagaagagtattcgttaatggtgaagagaagatatttacaactaaggaattcgatcttcttacattcttagcagaacatcctaatcatgtatacactaaggaagagctttttaaggaaatatgggatatggattctatcggtgatattgcaaccgttactgtccatattaaaaagataagggaaaagatagaacttgatacaagtaagccacaatatatcgaaacgatatggggggtaggctaccgctttaagttataatacattacaaaagcctgtttagaacatattatccataagaaccttaaatatatcgtcctgttttggatattataaaactatgagtgatttatatgacagaaagaaggataaatatgataattgaaaaggaatattttgattcagaagaagtcaggaaagcgaatgccatgaatgataagacgatggcaccaccaagaagaatacgtcttgcgacaacggacagtaacaaatattatgccaaagctgtatttgtagccgataaagaaaatataattaccggtgagcttctttacagaccggattttcaggagtcagaagagggagtggcattcagtgaggttgttgttaagcagacagcagatgtggaagaatatttcaagaatcttataaggtttgaaggctataaagtgattccggaagaatatgatgagagtgatatgcttatgcattatgatgagctgagcatacaggctaataagcttttgtttcttgagagcagggaggagtagatatgacagatacgcagaatgaggcgtttaagatgccggtaaacaagatacggctgtttgagcatggggctccgggttcgcagaaccttaagcttacaagaaaatattacactgaggatatgcctgatggaagagtaaagcatatagtgcagaacattacagatccggatattgttccttacatacctgatggtattggtaacagtacagacagacaaaggattccggcagtattgattattccaggaggtgcgttcagacgccttgtatacaactttgaaggtgaagatgttgcaaagtggcttaatagtatgggaatagctgcatttgttcttgaatgcagacttccatcagatgaacatgataatgcagaggatgttccacttatagatgctatgcgtgcaatgagagttataagaggaagggcgcaggaattcggtatagatgaagctaagataggcgttatgggcttttcagcaggaggctttatggcagcgttgttatcaacagcgtatgaaagcgatgtgtatgcagattataagtataaggatgaatatgataaactgtcggcaagaccagattttgctgtttgttcatatccggttataagtattgacgattgtattgaagcaggtaaaagatatatgtctgaggaacaggtacttgagataatcaacgacagtgagacaaagatactgaataagtataatccggataagcttgtaagaccggatatgccgccagtatttatatgtgaaacggatgatgacagaataacattatctgagaacagtgtgggcttttatatggcagcaagaaaagccggggtaagtgcggaacttcatatattcagaacaggtggacatggttatggctgcggtgatgattttgcacagactggtgagtggaaagtgctttttacaaagtggattaagagtattgggattatttagttatgttggatataatatatgaggataaagataagattatattaaacaagccggctggacagttgtcgcagagcggaaagtcgtttgagatggatcttgtaagtgaagtccttacatatagaaaaagcaagggtgaagaagcttacgcagctataataaacagacttgaccgtcctgtatcagggcttgtgctcatggctaagaataaaaaggaagcagcaagactgtctttgcttatgcaaaaagaaacactttgtaaacattatcaggtacttgtatgtggaaaaccagagtccgatgagggcgagcttgtggataatcttataaaagatgcaaagaataatgaatcgtcggtagtttcaaaaggaacggcgggttctaaggaagcaagacttaagtacaggcttctttcttatgatgaagaagcggacatatcaaggctggatattcatcttataacaggcagacatcatcagatacgtgtccagcttgcttcaagaaacatgccggttgctggtgatggaaagtatggtgggaatatggcagcccaggcagctggaaggataaaaggcatacgtattaagcgtggatgcatagcgttatgtgcggttagtcttaagcttgatggcaagttatacgaagtgaaaccaggattttagatataggtataagataatcacctctgtggaatacttctacagaggtgattatttatgtgcagagaggaaagaaatgtaaaagaaaataaagaagagtatcaaaaagaatatcaagataaagaatataacaggaaactgaaataccttgccgggattgtagttataacattttctgtatatgtgagctttaaatatcttcttgtatatgtgtggccatttgtgcttggcgtgcttgctgcactgcttcttgaaaagccagtaaacagtatatatatgtggatatgcaaaaggataaggctggataaaagaaaagtacatgcacaaagaattaaagaacatcgcataaaaagcataatagccacaattataatgttaataatatctgttgttataataatattgcttgctgcagcagttataacaggagcgaatgagataagtgattttttaaagaactgggattacaatacgataggtataaggcagcagactgccaggatatgccttgaagcggatgattttcttggacttgatggtggatgttgtcttgatacgcttataatgtgtggacgcaggctggcaggtataatgcctgaaaagatatttcatatatctgtacctgttataaaaaatatagttatagtggctggaggtctggttgttggctttatatcagttatatatctgtcaacagatatggatgaaataaggacacagatacgtgacagtgtgtttgtggaagagataaggatgctgtggcatgaggtaaagagacttatcaatgtatattttaaagttgaattaagaatcatgtttattaattcagctataagcatggcagccttttttataataaaaagtccatatgcagtcatgctcggaataatagttggagttgttgatgcacttccggtatttgggacaggtacgatacttataccatggatgttgtttaacctgattatgaagaatttcttatcggcagtggttgtgcttgtgacatatgtaataacttattttgtacgtgagattatggagtcaaaatgtatgggagacaagcttggaatatcgccttttgccatgcttgtcattatatttgtcggactgcttgtgtatggtattccaggcttcataaccggtcccgtgagctttgttataataaaagcactggctttaaggcttagatgtgttatgaagatggatgaagtatagaaaaaggaataaaagaaaaaacggaatatatgaaaagtgccttgaaattaatcaggtcagatgttaaactaatacagattatgtgacacatttaacagatagcgcagatagcgcaggaatgaggtatatttatggcagaggataagaagttagtagaagcgattacttccatggatgtagactttgcacagtggtacacagatgtatgcaagaaagcagagcttatgtcatattcaagcgttaagggatgtatgatatttaagccggctggatatgcaatctgggagaatataaagaacgagatggacagaagatttaaggaaacaggtgttgagaatgtataccttcctatgtttattccagaaagtcttcttgaaaaggaaaaggatcatgtagaagggtttgcaccagaagtagcgtgggttacttatggaggacttaatccacttcaggaaagaatgtgtgtaagaccaacatctgaaacacttttttgcgatttctacaaggatgagatacagtcatacagagatttgccaaaggtatataaccagtggtgttcagtagtaagatgggaaaaagaaacaagaccattccttcgttcaagagaattcttatggcaggaaggacatacagcacatgcaacagcagaggatgcagaagcacgtacacagcagatgcttaacctttatgcacagttttgtgaagaggtgcttgctatacctgttatcaagggacgtaagacagataaggaaaagtttgccggtgcagaggctacttatactatagaagcacttatgcatgatggtaaggcactccagtcaggaacaagccacaactttggagatggattcgctaaggcgtttggcatacagtatacagataaggataacaagcttaagtatgttcatcagacttcatggggaacaacaacaagacttatcggtgctgttatcatgacacacggtgataactcaggacttgtacttccacctaaggttgcaccagttcaggttgacatcatacctatcatgcagaagaaggaaggcgtgcttgataaggcttacgaagtaagagatgctataaaggcagcgggtctcagagttaaggttgatgattctgataagaatccaggctggaagttctcagagcaggaaatgcgtggtatccctgtaagagttgagatgggacctagagatattgaagctaaccaagctatcgttgtacgccgtgatacaagagagaagattacagtagctattgacgagcttgcagctaagcttccagagatacttgatactatccagaaggatatgcttgaaagagcaagagtacatagagatgcacatacatatgttgcagttaactatgatgagttcaaggaaacagcagctaacaagccaggatttatcaaggctatgtggtgtggtgaccaggcatgtgaagataagattaaagaagatacaacatgtacttcaagatgtatgccatttgcacaggaacagttaagtgacgtgtgtgtatgctgtggcagaccagctaagaagatggtttactggggcaaggcatactaataatatatgataccagggtcaaaaggtctaaacccacatgagcttgctcataggtgggtgaaaaacattgggacccgccacgatatgagcataaaagtgggatgataatcccacgatatgcgaatatttgggagaattgtgggagtgcgtagcacggaacaattcgtaggtatcaaagtcggggggcttttgaccccggcattaatatatacgaatatatattacagatttcagattattcagactgattcagagtatttcagactgatttgggtagattcagagtagttctgactaatccagattgattaagattaaattaagcggaaaatccataggtaaatgtgggttttccgttttttgattttgacttaaaaaaatttctatcaaagtatcgtgaaaaattcatttgtattgtaatgcaaatgggggttaagtaaaacatccagacaaccgataaacttatcataaagaaataaaaaagttttttgtttataatagaaagagaggcggttagtatgcgtatagatgcttataatgctgtcagccaggtatataagacaagtgcttatgctagggaaaaaggcatggctgttaagaaaactgaaaaagacaagtatgaattatcagatacagccagattatataatacagctaaggcagcagttagtgaagcttctgatgtaagacttgataaagtcaacgacattaaggcacgtattgcagccggaacatataatataagttcagaggcagtagccgagaagatgcttggcagtgtatctacattgacattctgatgaaaaagaatgcatatggtcagaggatgcattggaattgtgcattgctgtacagttttatagtttgctgacacgataatcttaagacggaggagcatatatggcaagcctgatagattgtttaatcgaagaccttacgaatgagaatgatggatatgagaagctccttagtctgtcgaatgaaaaaacatctgccatagtaagtggcaatattgaaaagcttcaggagatatttacaagagagcagaagctcatagaagaagtagatgtatatgagaaaaaaagacaggaagatgtgaaggatatatgtaatgtactaagacttccatatgaagagataaaggttgaacacatagtacagatacttgaaaagaaagctaaagagcatgatgctcttcagaacatatatcttaagcttaaaagaacacttagtcagcttacagcggctaacgagaacaataagctgctacttaaagaatctatggatatgattcagtttgagcttgatctggcaagaaactcagtgttgaagccacagacaggcaactatggaagaacagcttatgaagaacaggaaataacaggtgctacaggatttgatgcaaagcagtgatataaactaaagaaaagtattaaaacagataaaagattataaaagattacattaagtctggtatgtggaaaaggattgaagcagactagacttacatataagtatagaataatatcagatataatataagaatcacattttcaaaggattgaattgggatgtttaatggtactgcggtattagaaccagttttatttttgatagtgtgatttttttaatggaggaattatggcaaacggaatggggtcgctgatggtaggagccacaggcttaagatcgtcacagacagcacttaatacaacagcacataacctttccaatgttaatacagaagggtatacaaggcagcagataacatttgcagattcaacatatgctaacgtgttttctaagagccttaacaaaggcaagtatggcttaggtgtagatatagatgcgataagccgtgtaaggaatgagttcatagacaggtcatacagaactgaaagttcaagactgggattctatgaaagtcaggctaatgcggtatacgaggttgaagactggtttggtgaaatgcagggagttacttatcagcagcatatcacaaacctttacaatgcagtaaacgaacttacaaagaatccaacaagtactatagccaggtcatcacttatacagaatgctacagcattcatagaccgttcagaggctatatatagtggacttaaggattatcaggttacgctgaataccgaagtaaacaacatggtggaaaagattaattcacttggacagaagatatataatcttaacaaaggcatcgttaaggtcgaagcggaaggtgtggagcgtgcgaacgatttaagagattcaagagatcttgcacttgatgagcttagtaagtatatagatattgattattatgagacaaaggatggcgaagtaatagttagtgctgagaatgtcccatttataacaaaaaatgatatcgcaaagatgagcgtaagagaagaaggaacatatggactgcttatacctcagtgggagggatatcagcaggatgtatataactttgacaagcaggcaaacaatgccaatgacacagataaaggcaagcttaaaggactgcttatcgcaagaggtgttatagaggtaaactacacagatattccagtaatgcctgaaagagcagactatgatcttacaacagagcagggtatggcagaatataatagtgccatggatgcgtatcagcagaagcaggattactataacaagtatatagagccatcagctatccttagtgctatagcaggctttgacaagcttgtaaatggaatagtaacagccatgaatgatgttttatgtccggaaactaccatggatacaacaaaagagctcacagatgcagatggcaatatattaaaggcagagaagtatgtatacaatgcatcgacacatgatgtgctttatgacagccatggcaacgtagttgccggaaaagaaaatggtgatggaacatacagttatgaagcatctgaaaagctgtatgttgatgctaatcaggaagaaacagagaatatagacagcatgacatacaagatacttgatatgagcaaggctggatatggcatggatgacgatgaaacaagaggtgttgaactctttaaaagaaacggtacagacagatataagcagatcacaggtgcagatggcagtacaatatatgtaagaaacaacctgaatgttactggctttgaaactgactatacacttggtaatctgattgtcaatcccgaggcttcacagaatgtaggtacactccctctttctacagagcatggcaaggaggatttctcaaaggtaaatgagcttatagatacattcagcaaaaagtttgcatcacttaaccctgagaactatgcaaaggcagatttcaacacattttacaatgattatataggtgagtttgctacgatgggaagcgtgcttaccaagtatgtcaacaaccagacaaccatggtcaatggttatgacaaccagagactgcagacatcaggtgtatcatctgatgaagagcttcagaagatgattaagtatcagcacgcatataatgcggcttcaagatatatcaacgtagtaagtgagatgatagaacatcttgttacatcacttggacatgcatgatgaataacagaggaaccttttgccacttacatcatgatttgataataatggctggcttattttagagcaatcagcagacttagaaacagtaagttggttaaagagactataggaaacaacaagaatggagaaataatatggcatctacattttttggtttatcaatatcatataaaggacttcaggcagcgcagacatccataacaacatcagcgcacaacctgtcaaacattaatacagaaggctatacaaagcagagtgcagagttaaaggcagctgactcgttaagaacattttcatcatacggaactataggtgccggtgttgatgttgtcggcatcaatcagacaagagacagctactatgaccagaagtatagaaacaatatgtctaactatggacagtatgaatcaaagaacaactacatgacacagatagaggactatctgaatgagtttatacttaacggattctctaaagaatacagcaacttcttttcagcagttaaccagctgactataacaccatctgatgaatcggcaaagaaccagcttataaataacgcaaaaagtatgtcggattatttcaacacactctcaactaacttgagaaatgtgcagtcagatgctaataatgagataaaagatacagtagaccacatcaatactcttgcacagaatataacatcacttaataagcagattaaccagatagaagcctgctatggagatgctaacgacttaagagaccagagaaatgcacttgtggataatctgtcaaagtatatcaatatatcaactaatgagacaccgatagcaaacggacttacatctttccagataacagttaatggacagtcgcttgtaaacaactatgattataagacacttgaggtagtcgcaagaacgcagaaaagaaatgcaagcgatgcagaaggattatatgacatacagtggagtgatgatgatccttttgatatatatagttcttcacttggaggtcagcttaaggcacttgtagatataagggacggttgtaatggtgagatagaatcagttgcaacagatgcagatggcagctataagcttgatgatgatggaaacagagtgacagagacgaatccacaggcttcagcaaatgttaactataagggtattccttactatcagtcacagcttaaccagttcatacagacattctcacaggcagtcaacaacatatttaagagtggatatgtatcagatgctaaaacagaggatgctgccaacaagggtatagcgttgtttgtagttggagataattcaaagacacttacagcatcaacagtatcagttaattctgagcttcttaaggatgccaacaagcttgcaacaaagacaacagtaagcgaaggcgaaggcagtgcaagcattatggataagcttaatgcattacagaaggaaagactttttgatggtggtacaggttcatacttccttgaaactatagtcagtgatatgtctatagatgcaagcaaggctaagacatttttaacaaactacaacaatatgaagacaactatacagaatcagcgactttcagtcatgggtgtagatacagatgaagaagccatggatatcatgaagttccagcaggcctataatctaaactcaaagatgatgtcagttatgaatcagatatatgataagcttattaaccagacaggcttataaaatgtgaaatatgccggatatacttaataacatttttatataaatgctttgcacgcaggcacagacaagataagtgtaaaagaatatttatactaaagaagaatatttataaaagaagattattcataaaaagaagattttaaaaatgcagatatcacataaatcgatatagatacgaggtggaatatatgagagttacgaatcagatgatgataaacagttctatagcaaatatacaggctaataagaaccagataaataccatggatacacagttatctacacagaagaagattaacaagccttctgatgacccaatcatagctataagagcactcagactcagaagcagccttgaccaggtaacacagtatgtaaataagaatatacctgatgcttcatcatggctttcggttacgcaggatgcacttgcacagggatatgatatagcttaccagctgtattcatattgcaaccagggtgcttcagattcttattcatcagatgagcgtagtacaatcatacagacacttgacaagctgaagaactcatactatgtgcagggtgatgtagactatgccggaagatatgtttttacaggctttgctacagacagaccgctcacatatccatcagatgttaaagcagctgaggcagattatactataacacagaactttgacagagagagcatcagtgaaaaaaaggtatataccaatgcatatacaaacgaagatatcattaatctgaatgtcaagaaggatgcagacggcaagatagtgacacctaatgtggctacagttcatagaatacagctgggttactcagaggtagatgctgatggaacatttaagattacagatgccagtggaaatgtggctacagtaactaagaatgatgatggaacggctaatgtaacaggaatagtaaatgccaaaggtgagactatagattctctggatgatggaagcggcaatccagtgagtataacatttacagcagattcaaactatataccaggtgatgatgaaatagctattaactcgcagcttggagaagtacttcttggtgagaatgtatacaacaatacatacaccaacaactcattttcagtacagtatgaaaagtccaacttcaaaaagggcgatgtgaatccgacaatgtattttacatgtgtagacaatgttacaggtataagctacgtaaagaagagcgaagatattgaatataacgtaaactttacacagaagcttaaggttaatacacaggcagacgaaagctttgatatatatcttggcagaaatgtagatgatatcatggcagctgtgcagaatactatagatatcgagaatcagataagtaaagtcgagagcatgaagaaggaagaaaagtatgcaggtactgacgaccagaagaagcttgatgacatgctcgaaggactaaataagcagaaggatcttgcaaaggatcagatgacaaaggctttcgagaagggcatcggacagatgcagggatatcaggagaagatatctaatgcaaaggcagatgtaggtaacagaatccagcgtcttgaccttacaaagacaagacttacagaacagaagactaactttacaagtcttaagtcacagaacgaagatatagaccttgaggaagtggtagtaaactatacagcagcacagcttgtttacaacgcagcactttcagcagcaagtaaggttgtacagcagacattgctggattttatagggtaaaaatatgctgaatccataaatgaaaaattcagtatataaaaacaagggagcaaatacctctcctcgcgtggagctcggatttttgcttcgcaaaaaacaaggaggtaaatacctctcctcacgtaggagctcggattttttacttcgtaaaaaacaaggaggtatatatgcaggttgatactaggtggtttggcactgtagatattgatgataataaaatagttacttttgaccttggaataatagggtttgaggattgcaagaaattcacacttatatatgatgtagaaaagggagatgaagcagctatcatgtggcttcagtcgcttgatgaggcagcattggcacttcctgtcatgaagccggagtatatcatgaaaggttatgatcctgttgtggaggatgagatacttaacacacttggtgaggacatacagtcagccaatctggcagtgttctgtacacttacagtaccagaggatcttacaaagatgactattaacttaaaggctcctatcataatcaatgctgacactatgaagggagtccagcttatagcagataatgaggattatattgtcagataccctatttatgatattcttaacgaaaggaagggggagtagaatgctggcattatcaagaaagaaggacgaagcaatcatcatcaatgatgatattgagataacagtaatcgagataaagggcgatcaggtaaagcttggcatcacagctccaaagtccgttcctatatatcgtaaagaagtatatgtacagataaaagatgctaacaaagaggctgtcgaacagaagatagatgtggctgcacttaataaactgtttaagaagcaggacaaataaaaaggcaggtattatatttttacatgtattgccgatataagaaatagaaactaatgaccagtatgcaaagaaaaggatttcttggcagggcataaggtttgatatatttatgacgattgtatgggtgatgtggaaaagctgtcactcgtatatgtatacgcacacggaggtgaaagataatgggaattgagaagataagtggccaggcagcttatcagagccaggcaacgcaggctgcacaggttaacaaggttagtgcagcaccagcagcagaaactaataattcacaggattcagtaaacagcgcagcacatatagctgcagttatgcaggtgagtacatcacagaaagctaatgcagacagcaacagcagtaacaatagcaacagtggtgcacaatcaagctttaagcagcaggaagaacagaaagaagcttctatgcagaagcttaaagatatccagaaggttatcaatcataatacagtagcagagttcggatacaacgagccaactaaccgtattacgattaagattaaggataaggatacagatgaagttatcaaggagataccatcagaaaaggcacttgagatgcttgctaaggcatgggaacttgctggtatacttgtggatgagaagagataaagaattacataatgttatgaagaaatatataagaatggaggaataatatgccaatcagattatcgggtatggtttcaggtatggatacagagacacttgtatctgcacttgtatcaggatataagttaaaaaaagataatcttgtcaaagcacagacaaagctttcatggaaacaggaaaaatggaagactatgaatacaagtatatatagcttctatagtggaaagctgtcagcaggaagattatctaacgcatacagccttaagaagtcaacagtatctaactcaacggtagctacagtaacagcaagctcaagtgcggttgcaggtacacagaagcttaaggtaaagaagcttgcatcatcaggttatcttacaggtggtgaggttaagaatgcaaaagacagttcttccaagattacaggctcatcaaagctgtcagatataacaggaagtacatcacagggaagtgttacactatcagtagacggcaagagtactaatatagagctgacagaggatatgactgtcaaccagttcgttgtaaagttaaaggatgctggtgtacaggccagctttgatgataataatgcaagattctttataagctcaaagacatcaggagcaaagggagactttagtcttacggctaacgataccgccggaaatgattcgcttaagaagcttggcttatatgtaagtccgaataaagcttcaaaggaatacgaagaatgtgatagactttccaagctgacagatggcagcactgcatataataatgagctggaatctatgtatacaaaggtgactgctgatgaggttgctaagaaatatgctgaccagtataatgcagcaaagaaggttgtagatacactgaaaagcagtgatacatggggaacagccaagtcaattaatgatgtaacagctagtagagatcaactaaaagctgatatagctgctaacgcagattataacaagtataaaaaagcaaagactaattcagacggaagtatagttaaagatgaacagggcaatattatatatgaatatgatacagaagccatgaaaaaagacaatgaagaactgtataataagtataataaagacactaagaagcttgaaagctataattctctgatttctgactatacaaagaatcaggagattatggataagctctatgacaatggaaatggttatatcacattaaacaatgataccaaggaagcagtagcagatgcatctaatactaaagttgtagaagaggttaataatacgaacactgattccaaagcaaaagccaaaacactgcttgataacaaaataagtgcggctaaagcatatgtggcagaagcagatgcagcggcttctacatcagcaacaacaggagcagcttcaggtacaacggccgcaggctcatcaacagctggtactacaggtgcagtacgaatagtaggagtagatgcaaagatagaacttaatggtgctgagttcaccagcaacacaagcacattctctatcaatggccttactatccaggctacagcagaaacaaagggcgatgaatcagttactataacaacggacacagatgtagatgctatatacaagtctatcaaggacatgttcacagagtacaacaagcttatcaagtctatggatgaggcttataacgcagacagctctaagggatatgagcctttaacagatgaagaaaaggatgctatgtctgataaagaggttgagaagtgggagacaaagattaaggattcgcttcttagaaaagatgatacactaaacagtgttgccaatacattaaagaatgatatggcatcatcatttattattaatggcaagagctatgcgctgtcaagctttggtatatcaacactcggatatttcgcatcaggcgagaacgaaaagggtgtgtatcatatagatggtgataaggatgatacaactacatcaggaaacgaagataagctaagagcagctattgcaagtgatcctgagacagtagtttcattcttctcacagttatgtaccaagttatatactgatcttggtaacaagatggcatcatcatctgtaagcagtgcatacacgatttacaatgataagcagatgaatacacagtattcagaatacaacacaaagataagcgatgctgaatcaaaggtatcaacatgggaagattactactatagtaagttctcagctatggagtcagcacttgctaagcttaattcacagtcatcttctatgtcgggactttttggttaaaatattttataattatatagtgcattttttaaacatatatagtataatataaaaagtgtttaaagtacgtataatatacagaaatgaataagcattcgggagaggaatagttttatgttatataatcagaatatcgcgcagcagtataatcgaaacaaggtattaacagcttcaccagctgagcttacattgctgttatacgaaggggctattaagttttgcaatattgcttcagtggcaatagaaaagaatgactatcagaaggcacatactaatattgttaaggcagagatgattatagaggagtttcaagcaactcttaatcataagtatccagtatcggaggatttcgataagctttataagtatatatatggattgctggtagatgctaatatgacgaagaataaggagcttcttgaaaaagctactgatgaactaagaggaatgcgtgatacatggaaggaagttatggctcgcgcaggcgttcagaaataatacggcaggtaagcatatggaaacagagaattatcttcagatgatgattgatagtatgcaaaaaaagaaagtcatacttaaacagataatagtttttaatgaggaacaggaagcattattaaaggaagaagatttcaatggagctgcgtttcagaagaatatggagaataagtcggattgcatagatgagcttgatacattagacgaaggattccagatgatatatgatagaatcaaggctgatgttaatgagtacaaggtcagatataaggaagatataaagtttcttcagcagcttatcaaagaggttactgaactaggagttactattcaggctcaggaatcaagaaatcgtgtaaaggctgatatgaagttcagacaattaagacaagaaacaaaggctgccaagagaagtataagtatggctaacacatattacaggaatatgagtgggataagctctgaaccacaatttatggatcagaagaaataatcatcaaattagtttatatacgggctaaagttatgtaacggatgtccgatataataaatagcaggattgatatcctgaaacaattattatgagtggcatggaagccaccagaatttcaaggaggaaactattatggtagtacaacacaatctttcagcaatgaacactaacagacagatgggcgtagtttctagctcattacagaagtctacagaaaagttatcatcaggttacaagatcaacagagctggtgatgatgcagctggtctttcaatctcagaaaagatgagaagccagatcagaggtcttaacaaggcttcttctaatgcacaggatggtatctcacttatccaggtagctgaaggtgctcttaatgaaacacattctattcttcagagaatgaatgaacttgcaacacaggctgctaacgatactaatacatcagttgatagaacagctatcaagaatgagatggatcagttaacatctgaaatcaacagaattcagtctacaacacagttcaacacaatgaaccttcttgatggatcattctcatctaagaatcttcaggttggtgcattatctggtcagacaatcaagatttctgttacaaagatgagcgcatctaatatcggtgtaagtggactttcagtaagtagtaatgtaaaagctggtgaggctatgagcaagattcagttagctattcagtcagtatctagccagagatctaagcttggtgctattcagaacagacttgagcacactattaacaaccttaatacaacaagtgagaatacatcagcagctgaatcacgtatccgtgatacagatatggcatctgagatggttgagtacagcaagaacaacatccttcagcaggctggacagtctatgcttgcacaggctaatcaggctaatcagggtgttctttcacttctcggttaatcattgtcactactataagaaaagaggacggtttatccgtcctcttttttgtgatgaatattaatgcaacaattcttataatgtattaattaagaagtgaagttaaggtattcatagtatcataaaaaactgcgttggcatcataattaataacagattcgtggcatatataagggtcaatgggtgtatattttcccgatcctatattgtcaagaatatgcgccagttcttcagggctattatgcgggtatatgtatccgttgattccatcatgtataatgtcggtcacaccgttaacgggagtggatataactggaataccgcaggcaagagcttcataacatacaagggaaaaaccttcgtattcagatgatattataagagcggcagcttcgtgcacatcgttccatggatgctgtatccagcctttgaatactacctggttacttatatttaaagagtccgtaagctgtctaagctcatcaagcttattcccatcaccatagatagctaagttccatctatcatgggctgtggcaatagctttaagtataacatttacgcgtttctcttctgaaaggcgacccataaatataagattacgacattccgtgttttttttcttatgaaaaggcagcttgtctatatggattgggttgcgaatcagtcttacattgatggaaggtttgtttgaacgtatgtaatgatagctttttttactcaataccataaccaaatcggcatattcaaggctctcaataccgccataggcatttttttcataggtttcaatgggaccatgaagccagcttacaagcttgcagtgggaattggtgtttataatagcaagtctgcttatcatagttaacataggccatggagtagctataagaatattaggagcaccaagctttgtgatatactgctcacacataggtatataatcggaaatatcatgtatggaacggttagtagatatagggtaataatcaattcgtgggtctacccatcgatatgtatattgttcaagctgtatgacacgtacatgtatatcatgtttcataagatatagtgcaagttcattaaggacggattctacgcctccgtttccgccatatggaacaagaaaatctatagttatatttctgttatatgtagatgacatatatacctccgtaatattcaaaatgtgtaaaaaatataatcataaagtgtagaaaataaatgaataagtgattgaatatagctttatattatcgtatactaagtatacgtatatgggcataataattcaatattaaataaaatcttatgtttttttaaaaaatagggttaagtatagtgtaaataaaccgatatacaaaacagcaggtgatactggataggaagaaagtatatcacaggatgaattaatatattgtcagttgtggattggtgatatatataatatgagtatattcaaggaggaatatttaatatggtagtacagcataatctttcagcgatgaatactaacagacagttaggtactgttacaagttcgctttctaagtcaacagaaaagttgtcttcaggatataaaattaacagagcagcagatgatgcagcaggtctttcaatctcagaaaagatgagaagccagatcagaggacttgataagtcagcttctaatgcacaggatggtatttcacttatccaggttgcagaaggtgcgcttaatgagacacactctatcttacagagaatgaacgagcttgcaacacaggcagctaatgacactaatacatctatagacagaactgctatatcagcagagatgaatcagttaacatctgaaatcaacagaatccagtcaacaacacagtttaatactatgaatcttcttgatggtacattcacatctaagaatcttcaggtaggtgctatgtcaggtcagactatagttatctcagttactaagatgagtgcatcgaatatcggtgtaagcggacttagtgtaagcagcaatactaatgcaggtaaggctatgagtaagattcagttagctatacagtcagtatctgctcagagatctaagcttggtgcaatccagaacagacttgaacatacaatcaataaccttgaggcaacaagcgagaatacatcatcagctgagtctcgtatccgtgatacagatatggcttctgagatggtagaatacagcaagaacaatatcttacagcaggctggacagtctatgcttgcgcaggctaatcagcagacacagggagtagtatcacttcttcagtaattatatgattaatagtgattttaaagccaatgattaatagtcattggctttttttaacataagtaattagtttcagatggctaaacaacaataagtggtttagcagtaatgagcagctaattagtaataagcaagtgtaattgcagaagtgataaggagaattgcatatgaatataccaggaggatatcttaacggagagattcgtgatggattctatgttgagagtacaatgaagaaagcatgggcagccgaaatagaggtacttaatgaggtggatagaatatgtcggcagcatgatattcaatattttgctgactggggaactttgcttgggactatcaggcataaaggattcgttccgtgggatgatgatatggatataaccatgaaaagagaagattatacaagattctgtcagatagtacgtcaggaacagggagaattggaaataattaattttcatacagatccagagtggaaagatatgttatcaagagttattaatggtagaagtgtgaattatacagaagaacaccttagaaaatatcatggatttccatatgtagcaggattagatatattccctctagattatgtagcaccgacagaagaggaggataagctgcagtgcagtatgatatctatagtagaggctttttctgctaatattagaaacaatacagcaacgccagaagagatagagcagactacgaaagatatagaacagatgtgtggagttaaatttaacaatcttgaaccactcgcgacacagcttttaaagcttggtgaaagacttagcatgatgtataccgatgaagaatcgcatgcagtagcacttatgggagatcatgctggtccgcgtccgttagatgtatatcctaaagaatattatagtgaaagtatatatatgccttttgaatacacaactattccggtaccggttggatatgaaaagatattaatacaaaagtatggagaaaactatatgattccgtatcttggaggaactaatcatgaatatccattctatagaaaacagcagagagaagtatacagacagatgggaataatagtgtgatagtatgaagaaggttattacatatggaacatatgatttgtttcatcaggggcattataatcttttaaaaagggctaaagagcttggagattatcttatagttggtgttactacagaacattttgatgaggcaagaggtaaggtaaatgtagttgatcccattatggaaagaatagaaaatgtcagaaaaacgggttttgctgacatgattatagtggaagaccatgatggacagaagatagaggatattcagaagtatgatgtagatatatttacggttggttcagactgggtaggaacatttgattatcttaattcattctgtaaggttgtgtatcttgacagaacaccaggaatatcatctacatttttgagaaagaaacaatttaacatagtgagaatcggggttgttggaacaggaagaattgcgccaagattcatagcagaggccaagtatgtcagtggacttactatagaatatgcttataatcctgttaaagatagtgcagaaagcttcacagcaaatgagaagataaaatgtattacgcaggattacaatagctttcttgataaggtggatgctgtgtacatagcatcacccaatgagacacattatgaatatgccagaagagctattgaggccggtaagcatgtcttatcagaaaagcccctttctttcacaaagaatgagagcgaggagttatatagtctggctaaaaagaataaggtagtgcttatggaagcagttaaggcagcatattgtccaggttttcagcagcttgttaatgtggcaaagtctggtaagataggcaagataatagatgttgaggcctcttttacaagacttgcagataaagcatcaagagaaagaacagatgcaaagtatggtggttcgtttcttgagtttggaccaagtgtgttagttcctgttattaagctgatgggaagcgattatgaaagagtaagctttgatagcatatatgacgaatcaggagtagatatatatactaaggcagatataaggtatccggaaggttttgctactgttaagacaggtgttggtgttaagacagaaggacagttggtagtatcaggaactgaagggtatataatagcacaatcaccatggtggcttatgcgacagtttgatgtaagatatgaagatgcatccagaatagagcattatgagccaaggttcttaggcgatggattaagatacgagataagtgatttcgtctctaagattaatggaactgataagaaggactataagctgacatcaggggaatcagtgcttatgtcagaattcatagagaaattcatggattataagaatatgaatagataaattatatggatggatacgtggaaaggaagaaaaagtgaaaacaggaattcagtacgtcgagggtttgtcagtaaaaagagcattagaaagcggatttaccaatattgaattgtgtatggaagatattgataaacttgatgatatcaaggctttgggaggcagaattgctggaataaatattaatcttaactcaatgcttgcatcaaaaacaggtgataaagctgatagggaagtgttgtcagaggatgctgtagaaatatttggaaaagcaatatcgtatgctgcagtcaatatatgttcatacatagttatcaatacagagggagttagcagtaaggctgtgctcgaacagcttgtaagcgagagcctgggactgctaaaggaatgcagtgattgtaaagaacaagtgtcaatatatgtagagaatgggtacagatgcgagtatggcaggtattatcataatggattttctgactggcgtgagcttatgtctcttataaacaacttagaagcactttgtccatatattaactggaaaatatgtataaatgtgggacatacgaatctgcttggaattaatataagagatatggttcgtgtatgtggaaagcacataggactggtgcatattaatgataacaacggacttagtgaccagcatcagatgccatatacgtttacaacgggaagaggtgtactttcaacagactggccaagatttataggggagcttcacacagaaaagtttgacggatatataatattcgataataaaggtacatttgcaagaactccacagaagcttcataaggttatgcttgaacttatgaaggcatgcgtagatgagtgggaagagaactgttttaatgcagaagaatatatcggacagaagaataaaaagcttatactttttggctctggaagaatggcacagacgtatatggactattggggagaaagatacacaccagcgtttgttgtagataataattcacagaggtggggacaacagtttatgggagttgaaatcaagtcaccagaggctatacttgacattccagctgaacaaagaaatgtgtggatatgtaatcttaactacgacattataggcaatcagcttgaaagaatggggatagagtacaggtgttacagggatttatattttatataagatacagtcttcatatattaaatcaattataaaataaaatctgatgtggatatcagtgtgcaaaatcgtgcgaaaaataaagattaatataagtctaggaacggagattatatgttagagataggagtacaaactaagggaatattacccgagatggatatagataaaggctttagactcataagtgaagcaggtttttcgagagttgatattaatatagatacatttcttaaaaataatgatttatatgctggaaaagttaataaattctttgatgcatcagtggaggaattgtatgcgtattttggacagtatacgcaggctatgaataaatatggaataaaaccatcacagatgcatgcaccatatccggtatgggtatggggacgtaatgagcagaatgattatatgcagggaaatgttatacctaagagcattctcatagcagaagtactgggagtgccatgggttgttatacatccattcaagatgcagtaccaatacgatattgcatatgataaggaacaggaaaagaaggataatatagaatatttcagaatgcttatacctatacttaagcagtgcggggttggtgtgtgttttgagaatttatacgaaggtatgggacagagattaacggagggtgtgtgcgctgatccgtatgatgctgtgtggtatatagatacacttaatgacatagctggtgaagaactttttggattctgtctggatgcaggacatcttcagcttgtgaaaagagattcatatgaattcataaaggttatgggaaacagacttaaggtgcttcatcttcatgaaaatgatgctgtaggagatcttcatcagatgccttatacgtttggcagcagccagtatgaaggacaaagatgggatagattatataaggggcttaaagaaataaaatttagtgggactcttagctttgaaacatttccgtgtgtcaatagtttccctacaggtatgacaaagcctgttcttaaagcgatttacggaataggtgagtatatggcagaacagattgagaatatgtgacagatataaaagaagagaggaacagtggtaaatatgcgcataggaataataggaacaggaagaatagctgcaaggtttgcagatacagcactgacaggtgttgaaagtatatacataagctgtgtatataatcctagggaagaaagtgccttaaggttcatacagcagcataatatacaggcgtgtacagccgattgggatgagtttgtggataatattgatgccgcatatgtagcttcaccacatgagactcattatgaatatagcaggaagcttctgcttagtggaaagcatgtattgtgtgaaaaaccagctgcacttaagaaagagcaggtcagagaacttatagatatagcacaaaataaccaactagtgtatatggaggctctaaaaacagcatactgccctgggtacaaggcacttataaagatagcagaaagcggaagaataggaagaatagtggaagttgaagcagctttttcaaggcttacaccgcttaatacaagagagtataaggatgatgattgcaatggaagttttcttgagtttggaagttatacattacttccagtgctgacattgcttggctgtgaatatgatgatgttacattcaggacagtgagggcacagaatggtgtggatgcttataccaaagcatttattgaatataaagatgaatatatagataaaacagctatagtaaagacggggttgggtgccaagacagaaggacaacttgttgtaacaggtactaacggatatatacttgctaagtcaccatggtggcttacaaaggaattcgaagtaagatacgagaatcctgggaagatagagcgatacaggtttggatatgaaggaacaggactttgttatgaagtaagagaatttgtgcatagaattaaaaataatgataaaaaaactgtagatatttctgataatataagcatagctatggcgggagttatggagagatttactgattggaacacaccgatatataaagataggcatgatcagtttctggcgacaggaaagaataaagctatgcctaagatatgggcacataggggctgttgtacgttatatccagagaatacacttgaggctttcagagcggcagcagagcttgatgggataacaggtatagaactggatatacagcttacatcagatggagagatggtagtgtttcatgatgagaatcttagaagagttacgcatatagacaggaatgtaaggggatgtacgcttgctgaaataaagaacatagctattccagctaatgatggtaagtattgtagtataccaacacttgaagaagtacttgttatgatgaaaccatattgcgaaagcagagggatacttattaatatagaacttaagacaagtattataagatatgatggcatagaaagtaaggcatatgaaatagtaagaaaatatggaatggagcagtatatagtctggtcatcattccttgctgaatcagtggatatcataaaaaagatagaccgggatgctaaaacagcagtgcttgcaatgtcgatagaagagtgcatatcaatggcaagagatacagctgcggatgcacttcatccatacataggaggacttgtttatgcacttccacaagatatgcaggggatgcctgtaagggcatggaatggagatgaaccattctttaacgatggaagaccattaaaagaagcacaccttgaggaatacagatattatggagccacagatatatttacgaatatacctgaaaggtatgtgtgattataattatcgctatgaatattatatctaccattgagttataccagcttctgctatcttatcattaatgagctggttgaactctgaatcagatagttgtgtattatattcatattcaattgtttcacgaagagagttttcctgttttttgtaaaaaggataatcgtgtgaacttgaacattgtacaggtgtcatataattatcaccatactttatcttaaggatgccatcgtaaccagctggaacggggatagtagtgttttcaaatggcatattgatagtatcggagtaccattcaagtaatgcgtgataatcccatccgcaggcaaggtctatcatggaacatacctcattggaattctgtggaggacatatagcagataacatatcaagaagctttttaagttcatggactaaccggttgttatagtcaaatgatacattaaacatggattcaagctggtggattacattaagtacatcatcactataaggaggacattccggaatactagatgcagctgacaagataaggtttataaggcgtaactgttcatttagtgcttctatgtccttgttgatataatcaatcggaaaaatatcaatgccaataacatatggacagccatggaatcttttaagataatctttggagaaattcatatgacgtccagttataatacgagcctttacattatcatgtccggggtcattgtacagacttttaagctcaaagtattcagataagagtggtggtgcaagctctaagaagcgcatgtagtcgtttcttaacatgcctatatcaagatcatcatcccatggaataaagcctttatgacgcacagcaccaagaagtgtgccccaatcggcaaagaaacgtatgtttaatatgtcacatacgcgtctgatttcttctaacacctcaagctgggcagcccacgcatgtttcattctggcatctataaagaaaccatcttttgtttcagcattgaaataattctgggaaaatgtaagcataatgaatctccttaatatgttattatgagcgttttattgatattctgacaaaagtatctatctgaaagactagcataatattgaataggtgtcaaaagagattgttataaaataaaaatagtaggaaagaggtatatatatgcagataccagagggttacctggaaggtgagataagagatggcttttatgttgaaagtatgatgaagaaaacatgggcagcacagatggaagtgctggcagaagtggatcgtgtatgtaaaaaaaataatatccagtattttgcagactggggaacgctgcttggagctgtaagacacaaaggctttgttccatgggatgatgatatggatataactatgaagcgtacggattataaccatttctgtaatatagcagagaaggaaatgccgggttttaatatagtcaatgtacatacagagccaggatgggattcactggctgccagaatagttaatggtaagagaataagatatgataaagaacatcttgaaaagtttcatgggtgtccgtatgtgataggattagatatatttccactcgattatgttgcaccaacagaggatgaagataagctgcaatgtgagatgatacgaatacttgatatattcgggcagatggttactaaagataatcagaatgatccacaggtactcgctaacatacacggcatagagcagcagtatggggttaactttgactatgagagcgatataccactacaggtacagatactcagcctgtcagaaagaatgcgaatgatatataccgatgcagattcagacaggctggcacttatgactgaccatgcaggtccaagaccagcagatgtatatccaaaggaatattacagtgacagtatatatatgccatttgagtatatagaagttccagtgcctgtaggatatgacaaaatattaagacaaaaatatggtgatgattatatgattccatacataggaggaactaatcacgaatatccattctataatacacagaagagagtactatattcccagctaggtatagagatataacaggtgtattattgtctgatatcgtaattattaagaaaaatctggcggtatttctcataatagtcaacaggagaaggcttagttgaaagttcatgtaaaagtgttatatctgtatcgttaagaaataccgttcttaaaccgtgctttctgaattcatatgtttgtgatatatcataaaaatgccagttatcaaagaggtcttcgcgccagtatatatctgtgcatgttgccatgaatatgccatctatggctgctgcatcatctatggttccatcagtatgtgaaggtgtgcaacgagcaacattaagtaaattatcctgatatatgttgattctgtaaaaataataatcacttgaccaccatattccatcatcagtcatcctggtagttccactgtttccaatgttcattattgctttgattattattctgattgttattgttttggttgttattagccatatgaaatattcctttggtattttaaaataaacttttattaatatatcggcataatgttagcacaacgtgatagtgatatggttgtgtgcctgatgaagcatgttgtataatcaggtaaaaatatgtttaataagtataaggtgaaaaatatatgatagcacaacgtggaatagaagatatagtgcaatactgcagcctgagtgaggaagatagaagcgatttactgaggtattttgaaagaacagggaagaataagataatacagatatcagatggggtatattatacatacaaattgttgatgaataataaagaacctcgggatataagagttgagtatggtccggatatgttttatatggcacataatataattgtggaaaggcaagaggcttgttctggtgggaaagtcatgggaacagatgattccaatgctgccagatatgccatatgaatgctggtatgaggagtcacttacagaggaaatgcttacaaagcttggaaatggtatgaagaagctgcacattatgtatggaatacctcatgcagaatcaatggacagatattatcaggggataatgtattatgaagagataatggcattcacatttatgttttctgattatagacaatatggagatgaaaatccagataagcattttctagttattgatggaggatatgatagtcttggtttgtttgcaatatttgctaaagtagaaacttgtgcaaggtatgccaaaagtaaaggctttataccagtaatcagacttaacatgtctggcagcagtttctatcagaacagtccatatgatgatgtgtggagcaagttttatgagcagccagagggctattctatgaaagatataagtaaaagtaaaaatgtgtattatacaccaacattttataatggaaatgtaacagacggtataatgaatattatatgtgaaggcgtgagtcttagctggaataaaggcatatataattcaagaataaagttatatgtaaaagaaagaatggagaggtatcttaaagaaccagagcatactttaggagttctggcaagaggtactgactatgtgaatacacatctggcaaatcatccaatccatgccagcaaagagatgataggcgataagatagatgaaatgcttatggcagatagttcactgaggcatatatatatgtctacagaggatgcatcgtatcacgaatattttactaacagatatggtgataaaatatcatttacagatcagaaaagatatataactaaaaagggacagctgttatttgatatgcacaaagaagaacaggataaaagagacggctttctactgggggcagagtatatagcatcaataagccttctttcacgttgcaggaagctgcttgcatcaggtggatgtggtggcgtgagtgaagccataagggaaaatgatgggagatatgaagaagtatatgtgtttgaactgggggttaggcttagtgataacgaataaaataatagccaagctaggatatacatccatgcttgactattatctaacagtttgtgaaaactaaagaaccgccgtatacggaaccgtatgtcagactgtctaacaattcgaataaatggtataattaaagtgcaagatattgaatctaggaggattgattatggcatatattgttggaattgatagaaaccagacaagaatggttactatatcattagatgatcttatagatgaagataattcggtacgtgtaatagatgcttatgtaaattctttggatttactggaattaggctttaaagaatacgatggaactaacaggggacagtctccttatcgtcgctctgatttattaaagctttatatttacggatatctcaataagattatgtcaagtcgttctttagaagttgaatgcaagcgaaacatagaacttatgtggttgattaatgcaataacacctgatcatggtactatagctggatttgtaaagaacaatcgtgatacttttcataaaactttgcgtaatctaactcttattcttaaaggatggggattaattgatggtaagcttatagctatcgacggaactaaaattcgagcacagaatagcaagcataactgtataactcaaagcggattagaaaagaaaattgcctatgctgacgaacagataaatgcgtatcttatggcaatagaaaaggataatcaaagcgaacccgagttgaagaaaaagttagaagcttatcaagaaataaaaaagcagtatattcagcaaaagcaggaacttgatgatacgggacttgagcaaaagagtcttactgacccagattcaagacgaatgaaaaataatggttctttagatatatgttataatgttcagtctgttgttgatgccaaaaatcattttgttatagatatttcaactaccaatgatataaatgatcaaaatcagcttcatgtcatggtaaagaatgcagccgacatgcttgagcccaatcaatgtactgtaatggctgatacaggatattacaatgcaactgaaataaaaaattgtgttgatgatggaatgacggttttgattaagaaagcaaaggctaacaatagcacaaaagagaacgaattcagaaaagaaaaattcaagtatgattctgtactggatatatatatctgtccagcaggccaacagttagaattctttgagaatacttctaaaaatggaatgaaatatagaaagtacaaatgcaattcttgtggtgattgcaagtatagagacaaatgtacttcttcaaaaaatggtagaaccctacaaagatgggaacatgaagctatattagaaatagtctacgaagaaacttggaacaagaatgatatatataagcaaagaagatgtatagttgaacatccttttggcacagtaaagagatctttaggctatagttttttcttacgacatagaactgaaaatgttgatgcagaagcctcatctatgtttatcgcttataactttaagcgattattagccatgttctcaacgcaggaattaatagcaaaattcagttaaaagattgaaatataaacagaaatattaggattatagtaactaataatcgctattaatataatatttgagaaataaagttcctaccgagctatcagcctgctaacatatcataataaaaatgaatttgttagacagtctgatgtacggtggtgtgggaggacggtaaataaaataattatttacctcctacccgatattttttgtgaaaagcgtaatgttttgcgtaatgattataatcctttggaacgtctgattattccagccattgcctttggtgttgtaagttcattatcggttctgaatcctgcattatcatgcaatgcatctgtaagttctgttcttgtatagttaggtatataaccatattgcccaacctccctgacattcattttgcgcagggtgtttatgatttcttcacacgtaaagctgttatcaagctgtttttcaagtatcctgtaaatcataagcgatatgaagcaggtgagaaaatgtgcttttatgcggtcatcacggtgaagatatacaggtcttgcatcaaattcagatttcatgattctgaaggattcttctatttcccatctgtcatggtttatcctggctatttcagccggatcatcatcaagatttgtacatacggcataaaaaccatcgtactttgcttcttctttgatggcatttatatttaactcatatgcagctttttctgcgatttcaccatcattagtgacaggagtttttttgataaatctttttgcatctgtaacagagtgtttgtcatactgtgccggatgctgcagatatttctttgctctttcaatctggcgctcacgtatagtctgctggtatagcttgtatttgagagagtatgtgacaataagtgtctggtcaaatgatatatccctttcttcatcatagccttcaacaagcatctgcttataaaaaatcttgtttctgttttcaggagtatcctcaatttcagaaatatcataagttttcttacttccctctaactgccagcctttgcagtcaagacaccattcttttaagctgcttttcagttttttgatagactgtgttgttataaagcttctttcaccaaagttattaaaacggcggttggcatctgatgataatccggcatcagtgcatacaacaaactttgaaagctcaaagtcacgcataatctgctgttcaagaggttttagcgataactgctcattctggtttcctgaattaatgcagaaggcaagcggaatccctgatttatccataaataatcccatctgtacaatcggattaggtctgtgttccttgcttggaccatactgcttcagtccatcttcgtgttcaagttcaaaaaagtaattcgtgcagtcataaaataaaacaccagtattgcgtttaacaagcttttttgaacgcttgtaaagttcagcctgtataaagtccgaattgtcagcaagaacagaaagagcacgataaatgtggtgcaggtcaaactcgggctgttccagaagttcttttgactgttcgtagcaggatagttttgaagaaggaaaaagaatcctgccataaataagtcttgaaaggatagcattaaggtcataagtgaaagcattatcctttttaattttcttgcatatggaaggtaattcaagctggtagtaaattttttgaaggaagagataaccagtattaaatgacaattgtttgccagcaggaatcagttcattcgtggaaaaacgcacaaagtgttcaacatcttttgcagctttttcagcagcatttaactcattgacgtgagagcgagcccaggcctcagcatcatcaacgccataagtttctttgataaaagtttcagtaccaagtttttctacaatctcagaagtatttttaccatttttctgaacggatttaataacataaaaagatttagcattctttgatggactaatcattaacctcataaaaacagacctcctaacctttaatactattataacacaatacggcaatacggtctatgggaaaatggaaatttacaaaaaaataagaccattactggcctgagagggttttggggtgtcaaatttccgcgtgaacaaaacgctttctatatattgcattagcaatatatcaggtatatactataaataaaattatacaaataggatttatgttgaatcttaatggttgcgtggagaagcacataacagatacatcatgattataagccattcgagtcgttagtattcggatggcttgttgcttttgatagaatggaggggttaaaatgaagaaaataaatataaaatatgtctgtgctttattaatatgtttattatcttgtatttttataattgcttgtggtacgaagaagaacataaaaaatgaggcaaataatatttgcacagcatttgaatcaaatgatataaaagaaatagaaaaaataataatgggaacaacacaaattaaacaagatgaagaattaagtgaattttttggtgatgaaacaaatgaaacaaaaaatggtaatggtattatatacgaaataataaaaaatagttctataaaagtaaaaaaaataaaacaaaattatatttgttacgaaatagaatctcctgaacttgatacaatatttcaggatgtatacaagaatgatgatataaaaaatttgaaagaagatttaaaagaatatatagataatgccaataggtcaaaaaaagaagtaacaataaattatagatatgataataatatttttaatgctgattaccaaaataaagaatttgttaatgctatattaggtaattgcacagtaagttatcaaaatatgattaatgatatatttaagtagagaggatataggtgcatatgaaaaaaataattagtattgtgttattgattgttactataattacttccagttatatatattgtgatagaacaactgctaaggcagaagaaaaagaagagtattatagtataccagtaaaatatttaggggaaaatgaaggtatagaatatttacaggttatggtatatgatgaaaatgtatacgtaaatgctgaacaattatatgaaagattaggatatagtgtaaaaatatgtgatgagtatgtagctatatataataaaacaaaaagtgatgatatgccatatggaattacaatattttattataatagtgacaatataaagcatatgttatttaataaattagttgactacagggcggctttttcaagtagaaaaattgatgataaagcttgggttccattagaacaatcattattaattttaaatagtgggtatattagaactgaagatgctttttgtattcaaaagcctcaaaaaaatataatagatatatatactgaattaatgatattaaatgaagagtatagctttgattttacaagagatataggaatatcaccagataatttagatactatggcaaaatcggcatattttgtaacattattaaatggaataataaaattagatgatggagtatcatgggcagagttaattgataaaactttatattattcagatggagatggggcagcatatgattctaaatatggtcagaagcttgccactttattttgtacatattcaagtgatgaatatgaagatgaaatatatagtatgaaaaaggtagtagatgaattacaaggagatggaataatagaggcatcattatatggaattgctaatgagaacatttataaaatttccgatttgcagaaaaaaatagagaaaatagtaaataattcagattataaaattaataatgataaaacatatcaattattgcaaaaattatataaacaaaacagcattttatataattttgaagaatttgctaataatgttgaaaatgaattagcaaatgtatcagatatgttatctaaaatagttaacttggtagaagttacaggttatgtatcagaatttatggaggcagaagatttttctaaaatagcattaaaagaatttttgaatgatacacaatttggagatattggattagtagaaagaatgaaagatacaatgcaagattatctatatgttcttgatagtaatgtacttacgtattcagtaataagatatattcaagaaaattatatggatataattttagataaaaaaatattgagtgatgtattaggtgtagaagctgtaataatatcatttacatgggatttaatatctaataacgtgccatattttaaagatggaattgaacaaactgatgagtatatattatcaatatatgcatcaattatgggaaattatgcatttagcagttatttaagtacgagaaatgttatatttacagatgaaaatcaaattacgttagataatttgagtgaattaagtaaaaagtgttttgcatatttaaaaatgatatatatagaaagacaggcaagtttaggtgcattaaatgatgatacaaaatctcaaattccaagtgttataaaagaacagcaaagtataaataaacgtatcgcaaaattattaaatatattacaaaattctaattcacaaaatgatgataaaaaatatgggtttttacctgaagataataatgaatttatatcagaaactaaaaaaacagatatattaaattgggtagagagctgtgatgttaggaaagaattaattggaaagtggaaaatagatgcaactatgacaatggagaaaaatggagtttcaatgacatatctttttggaacaggatataaatatggtagtctaatgcaattagatgcggatggaaaattctcatattatttaccgatggatgctaataataaaggaacatggcgtttgcagggttcacaaattgactataatttatacaattatagtccagaagagggaacaatgacgataataaaaaatgaaaacgaaaatatcattgtgatggattattttgaatataagatatattggaaaaaagagcaggtaaattctgattatacaagtagttcggattataaacaggcatataaaagatatataattgaaaactgtaataatagtgataaagataaatatcaatttggacttgttaatataactagtgatgttataccccaattatatatagaatacggaagtgtagctaaaggtgctgcattatatgtatattataatggtgaaattaaagaacaaagaatgtatgagcatggtttatcatatatagagtacaaaaatatttttatggatgcagggggacgtatggatgaatattataataatatatatcaaataacggatgatggaataaagaaaattgctggtggcagatttggggctgttgataattctaaagtgcaatatgataataatggaactcctatatatcagtatttttggaatgaaataaaacttgaaaatgaagaagaatatgaaaaaatgcttaatttggcatatgatagaaaaagtgcaataaatccatttgaaaataaagctggtaataagtcaatgtgtaattatgaagaaataataaaattattaactaactaattaatggcttgacaaaagattatatgcttattgaatgaaatgaaaattaattcattagcggtaggagatatataaggttaagaaaacaactatgctatccgatatattaaacatataaattggatttataagtcatacatatattaattaatgattaatatatgtatgtgtgcgaatggagtcgctgaatgaatatatcggaatagttgttatataattggttaaatatagcaattggtgtatgaagccctgcatttgtatgcagggctttagtaatatatctacaaattacacagtatataagcataatgcttggtagttcattagaagtgttgatattatagatgtatgcttcgataaagaggtattgtaagtttttgtagacataatttaaatttatcaagtaaaggaaaacgatgttatgggttgctatataagtgataatgatgttttatatgcgtttaatatatgggatgtgaattctgctaaagcaataattgatgctgcaagtaaattaaaaagaaatgtaatactacaaacatcggcaagtatttatgaaaaaatagatataaaggcaataagatattttgtgacatactattctaaggaaaaaaatatacatgcatggttgcatttagaccattgtaaaaaaatgaatataattgatagtgccataattaacggatatgattctgttatgatagatgcatctaatttacctttgtatgagaatataaaaataacgaacgaagttgtaaaaaaagcgcattcaaagggcgtaattgttgaagcagagcttggacaaatacgaggggttgaagaaaacattgtgcacaataaaaatgattatgttagcttaaataacatagatgagtttatagaaaatacaaatatggatatgatagctgtagcatttggaaatgcacatggggcatataaaggtacaccaaaacttaattatgaaatcgtaagatatgtaactggcaaaacggatgttccttttgttgttcatggaggaagtggcctgtcgaatgatatattaaaagagttaatgtctataaaaggtgtaaataagataaatatatcaacagatgttaaaatggcttatagagagggaatattaaaatcgcttgaacaaaagctttttgatgaagatggatttcaggcgctatgtatagaagataatatatataattcaattaaaaaaatggcagagtcaaaaattaaattgttagatgaggtataatgaaaatgaaaaatgtaatggttatcaatatggggctaaagagtatccgctgtatcatatttaatcaaaatggagttaaacttggaagttatgcaattgcaataaataccgccattaatgattattgtgtagaacaggatccaaatgagtggtgggaaaaagcaaagcttgtaatggctaattcattaaaagatgcaggaaaaccttatatagattttataacagttacatcatctgcatcttgtttggtatgtgttgataagaatggtaatgcattacaaagggcatatatggtatccgataagcgtgcggaagaagaagcaaaagaaataaaaagtacaagagagtttactaacatatataatgaaacaggagtagatatatcatcaagtttaatgttgcctaaaatattatgggtgaaaagacatttatctgatatatatgacaaaacagaattttttatgtcacccaatgattttttgatatataaattaacggggaaatgtattactgattattgtaatgcaattaaatttcattatgatttggaaaagaaaaattatcctatagaattattaaaaaaattagaaataaaaataacagcgtttcctgaagtagttaatattggagaaaatattggaaatataataagtaatgttgcggatgatgctggactaaatagagaagtaaaggttgtaatcagttcatatgatgctatatgttcatttataggaagtggcgtaaatgatgaaggagaagctagtgatgtttctggtacagttacagtatttagaacaattagtaatagtgcaaaaaaaacatccaaagtttataatataccatactataatgagaatactaatataataggtggctctaataatttaggtggtggattaatagaatgggtaaaacaatgttattatttgaaagatgaatatccctatgaaataatggaaaaagaggcagcagaatcagatgttggagcaaaaggacttatttttttgccgtttttattaggagaaagaactcctatatgggacagtaatgctaggggtgttttttttggattagaaagaatgcatacaagaaaagatatgacaagagcggtttttgaaagtactggttttatagatttgagcataattgatgctattaaggaagcaggggcagaggtaaatagtgtaagattatcaggaggacttgcgcgagttaatttaatttcacaaattaaagcggatgttcttggacgagaagttttagtgttgtcagagtttgaaacaacagcatcaggagcagctatgatagttttaaaaggtcaaggtgtatattctgatatgaaactgattgctgataaatttgcaacaattagaatgattataaaacctaatatgaataatcatcaaatatatatgagcatgtatgaattgtataaagagtcatatacagctctcaagccattatttgaacaaagaaaaaatgtagtagataaattgaataatgataaagaaataaaaatagaaaacttataggtgtagtatatatgatagcatttaatcttaatattaaaacgaaagtatattttggaactaacattataaaagattctttggaaaaagaaaacgataacataaaaggtaatattttaatagttacaacgggtggatcgttgattaaatatggctatttacaggaattggttgatatattgtgttgcaataaaaaagttactaatgtgttgatttacgaaaaaataagtaaaaatccaaaacttaaagaggtaaaagatgcaatctattatggtataacaaataatatacaaatggtaataggttttggtggggggagcgcaattgatgcagcaaaagcaattgctgttggaataggttcacataacgatattgaagagtatttatttaaaggattgacacctggcaaagaaacattaccaattatagcaattcctacaacagctggtacagggagtgagttaagtaagggggctataataacatgttctgacaatttgataaaaacaggaatacgtggagaaaatatattgccaaagatagctattgtggatgcaaaatatactcttacagtgccgatttctgtgtcaatggagactggctttgatgttttggcacatgcaatagaatcatatgtatcaagaaaagcaaatttattttcagaaatgttatctgaaaatgcaataaaggtagtaagcgagtatttacctataataaaaaacaaaccagatgatattctggctcgtgaaaagctatgttatgctagtatgataatggggctcaatcttgcaaatgttggaacgtgtttaccacatagaatgcaatatcctataggagcaattacggatacaagtcatgcagctggattaattgggttatattcggtatggataaaacatgaatatgatgttaatcctaaaaaaataaataatgttttgaatttgctgaaaaagaatagtgccaaatgctcacaagaagcacagtgttattttatagaatttttagatcaaataggaactaattacaagttaagacaattaggtatagatataagcatgataccagttttatgtgataaaataacaggcagtattgagaatgataaattgcacaaagaaaaagacataattcgtaaaatatatgaagaatctatataaggagaataatttatgcaagcgataattatggcagcaggaaaaggaagcagattgggaaatattacacaagataaacctaaatcatttgttgaaattaatggaataaaattgcttgaatataatatagcaatgttacatgagtatggaataaaagatatagttgtagttacaggatataagacagaaaaaatcgaacagttatgtaagaattatgaaggaataagatgtgtatttaatcctttttatgaaagtgtaaatgtattggggtctttttacattggacaaagttatataaatgatgattttatatatatgcatgcagatacgttgtgttcgccagtgatttttaaaaaacttcttaataaaaaggcagatatggttcttcctatagattttaaaatatgcgatgaagaggctatgaaagtcagagttgtagatgatatagttattgatataagtaaaaagatagaatatagtatatcggatggcgaatttattggaattgcaaagatatcaaagaatgtattatcagatgttaagaatgcaactaaaatattgatgcagaataaaaaatttgattcgtattttgaagctacaattaaatatatgattgaaaatcagaaattcaaacctgtggcaatagctacagaaggtgagttctggggtgagattgattttgttgaagattataatagagtatgtgttgaaatatcaaaagaacttatagaaattgctggtagaaatataaaatgttgaggtgaaatttgtggaacatacagttgcgacagatccaaaagaaattaaatacataaagaaaagatgtagaaaagcatttcgagaaaaactatgcttttatatatgcagaatatttccgattaagaagaatcttataagtgtatgtacattcgagggaaagggaggatttggatgtaatgcaaaaccacttgttaaaaaattgcatgagatgaatccacaatacgagtttgtatggtttgttaatgatatggacaaagaatttcctgaatatatccgtaaagtgcctaatacattgtggagcagagcgtactggctgacaagatctaaggtgtggatcgataattatagaaaaccgtttggaacatgcaaacgtaagggacagtattaccttaatgttaatcattatacgatagcaattaaatgtactggattattaagaggcaaaggattctcagagatggcatatctggtaagcaagaatgattcagatatgatagatgatctggttattgattcagactggtgtgagcagagttttgacaaggcgttggtgtatgagggtacatatttaaagacaggagcacctagatgtgatgtcttgtatggcgatagaagcaaattgaaagaaatattccgcaagaaatataatcttccagagaatgcaaaggtgataatgtttgcaccaacattcagggaggaagctaagaatggtgtacgcagcgtttattctgaaatatggtcaatagattttaagagacttatagataatcttgagagaaaatttggtggagaatggtatgtgtgtataagggttcatccgcagttagcacctacattcagtgagtataagaatccagaagtacagagcaggcttattgacgaaagtcaggcagatgatatgtatgagatacttgcggcaatggattcatacataacagattattcaagtgcatgttttgaggcgggttttgcacatatacctgtatttatatacgcagatgatatagaaaaatatgcaaaagacagaggggctttaatgtggaatatagccacagacctaaggcatgatataggaaataataagaaatttactcctaagatggatgtgaaattcccgttcccgatagctagcgataatgagcaacttgaagaagatattatgaaattccgacaggatgaatatgatagcaggcttgatatattccatgagaaagtcggacttgtgtttaatgggaatgcaagcgagaaactggcagaagcaataataaaacatggtggtatgtgacatgaaaaaagtatcaataataattcctgtatataatacagcatcatatctgagaaaatgtctagatagtgcaaagaatcagacatatacaaaccttgagataatatgtgttgatgatggctctacagatgggtcagagaaaattgtagatgaatatctggatgatgaaagatttgtgataatccataaaaaaaatggtggagagagttcagcaagaaatacaggattgttaaagagtactggtgattacataggcttcatggattgtgatgactggattgaaaaagatatgtacgagacgcttgttgaggcaatagaggcgaatgatgctgatatggctgctgcaagctggtttaagtcatatgatgatgaagaaaaagaggctgtaaacttaaaaccagtagataaagtcgtctttaatagagataaattattgagatacatatatgaaagagatacatatcagggctttgcttatatgtgggataagctatatagtaggaaagttctcacagaagctaatggagagatgctgttatttgatgagaatatacagttaggtggagatgtgatatatcttgcaaaagctgccttgaattgtgaaaaatcaatctatattccaagaggaatgtatcattattatcaaagaaacaaatcaggatgtcatactgagaatttaaaaaagagattagactggataaaatcatatcttattgttattgatatgtttgaaaagaataatgtacaggatgatgtacttggatacgtaaaaagatttctggcatatcacagcagcaatgtagcagagctggcatttagacagaaagacagcaagatactgttatattgccagaatataatgagaaagtatgaagacgagtatgtatcattaaatcagctttatccggaaagaatattaaaatacagagatattttaaaatatagatataggagaggtatctaatgaagtggacaaataaaggtcatgaatatgatgagatgtacaaaaatatagaaaaaaagaacaaatattatttatttggagcaggagattatggacatcagtttcaggcgatgtttaaagatgagataaatattgctggcttcatagataacagtgccgataaaatcggaacaacaatagaggaaataccatgttatgcgttcaatgatattaatctaaaagaagatgaagctattatattgacaatgtcgcagattgcaagagtaaagcctatagaacagttattaaaatcagggaaagtacataatgtggattattttttaattgaagaattcatatcagtgtacaacgtgtataagtacaatgaggtatatttttcaagcatctcttttttaccaagtacaatatgtaatcttaactgcaagcattgtcttaattttaacccatatgcaaagcagttttatgtaagagaatgggaacagcttataaaagatgtggatttatttttctcatgtgtggattatattatgctgtttcatgtcagtggtggagaaccaatgctatacaagcacacagcagatcttatagaatatattgataagaattatggacataaaattggaacattgagaactgtaactaatggaacagttgtaccgaaagaggaagtacttgaaaagttaagcaaatgtaatattgagataactgtagatgattacagagaggtggttccaagatttaacaaccgttttgaccagttaatagagaagcttgaggagtataatatcaaatattatattaataaagcagagtcctggattgatctggcaccagatacaacagattattcaaagctttcagaagaagaaatgataaaacatagagatagctgtagtcagtcatgggaagaattgcgggatggcaagatatatagctgtaattatgcggcatacgcaacagttgcaggaattgcgggcgaacaggatttagaggaaacatataatcttgaaaacttcacaccagagaagaaaaaggaaattgtagaattcagacttggatatacagagaagggatatactaatttctgtaaaaagtgtcgcggcttcacaccagaaaatagtgacgaagttgagccagcattacaaaagttatttatttagaaatgttagaaagaggtattatatgaaaattgctatatgggggaaaaagaaagaagctatttatttaatgaaacagatacgaaaaaaagagattgataagataatatgttttgttgataataatattgatgaatatcataccgatatagaaggagttccattatgttctttttgtcaatttaaagataaatataaagaagatacggatgctataattttagcattaagaaatggatatagtataggatgcattctcagacaattagataagatagatggcaaaagaattggcttaatgaaaccttcagcatatgattttgggaaagaaataaatttgacaggggaatatgattctcagataatgtggcttgataacaaaaaagacaaaggcttttttccatattttcaggttatacttataaacacatgtaatttaaactgcaaaggatgtacacattttgcaagtttgtttaataaaacacaagaaaataatatatatccaatatcagattatatacaagatgtaaataaaatatcacaatatgcaaatgtttttagattaagactaatgggaggtgaaccactattatatccttatttagaagatgctattaaatttgctagatgtaattttccagattctgatattagaatcgtcactaatgggttattgtttcttaaagcctcaactaaattattggaaaatataaagaaatataatattggaatagatatttcgccatataaaccaacagtcgaaataaaacataagatagtatctaaattagatgaatataatattgattattgttttgagggttttgaggatgattatgtaagatttttttcaaaaaatataaatatagatggtcggagtgataaagtaagagctatgcaaaaatgtttctcggtacagtgtcagacattatcaaacggcaaaatatataaatgtccatttgaggcattaggatacaaattttttaattattttcaaattgataattatatgggggaatgtggatataacataagagaaaataattttgattggagtaaaatgattgaagatttaaaaaatgaacccgtggaagcttgtaaatattgctcggataatacagttgaaaatttcgagtggaaaatagaaaaaaatcctagtgttacagattggataataaattctagttgttaaaattaatataaacattaggattttggtaaaaagtatttaaagcaattaaggctatgataaaaaatggcagaacgtaaaacataaattatgttcttaaaaaggtggaaaactataataatgaaaaaattagctatatgtataccaacatataatagaaaacaatcagtggaagatatattgagtaaaattaatagtatttttagagaagaagaattagatgtatatatatatgattccagtgaaaaatcagttgattatagtaaaaaagaatggaaaataaatgtatattataagaaattaaattctagtgttcattctaatgaaaaaatatttattatttacagagcaaaggagataatagaaaaatatgagtatacatggatattgcctgattatatgttttactctgattgggttatagaagatataaaaaaatcaatgatagaaaagaatgattatattttaattaattattgggataatgaaaaaaaggaagagtatgtaagcaataataatgattatatatttcaaaaatatgcttcactaattacacaatatggaacaattattattagaaacgagatattctcaaaaaaaattgatttagaattaatagcagataaatacttaacaaatgataaaatgaatttttcacatgttggtctttattttgagataatggcaaaacttaaagatttaaaacttaaagttatcggatgtgaaaagaaagattattataaatcaccttctaagaaattatacatttcaaaagaaaatttaaaacagaaaaaaagtgaaaaaaattgggaaacggcatttcatgtatgggcagtgtcttggccagaaacaattaaagcattacctaaagagtatagtggaaaatgggaagttattaaaagtgaagtagttagggggggattttttgatgaaagatttttgatgagtcaaagaagtataggagcaacaaaacttagagtagttttaatgaatttttcgaaatggaaatatatttcattagcgccagtgttaaaagcaataggtatatgtttaatgcctaagaaatatgcagagtggtgtacatataataggagtatatttgttaaaaagaaagttgaaaataatttaaaacaacttaagaaaatagcgactaaaaaagaaatatatatttatggagcagggaaaaaagctgatgaatatataagaatattggaagcaaattgtataccaataaagtcgttagttgttacagatgctcagatgtttgtagaaagtgcatatggctatagggttataggtattgaggagttaaaggaaattaatagtgaatatgtagttattttggcattaaatgaagaaaataaatatgcagtaaaacgattgctaaatgattataatatgactggatatttatatgaagataaaataaatgtatggtaattttaaaattatcaatatgaatagacggagatattaaataatgtttaaagaatggcttgaaaatagattcatcctatatggttgtggtttagaagcagagaaatttatgtgccgaaataaggggatgatatctaatattgagatttgcattgatggttttaggacagggaaatttcatggtattgaaataaaaaagatagaacaagtagaaaatcttgcaagtaaaaaaataattgttgcaacattacctgaaacatatgagaaaataaaaaatattttggatttaagtggcttgattgagtttaaacattatgtacatatatcatatattgagaaaaaggttttagttgttaatgcgaattgtcatggtttagggttgaaaaaatatctttgcatgagtaaagaatttagaaaaaagtatgttatttatcatatgccagaaatacaggataataaagataaagaaatttcaagatttttattggataagatagatgttctaattacgcaggacataaggcttcaaaataaattttctgataaattatcattagattatttaaaatctgcagttaatgaatcttgtagcattattgttattcctaatcttgtagggatgggtaaatggctgtatccacagcatggagataatgataaaatcgtcaatttagcaaacggcaattggccattaatccatgaagatacaatattggaaaaagctattttaaatggttgtcaaaacttaagtgattatattgaatttattaatgattatgaatttgacaaagatataataaaagagtcttatgataaatttattaaaaaaattgaagccagagaattgaaatgggatataaaaataaaagattatataataaatcatatgaatgctatggaaatattttgtgatagggatcatccgtcagttgagattatgaaatatattggacgtgaagtattaaagaagctcaactgctcagttataaatgatagtgaatatgattttatattaggattacctatgccacttcttacatgtattcgtaaatattataatatttcttgtattgaagcggattgtttagattattataaatgtaatcaagaagagctattggaaacgtatataagaaactatttgtttatcgcacatgaaattataatataaagacggaaggtggattttatgaatcaaacaaaagtatcaataattctccccgtgcataattctaaaacttacttgaaacaatgtatagaaagtgcaatgaatcaaacatttaaagaaattgaaattatatgtgtatgtgggtcggggaatgatggctctgatgcgttagtagaagagtatcagaaaaaagatagcagaattataaaaattgatgatgttaatggcagttatggacataaattaaatattggtacaaaagcttcaagaggagaatatattgcaatccttgaaacagatgattatttagaaaaaaccatggttgaagaattatatataactgcaatgaaggaaaaagtggattttgttgatgcagattattatgagttttttgaaatagataattgtgaatataaaattatacataataagtatatggatagcgatgtgtataatagaaaattgtatgcgaaagatgcacgaatgtctgtaattctttctgatattactgccaattggacaggtctatacaaaaaagattttttaatcaaaaaaaatcttttttataatgagagccctggtgcatcatatcaagatttgggatttagatatttattagcatgtcttgttgatacaacatatcatgttaataaaagcctatatcattatagaacggataatgaaaattcatcagtaaaagatatgaaaaaaatatttgttgttcaaaaagagtatgaatatatttttaatcaaatgaaaaagaaaaatatattacaaaaatatttatgggattattattacatatggaaatatcgtgattacttttggaatgtacaacgattggaaggtgatgggagagcagcttttttacagttgtataggaaggaattattgaatgatattcagaatggaaatataaatcaagaaataattgaaccaagatatgaaaattgtataaaaaaaccaatagatgagtcggtagattttaacagtgttttgaatgaaatatcagtaacaactgcaggaaaaatggaaaaattagtagaaatagtaaaaaaatgcaaggataaacaaatagtaatttgtggatgtggtgtaagaggaaaaaatgtaaatgttctgttagaaaaagaaaatgttttatgtatgtgtgatgaaaatcccgatttattaggaacatttataggaaatcgaaaagttatttcatatgatgatgctgtgaatagatttccagattctatgtttgtagttgcgaataggttttattcaaaagaagtggtaaaaaaacttgaaatacttggtataaaaagagaaaagatggttttgtatgattaagaatgtattattaacaggtggaacaggttttataggaagaaatataaaagaatatttaaaaaataagtgtaatttatatattcctacaagggaagaattaaatttattttcagaagaggatgtaaaaaattacataaaaaataacaaaattgatatagttatacattcagctaatcctaatcctgttaagaattgtcatgacaaagttgaaacaatgtttgaagatagtttaagaatatttatgacattgtataatgctaaggattattatgaatatatgtatacaattggttcaggagcagagtatgataaatcaagagatattgtattggcaaaagaaagtgaggtttttgacaatattccaaatgattcatatggttttgcaaaatatataatgaataaaatggtgtatagtagcaataaacattgcaatttaaggatatttgcatgttttggaccaacagatcatgaatctaaatttatcacacacgtaattaattgttgtttaaaaaatgaatcaataacaataaagcaaaattgtatatttgattatatgcatgtttcagatttagctagaataatagaatactttatatataataaacctaaatacaattcgtataatgtatgtacatcacatcgtgtggaattgttagaaatagcaagggaagtttgcagacagttggattcaaaagttgatattaagattttaaaagagggaatgaatagagaatatacaggagataatagcagattattgaatgagttgcagaattttgaatttataccgataaataaaggtatagaacttcagataaaggctatgaagggagaatgattttatgaaaaagagagttgctgatattataatggaattgttggttgaaaataatattacacaatgttttgctgttgttggtggaggggcgatgcatttagataatgctttagcattgaatgataatataaataaagtttttaatcatcatgaacaggcgagtgcaatggcagcggaagcctatgctagaataagtggaaatatggctgcggtctgtgttacatcgggaccaggcgcaactaatacacttacaggtgttatggggtgttggcaggatagccttccgatgttagttttatcagggcaggtaagatatgatatatcagttccaaaatcgggattggatttaagatataggggggttcaggaatttgatataattggctctgttcaaaatatgacaaaatatgctgtaatgatcacagatccactttctgtaaaatatgaattggaaaaggctattgatattgctacatcaggaagaaaaggaccagtatggttggatataccactagatattcaaagtgcaattgttgaagaagatgatatgtataagtatatggacaaaattgaggagccgagaccttcgcatgaacaattggaatatattatgaacaagcttgaaagagcatctagaccatgtatacttgttggcaatggcgttgccaatactcataacatagatacttttagaaaatttgctgaaatattggatattcctgtgatttcagcttgtattgcagctgatgttatgtatgcagagtatccaaagttttatggattatctggttctattggacctagaacgggaaattatatagttcaaaatgcggatgtcatattgtcgataggttgtagtttgggatttaaaatgactggttttgttcaggaaacatttgcgcctagagcttatattatatctgttgatatagacgaaaatgaaatgaaaaagccaggagtaagagttgattattatataaaatccgatttgtccacatttttcaaagaagcgtttaatgtaatttataaaatcaatgttgatcctatctggagctcatattgtgataaattaaaaaacagattttcaccatttgaaccagccaaggatgtattagaaaatgaaagagtatgttcatacaagttttggcaagaatatgaaaaatatgagccagaagacaatatttcaatactcggaaataacactgctagcagtgctaagttacaaatcggtataaaaaagccattacaaagaatagttgctaataataattgtggttctatgggagcagatttaccagaggcaataggtgcggcaattgcagcaaataaaaatgttgtatgcttaacaggggatggaagtgtgatgatgaatttacaagaattacagacaattaagcattataatttaccagttaagcttgttatattttcaaatgatgggtataacgcaataagacaaaccagcaagaatttttttaatggtatagccatagggtgtaccgctgattcaggtgttagttttcctaaatttaaagatgtagctaatacatttggatttaaatatatgatttgtgaaaataacggacaaatagatgatagacttaaagaatttttttcacaaaaaggtaatgtgcttcttgaaattttacagagattagatgatcctgtttctcccaaagttatgtctagaatgagagatgatggaacatttgaaacgccatcacttgaaaatatgtcgccattcataagtaaagaagaacatgatagtttaatgttttggtaaaagataagaggataatgtatgaggtttttagttattggcttaggttcaatgggaaaaaggcgaattcgtttattaaaaaaaataaatgataattatgaaatatttggaatagacaataataaggagagaagagaaaaagcaaaagttgaatatggcataaaagtatttgatactgtaatagatgctgtttcaagttataaatttgatggtgcattaatatgtacatccccattatctcattcaaaaattatgagtcagttattagagtatgattttgcaatttttagtgagataaatctaatatcagaaggttatgaaaacttaataaattcaaataataagaaattatttttgtcatcaacctttttgtatagaagagatatacagtggataattaataaggttgataatgctagagttaattatatttatcatgttgggcagtatttaccagactggcatccatgggaatcttataaagatttttttgtgtatgataaacgtagtaatggatgtcgtgagattttagctattgagatgccatggatagttcagggcttcggtaaaattaaagatatgtatataaaaaaagataatttgtcaaatttgaaaatagattatccggacaattatataattaattttacacatgagaacggttcgaagggcgttgtaatagttgatatagtttccagatgtgcaataagaaatttagaaatttttaatgaggatttgcatataacatggaatggtacaccgcaatcgttacaagattatagtatacagaaaaaaaagatgttaaatattactacatataaagagattgacaaagataataattatgcagctaatataattgaaaattcatatatggatgagattaaagcatttatagctttaattaatggagataacacaaaaataaaatatagttataagcaagatttagaaatattaaatatacttgatatgatagagggaaaatagtatgaaagtatgttttgtaggtacaggttcaataggaaaacgacacataagaaatttatatcaattattcagcgatgttgaaattcacattattaggaatacgacaaagcatttagatgaggagatttcatctatagtaaaaaaaattatgtattcaacaagagaagtttgtgaggagtatgatgctatttttattacaaatccgacttatatgcattatagtacattaaaagaattgtataaatattcaaagaatttttttgtcgaaaaaccagtatttgataagcttgattatgatttatccatgtttaatgaaaaaaaaaatatatatgttgcatgcccattaagatatactcaaattattcaaaaagctaaaacaattttgcaaaaagaaaaaattataagtataagatctatatgttcttcttatttgccagattggagaaagaatgttgattatagaactatatatagtgcacataaatcagaaggtgggggagtgtgtatagacttaattcatgagtgggattatctcacatatttatttggatttccagataaagtattttgtttaaatggacaatattctgatttagaaattgatagtgaagatatagcagtatatatagctgcgtataaagataaattgcttgaattacatttagattatgttgggagacaaccagtaaggttaatggatgtaatcagtaatcaaaataattggaaatttgatattttaaatggaacaatattaaaaaactccacgataatcgaaaaatatgatgaaaagccgaatgacaaatatattaaagaaattaaatattttattgaaaatgttatgttgggagaaaatacaaataatattaataattctttaaatgttatgagagtgtcaatgggaatggagaagaaataatatggtagaaacatatgtagttagggataattttactgtaaaagaaacaattgaaaaaatgaataaggaagtaattaaggctgttattataattaatcagtttaatgaggttgttggaatcttttctaatggagatatgagaagatattttctcagaggtggtgcattagatgaaaaaataattgttgcaatgaatcctaatcctcatgtatttacttcatatgaagatgtcgaaagagagagggctttagttaaaagaattttatatccaatagttgacagttgtgggcatctaatagatgttgttgattatgaaaaaaatataaatactgctcaaataagtggaatacttcaagaggttccgttagttattatggcaggaggaaaaggaactagattatatccatatacaaaaatattgcctaaacccctaatgccaataggggatgtaacaataactgaaagaataatattctcgtttgaaagatttgggtgtaataaagtaattatgattctaaaatataaagaaagtcttattaaggcatattttagtgatgtaaaaaagaactatgatttagaatatattacagaagaaaaatttttaggtacagctggtggattgagatatttaaaaggaaaggtcaaatctacattttttttaacaaattgtgatattattattaatgaagacattgaatcagcatataaaattcataaaaagaataaaaacaaaattactatgatatgttcaatgaaggggattactattccgtatggagttgtagagactgatgaggctggaaatatgatctcaatggaagaaaaaccaaagctatcttatttgattaatacaggggtatatattgttgagccagatatattagataatattgaagataatgagagcatagatatgcctggtttgattgaaagatgcaagacattaggaaataggataggtgtatttcctgtttcagaagatgcatggcttgatatggggcaatttaatgagatggataatatgaaaaataaattaggattatgataatatgaggttcgacatgattgaattaaatgagtttattagtaaatatgttactaaaagaagaaatagtatgtttctatctgatatagaatcaaatgaatatgaaatatataataatatacataagaaaagcattttggttattggtggagctggaagtataggaagtcaatatattaaatcagtattaagatacagtcctaaatcgcttacggtagtagatattaatgaaaatgggcttgcagagttaacaagagacttgaggagttcaagcaatatagtagtaccggatttatatattacatatgcaatggattatgcctcgtcaatgtttaagaaaatgtttattaatcacggaaaatatgatattgttgctaatttttctgcccataaacatgttagaagtgagaaagacattatatctgtagaagcgattataagaaataatttattaaatgcaaaaaaattattggatatattgaaaatattcccaccggatatttatttttgtgtttctacagataaggcagctaatcctgttaatataatgggagccagtaaaaggttaatggaagatttgattttttcatattcagactattttcctgtaaagactgcaagatttgctaatgttgcattttcaaatggctcgcttccagatggttttctttatagaatgaaaaagaaacagccattatctgcaccatcagatgttttgagatattttgtatccccagaagaaagtggacaaatatgtatgcttgcaagtattttagggaaaaatagagaaatattttatccaaaattaaaagaaaaaacgatgatgtcttttgatcaaattgcaagagatttgattgtttcaaatggatatactgtatatgaatgtgaaagtgaaagacaagcaattaaaaagtcattggaattaaaggttggaggtacagagtatccagtatatttttcaaaatctaatacttcaggagagaaagaatatgaggagttttatatagattcagagaaaacagatgagacaagatttaatgggttaggtgttattattgataaacaaaaagtttcaatagaaaaagtgcaaaaattgtttgaaacatttaataatgcatttttaaatgaaaatgtgacaaaaaatgatattgtaaagataataaaaggttatctgcctgaatttgtgcatatagaaaaaggaaaatcattggatgagaaaatgtagaggagactaaatgagaaattttattccattatcaattccaaattttgaaggaaatgaaagaaaatatgtagatgaagctgttgaacaaggttgggtatcaacaggaggaaaatttgttgaaaaatttgagagtgatttaagtaattatgttaatggtaaggtggttgcttgtcaaagtggaacatcagcaattcatttagcattgattgatgcaggaattggaattagtgatatggtaattgttccaacgttaacatttattgcagcaattaatcctgtaaagtatgttggggctaaaccaatttttatggattgtgatgatacattatgcatggatcctgtaaagttgaatgcattctgtgaaaatgagtgttattttgaacagggaaatttaaagtataaaaaaaatggtaatattataaaagctataatagttgttcatgtatttggcaatcttgctgatttggatggaattttaactgttgctgaaaaatataatttaaaagttatagaggatgcgacagaagcattagggtctagatttattcgtggtaaatataaaggaaaatatgcaggaactattggtgattatggagcgtattcttttaatggaaataaaattattacaactggtggtggtggtgcattagtaacaaaatctgttgagactgcaaaacatatcaagtatttgtcgacacaagcaaaagatgatgccttattttataaacataatgaaataggttataattacagaatgactaatgtacaggctgcaattggtgttgcacaattggaagaaatagatgaatttatttttaggaaacaaaataattataagttatataagaataacttcaatgactttaattttgcacatatagttgattttagagatgacattgtttcaaatacatggttttattcattaaatgttgatatagaagttttaaattgtggaattagagaggttataaatgaattacatgacgaaaatgttcaaacaagaccaatctggggattgaatcatagacagataccatataaagatgatataaattataaaattaataaagcagagtggtttgaaaataggataataaatataccatgtagtacatcaattactaaagaagaaatcaattatgtatcagaagcagttaaagaagttattgttaaacatttaaagggataaaaatggaaaaaatagtaattgtgggtttcggaggacatgcaagaagtgttgcggacagtataataagacaaggaaaatatgaaattgtaggatatacggatacggatgataaaaataatgagtataaatatcttggtaatgatatagtgctagataaattgctttcatcaggtattcaaaatatagttataggaatagggtatttaggtcatacagatgtaagagaaaaaatatataagaaaatgaaaaaaataggatataaatttcctgtaattatagatccaagtgcaattgtttcaaaggattcaattattgaagaggggacatttataggtaaaaatgtagttataaacactaattcacatatagggaagttgtgtataattaatacaaaatcggtagttgaacatgattgtatagtaaatgattattcacatattgcagttggagctgttttgtgtggagaagttaatataggaaagagcgtactgataggagcaaatgcgacaataatacagtgcagaacagttgaagataaaaaaattataccagcagggtctgttgttagatgaaagagtggaatgagtcatgaataaagatagagtttatataattgcagaggcaggagtaaatcataatggaaatatacaaattgcaaaagaaatggttgatgtagcagtatctgctggtgttgatgctataaaatttcaaacatttaattctgaaaaacttgtatgtagaaatgctcgaaaggctgaatatcaagtggaaaatacaggatgtaaggaaactcaattggatatgttaaaatcattgcaattgtctcatgaaaattttattgaattaaaaaaatattgtgataaaaaaaatattgattttatatcgactccgtttgatgtagaaagtttgatgtttttattcaaaataggagttaaaacaataaaaattccatctggagagataacaaattatccattattggtagcagcaggaaaaactatgttaccaattatattgtcgacaggaatgagtactattgaagaagtaagtgatgcaataaaaatacttatggataatggaacaaagaatatagttgttttgcaatgcaatacagagtatccaacaccatatgaagatgcaaatattaattctatgatttttatgaaagatatacttaatcagcaagttggttattctgatcatacattaggaaacgatgtagctattgcagctgtagccgctggggcaaaggttattgaaaagcattttacacttgataaaaaaatggtaggacctgatcataaagcaagtatcgagccggatgaattaagaaaattagtaatatctatcagaaatgttgaaaaagccatgggaagttataataagtttgtttcggcatctgagagaaagaatatagatgtagcaagaaaaagtattgttgcaagtaaaaaaataaataaaggagaattgttttcagaagaaaatattacaactaagcgtccaggtataggaatgtcaccaatgaaatggaatgatgttattggtaaggtggcaaaaaagaattacgaagaggatgagatgatacatatatgaaaaaattagcaatagtgactgctacaagagcagaatatggacttttatcgcgattaattcgtatgtttaagacatcagataaaatagatacgcaattaatagcaacaggaagtcatctttctaaagaatatggaatgacaatacaagaaatagaaaaagatggaataatcgttgataaaagaatagatattctttcaaataataattcagaatatggagtatctgaaactatatcaaatgcaattaagtatttttctgcttattttgaagagtttagaccagatgcaattttagtccttggagatagatatgaaattctggcaatatgtatagctgctataaattataaaataccgataattcatttatatggtggagaagctacattaggagcgttggatgaattaataagaaatgctattactaagttaagtattcttcattttactagtacagaagaatatagaaatagagtcattcagatgggagaagagccatctagagtttataatgttggttctttaggggttgaaaatataaaagaaatacaacttttatctagaagtgagttagaatatgaattgaaagttaaattggataggtatgctgtaatgacctatcatccaactactacagaaaaagacatacttcaaaaacaaattgatgagatgttacgagtaatggttaataatccacagattatgtttatatgtacaaaagcaaatgcagatgttgggggagcgaaaataaatgtagcacttaaagatgcagcgaataaatataataatataatattgtttgattcgttaggaataaaaaaatatctaagtgctgtaaagtattgtgattttgtaattggaaattcttcaagtggaattatagaggtaccgacttttcatgttccaacaattaatattggtaatagacaaaagggaagaatacaggctaagtcggttattaattgtagttataaatatgaagatattcagcaagcaattaaaattgcttgctctcaagaatttattttactgttggaaaatgtagttaacccatatgaaaaagattcaactgcaaagaaaattttcgatactattaataaatattttaatgagggaaatattagcattgtaaaaaaattttatgatttaccttatattaatatgtgatatatgtataactatggaataagtattaataaaagtaaacgtttaccatattgtcatgtgatattttgaattaatagtaggaaagtaatcagcatcatggaggataagatacgatgagcagaatcgtcatatatggtataggaagtgtattaagcaagataaagtctaatatagtatggagtaacatagcagcagttatagtctgtaaagatatggttgatgactgtgaggacataattggattcagggagagaaatataccgattatatatgagacagatttatcttgtacagatacatgtagtcttagcaatcttatagcttatgattatgtggctgttgtgagagatggtgcatttgaagatataaagacactacttatatttaagtacggcataagtgaagaaagaattatatcttgggcagaactgttggattcaccatatacgtataatgcgactgctatgtatttttatgatgaatttattcagatgcatgcggctaaagaagttttggattgtaccagtcaggggattgttaactatcatcctgcaaactattggaagaataagatatcatatcttgacaggcttgttagtaaagataagctggcagtttgtcaggataagtcctggtatgtagaatcagatgtatatggatatgataacgtgtatacagacatagttggctgtacgaagaaatatgacattatattactcgatagtgatagtatgatgagtgtattttcacatatggagcttatcaataaagcacgttatattatacttttaactccatattttaactataagggtgatagctgtcttggctttaagaatttgtttgagtcgctaggcatgaagtgtacatattataagaggctttctgttattatgtgggttcttgagccaggagaattaaaggtgtgcagcagttcttatatgtatgttgttatgcataaaccttataatgttaaaaaggatgatatatatatacctatatgcgtaggtgataattataataatccagagtatatcaacgatagtacaggcgataatatagcgtatcttaataacaagattaatgagtgtacagccatatactggatatggaagaatacaaggacggagtatgtagggataagccactatagaagatatatgcttaacaataatcagaaatatgttgagaatatactggacaatgaaaacgtggtagagaaacttaaaaatgttgatatattattatgcgagcatattactttcaatagtacattggaggaacagataaagaactctatacagccagaggcttatgattgtggatataataaggtcagggaggctcttataaaggcacatccggaggatgtgaatgtgtttgattatgttatgggattacattatttttatccatgcaatatgtttgccactacatggagtgtgtttgatgagtattgtcaatggttgttttcttttatcatacctgcagcgtgcaatatagatgtgtctgggtataatgcttatagtaagagggttattggcttttttgcagagagaatgatgacggtatgggttattaagaagaaattaaaggtaaaagaactgccatatataacagtggaatagattggagaaaatataatgaataatatatctaatagtacattgtctaagaataatacatcaaaagacatatcagtaaaagcaatcatatctgagtttccaaaggcagcgttgttatggtacggctttaagaaagacacagatatattatatatatatgatggcgaaaagaacagtgctatacaggaactactgatgacttttggaaggtgtgtggatgtggtagcagcctctgatatacagaattgtgctgatatgtcatgtaataattggagtggaacaagatatgactatatagttggtatggatgtgttggagaaatgtgataatccacacgaactattaagtacattaaaggcattgcttaagtcatcaggaaggttgctgcttggctgcgagaaccgtctggctattaaatatttttgtggagagagagatccgtataccaatcatagctttgatggaatagagaattatagaggtatgaaacaggctgataaaaaggaaatagcaggacagtgttattctggtgcagagctaagaagtatgttggatgaaagtggacttgtgaatcataagttttatgcagtgatgccgaatctcagggaagtacagcttgtttatgcagaggggtataatccacaggaggagctggctataagatattttccagtatatgagcacccggagtgtgtatttattaatgaggaatatctgtatacagaccttgttaagaatgggatgtttcatgccatggctgatgcatatattatagagtgcagtatggatggtacttatgatgatattcagcacgttacattgtctatggacagaggaagagaaaatgcactggttactggtatatgttgtggtggtagtggaaagctgacagataatatttatgatgatgagaaaatatcgtccgataacaaaaaaaagttgagtactgtgtataaaaaggctatatatgaagaggggatagttaagcttaagcagatgcagcataaccatgaagaactaagaagcaggggaatacaggttgttgattcttatatagaagatgataagtttattatgccatatgttgatgcgccggttgctatgatagctcttaaggaactggctaaaaaggataaggaagaattctataaggctatagaggaaatgtatgagcttatattatcttcctctaagcatacagacatcatatcagagaaagataagaacagtgctaatggcagggatttaggtatcattcttgaaaaaggatatatagatatggttcccctgaattgtttttatgatggaagcaggaagaatccaagggacagatttatatattatgatcaggaattctacatagaaaactgtcctgctaagtcgattcttcatcgttcgttgtctataatatatgatggaacagataaagagttcgaacagcttataccacgtagtgagattatggatagattcggacttactgagtgtgaagatatatggtcgcatatgtcttctaagttcactcagaaactgcgtaatcaggcagaacttgagacgtattatcgtaacagaagggtgaatgcaaggacattatatacgaacagagagaaactgaattatgatgccagaacttatcagaatatgttcattgatatattcaggggacttgatgatgagaatggcaatcaggtaaagaaacttgttctgttcggttcaggtatattcacgaatcgttttcttgatgaatttgatgggtgctatgaggtatattctgttatagataataacagtgccagatggggaactacgataaagggagtgcctattaactcaccagatatattaaagtctatacctgctgatgaattacatattatcatatgtatcaagaagtattatggtgtagtaagacagttagcagattggggcatagaggattatcatatatatgacccgggtaatgattatcctaacaagagaagagagaatgtaaggaaaaggttatcacagttaccagtcaatgatggcaatgctgatgataacggcagcgagaatgtacagaaagaaacagctcataacgataagccatataatataggttatattgcgggagtgtttgatttattccatataggacatctgaatatgttcagacgtgctaaggaattgtgcaattatcttatagttggtgttgtgtcggatgagggagtacgtataggtaaacaggcagagcctttcgtaccttttgatgagcgtatagagatggtaaggtcatgccgttacgtagatgaagcagtcaagttgccgccgaacttcgcagatactgaagacatgtataaggtatatcatttcgatgtacagttctcaggaagtgattatgaacataatccatattggcttgcaagaaaggatttccttgagaagcatggttcaacactagtgttcttcccttatacacagagtacaagctcgactaagcttaagaaggctattgatgcaagaatatcgcaggaataatagagtattgagttagttggtggtaaaacatcttttgatgttttaccacttatcaatatgtgcttagtcattatgaggtgtgttgtcgttccatataagttgtccgtcagcttttaaacagccatataatcttgaatataagctgttacgttcagcttcgctatattcagttgcgttgttaattataatgtagttgaattctttgttatattggcaaaagtctatgttatcataatcagtgtaggtaatatgagcctctttgatagtaagcggtatataagacagattgctttcgtatcctacatatttaagtttaggacatatatagctaagatgtgcatagcttgcaccattatgtgcgtttatttcaagcagtgcaagtggttctgctgttgcatatatcatcttaaatatgttaccaatactgttattaagtgggtcaaatccccattttttccatatataatctctgttacggctgcatatgtttaatatgctgtcagatggaagagtaccaaagctctggcttcctgcgtgatatataaagctgttgtggcatacatataatctgtatccaagttttcgcagctgcattgatatatcatcatcatcatagtaaccaggagataggttttcatctaagagattagttttatccagtgcctggcgttttaacatcatggcaaatccacataaaatagtacattcttcataggcatttttcataggaacattatttatataaccatatctgatgtaatcatcaagagctgtaaagaataattcgcggtattgaagcgtgccatcatagttgcatatagcaccagttgcacccgtttcttcgtctttatataatcccattcttaaccagaacaatgagttaggtgtaagtcttgtatcattatttagcaggaatatatcattttccttttttgagttaagtataccgatattacatcccttagggaatccaaggtttgtattgctttttataagttcaatatcaggctgttgttcaagccagtcagtaacgccatcagttgaagcgttatcaacaacaatgatttcataagaaggcttataacagtaattgcgtatactttctatacatttctgcataagatacatacaattatatgatacgattactatgctagctggtttaacagtaacatggccagagtttttgacagctgtcatcttatcatgtatttcctgttttgttttagcatctttgcaatgaaagtaagcattttccagacatagatagtattggttaatgtttgctgtcttataatgctctgatagctcaagatatgtctgatattgttcataagggtcaatgttatcaggaagctcggtggtatttacagatgcatgtttagatatttctatagaataattaatcattctgtctataaagcttatagcttcattcttattaagtccagtatcaggaataatagaacaataattgaaaagatggttatattcaatagtatcttttcctatggcaactgtatattctgcaataagagcttcttttatatcgttgactggaacatcacctgcatccagggcgttattaatgagggcgtctttaagttttatgagtatttcctttgtgttcatactaatctccatataataatgtttcaatgtgagtgttatgtaaagcagctgtttatattatgtatagttaaatgataattcatttgcagattttattcaagaataaagagtaaaacgaacaaataactaaaataaagatatgaaatatgttatacttcagctatatagttcattaatgtatatgctgtttaggaaagtagaggaagtatgatgaatgtgaaagaaaaaaataataatgaaatattgttattgtcacatgaattatccagaactggagcaccaatagtcttaagggatctggctgttgtgttaaaagagatgggatattcggtgcttgtagtatcatttagggatggagaacttaaagaagattatgaaaagaatgatattccaataatggtttatgataatcaggatatagaactggacttcatagacaggcttgtagcagattataatatatggatagttaatacgcttttgttatggccggtagtaagttatgtacagaacacagctgtaaagataaagtggtggctgcatgaggatgaaatattttttcaaaaatgttgtgatgcttacggttcagctattgatagtgataatataaagtattatgcagcaggaccatatgttaaggatatgattgataagtatcttcatgttgaatcagagattgttaattttggtgtaaggcagagtaaatatgttgatgctattgaagcttatcatacatatgccaaagataatggtggaagagtacgttttgttgatattgggtcaatatcatatactaaggcacagaatgttctggttgatgctataaaaaaactaccggatgaatatattaaacaatctgagttcatatttataggggatatgaaaggagcggataccaatatactggactcgatagtaaggcttactgtgagatacgataatgttaagttgttagacagtatgccacaggatgatatatatagaatctatgataactcaagtgtagtcgttgtgccatctatatatgagccaacatcagcggtagctgttgagggacttatgaaaaaaaagatatgcatatgctctgatatatgtggagtgtcttattatcttaaggataatgaaagtgcttatatatttccatcgggagattcacaggcattggcagagaaaataaagtatgtcatagataatatagagttacttgctgatatatatgaaagtggacacaaggtctatgaacagaattattcaatggaatgttttgttacaacatggaaagctatattagaaaaataatataagctacgtttgttattgtgtatattatgtatgattgtcctcatacagtacaggtattctgatatccttatactgtatgaggatatatttataaatctaatatcagcaggtatttttcttaatgatgtcagatggggaaatcgttaatgtaacatatcagcatattctttcataaagattaatcttgtttgataatatgtatcaaggttcataattccgtcatcatgaaaacaccatgcagattttacaggaggaactatgacattaaatccggcttttctgaattcaaagctttgagagatgtcatagaaatcccatcctgtaaatacgtcttcacgccatgttatgtcgtattgtgttattattatgaatccatcaacggcttcaacatgggtaggttcagatatatcatcaagtacagaatcggtggtgcggtatatgctgttagatataagatgccctatacgccatccaaaccacatgatgcatgttttaggaagtttggttgatcctacaactcctatcatacctacgctggaatctttaaactgttccagtatgtcaaataatatatttttattgataatgaacgtatcatgatgaagatatattttatattttgcatcagatgataacatggcagcattatatcctgatgtcatgcttctggcgttatgtacaacaattatttcaatgctataaccagcaggaatattaagtgtatttatgtatctgatacattcagtttcgtattgcttgttattagagcatattatgaaacagaattttttatcgtttttaagggactgttgtgttttgttcttattatagctggacatattaagacactttttggtgatataagggttagaggcattattattaatgatggcagtattagttttgctgatagtatcagagttaacattcattgaacttatatagttggatataatttttctgacgttatcacagccatctacgcatgttgttttgataaattgctctagtgccagagaagacagtgttccatcattaatatctttagctatgcattttaaagctatctcagcatcaacatcatattctatgtttagtataagaaacttatagtagttgttttttttaataacttgttctatattgtgtatattttttagatacaaaggtgttttaaggttattattgaattcttcggcggtgatattaacagcaaccaggcagtgagcaatctcaggtattccgttaaatgttttgatgatatctggttctgttaaaaatgtgcatagtgtatataaactgtcatcagaattattgtttagtaactggttgatggaactgatgagtatgttaagttcagaatcatagcttgaatgccatgctgcatcattatctatagatgcctgtacgcattcttctgtatcggatataggtatcatgttatgtataatctcctgttattagtcagtgtgttgtagctttttataatattagtgtcatagttttacaaaatagttgttgaggtataaatactgtatattattttaattctttgagtttgtttatcagtacgctgatatttccattgtggttgtatgaatcaatataatcagcaacttctctgtgttcataggttcctttttttccaaggtaaggattagacattatatctggtataatctgttttgttattgaacacatatatctgacaagttcggcagtaagtggcatttgacgggcattaagaaaaataattgtttcatagaaaaaggtgtgtacaaagtataattgcatttcataaagaaaagtatcaatatcaagatgctctttgacataattgtatgtttcaagctgtaccagcatatgctggcagatagtatcatatctttgcatatattgctgcatggttccattagggttgatacgatagtagtatataggttcgttaattctgcatattatttttgctgtatgctttataggatgtgtgaataaaggctcttcataagcgacaccctcagcgaaatgaaagtgataatggtcataatagttcttattgataaacttacatagacagctttctgtcataatagcaggatttagaaggaaatcctttcttttatctgtcgtatcacatatgaaagtatcatatgtaagcatagatggactggctgctatatcgttagtatcacttgatgatttaagttgtataacatcggcgttgttaagtcttgcagtattatatagatattcaaggtaatatggtggaacagcgtcgtcactgtctatgaaacagaagtattcaccggaaacgtagttatcaagggcaatattgcggcatgttccctgcttgatattgacttcgttgaatattgccagaatcatatcaggataattcttctcatattcacgtattatttctggtgtattgtccgtagatgaatcatctatcagtataagttcaatattatcagttcctattgtctggttaacgatgctgtcaagaaatgtttttatatattcttcaacattatagcatggagttataactgaaacttttttcatatgttttcctcacgtttttaataaaatatcttttgcccataacattataatagtttataatcaattatatgatgtttggtggttaaaagtcaaaagatactgataaagaaaaggttaataatatgaaaatattgtattattcgtgggaagagataataagcaatgatatatatgaaacaatgcacaattatggctgcacagttaccagacttagatataatcttagcaacaatatttcagatgcaggatttatatcttatgttgagagtatgctggatgaaggcatagatggagaagcttatgattatatattcagctgcaattttcttccggttatatccaagatagctcttagaaaaaagataaagtatatatcatggtgttttgatagtccatgtacaactctttactcagagatgatatataatccgtataattatatatttcattttgataaatacgaagttgcaaggttaaagaaaaatggagttagtaatgtatttcatctgccgcttgctgttaatatgaatcggattaatacattgttagataataatcctatatcagataacgatattaaaaatgttacattcatgggaaatatgtatgcatctgctcctgattacgaatatctgtatagtcatctggatgattatcttaagggatgcatggatgctattgtcgatgttcagaaagtgtttcaggggggtggtatgctggacgaacttttggatgatgtagttgtaaatcgtataaatgcaagtgtagcattccagtatacagatgaattcaagataagtaataaggatattatcgaaaatatattatacagaaaaatatcgggtgatgacagaaaacgtattattaaaagaatagctgataaatataagattacattgtacacgaatactgaaaagtcagctgttgttaataatagtaatattgattatagaggaactcttgattattacaataatatgtctgtcgtgttcagaaattccaagattaatctaaatataaccatacgaagtatacggacagggattccgttaagagccatggatattatggcatcaggtggctttttgttatcaaattaccaggaggagctggctgaatattttatagatggggaagatatggttctttattatgacgatgaggatatgatgaataaaatagaatattaccttgctcatgatgaggaaagaaaaagaattgcagaaaatggatgtagaaaggtagctgacaaatatagttatgctaatgcatggagatatatttttagtgtatgtaatctaaagaatgaacatattgatatgagtaataggtgaaaattggagaagataatcatggatgataatgtgaaagtaaaactggaggctgcttatgagagcaataatagtatcaagccagtaaagaggcttgatgaatggcttaaggagtgtaaatcaagaaatttaataaatgataattatatagatgaaaaatcaatacttgtttttagccatcagttatcaaggacaggggctccgattgtattactcgatttggtaaggataatgaaaaaagaggggtataaggttgcagtgatttcttttatggatggcagccttaaggaagaatataaaaaagaaggaataccggttttggtatacaatagcaagtatataaatgaagaattaatagatgttctttcaaggtattttggcacatggtttattaatactctcgttttatggacatttgttgcttatgcgaaaaacaggcatataaaggttatatggtggatgcatgagaatgagcagttttatcagataatgcagaaagaatactgcaaactggtaaagacgaagaatatgaggtttcttgcagcaggaccatatgtacagagaatgattagtacatatatgaatactgagtcggagatactgaattttggtgtaaaggaagaaagaggaacagatgctatacaagcttattataatgagcataatatagtcagatttctgcttgcaggaacattatcatctcttaaagggatagatgtattagcagaggctataagaacattgccagaagtatatcatgagagatcagagtatatatttgttgggaatatgagtacagctgaggagggaatactagaggatttacttactcttgataatgaatatgataatgttaaaatatatgattcattaaatcatgatgatatatacaggttatatgataaagtaagtgtagtagttgtaccatcaagacttgagccaacatcagcagttgctgttgaaggacttatgaaaagaaaggtatgtatatgtactgatatatgtggagtgtcatattatcttgaaaatgggaaaaatgcaataattataccagcaggtaattcagaagtactggctgaaaagataaagtatgttatagataatgtagctgatttaaagtatatgtgtaatgctggatatgaagtgtataaaagtgtatattccatggagtgtcttgaaaattcatggaagaatgtcatgaaagagtgggataatcaaccattagagccttcgcttgatattattatatataattataatgataaggcggggttgatgaaaacattaaggtgtgtatatgatacattttataataatatgcaggttgttgttatagatgatgcttcacaagaggattgtcttgaatgcatagagaaagaatatggtgataaagagaatcttatgtatatacaaaatgatgagcatataggtgaatataagtcatttatatatgcttataacagtacagaatcagaattctgcagctatatatcgtcaggaacatgcatggaagccaattattataatggacttgtggcttgtattcaggataacaactgtgttggagtatgttcaaagagattgatggttaaaggtggaaaaatcatagaaacaggatataataaagataaaataaccttggatgatattcttgcagctgacagtatatgctttaagggaattgtattcagacgtaatattgtaaaaaatataccggattatgaggttgaatataaaaatatggcatttgaaagattgtatatacatatggcagagcttgggaatcttatgttctgtgatagtgaaagaatagctgatgtatgatgaatataggtggatgagtatatgataaaaaatgataatataatgtatatattctgtgagtctacttattatggacatattttaaataactagatttaatataaatatgtgtaagtaataattaaacttagattatttccttaaacaaaataaaaatattttttaaaaatacagaggtaatgtatgcgggatgataaaaatgagaatgtcaatgtaaaaaaatatattaataaaacagattgtattaagtgtaataaaaatagtgggaaaagcgataatattgatgaattaaatgaacatagaaattgttttcaagtaacatatattgaaatttctgatgttcagttcaatagtcccaagtacaaaaataacctcataaaatcctgcgattcagattatatagcatttattaatacacgttataccagtagtactgaaataagaaggattatttcagaagactcattccttatgaattatgacatgattatattgggtgagggtatattgcatggggatatgcattttgacaatttggttaactgcctagatatgaatccatatatggtgatacttaaaatgtcagtttttggtgttacaggttcttttaatgagcagcttgaatgcggtgatatatatgagttgtcgttaagagttgcacatgagaattgtgatgatactgtgtgtagtgtatatggttatagtgtttctaatgcagcagcttctgattcagcaggaaaatttcaagatagaggattgagcagaataaagcatgtaataacagataatagtaatgacaaattgtttgtaacagaaagcaggaacggaatattattaacatatgcttatgtaataactaagtatatgtttcttcttaggaagagtggacggttagaaagtgtattggataatatgacctcatatgcatcagatacaggttatgtagaacagtttaatacatatgtgatggattttttaaataatagtccgttatttagaaaaatagaagctgatacagctccgttttatataataatgggtgatgatatctgttatggagtgttaaaaagatttgccatatgccttacaaaggaatttattcataatggtcaggctgttattacatcagattgttcatatgggaagaagaccggacttgagtgtatagaaaaacagacattaaaaggaatcgttggttttcaggcaccagttttatttagagaatattttaagaatattaaagctcctaaatatgtattctggtttgatcatcctatgtatttcagggatatgatggggaaaattgataacagttattatatgctgtgtcaagatgaatattatgcagaatttatgagaaaatattatcatatacataatgctatccagttcccaccggcaggtgaagatgcaggtcttgcgggtaatagtaaacgcatatatgatattgtgttcataggctcatatcatgtattggacgaagaggttatacaggatgagtttcagaaagtttattatgattatatgatgtgtaattcttcatacacatttgaacaaggactggataagctgcttaagcgtgagggatatgttgttgatgaagaaaaattcattgatatattatgttcgcttcagaatgtatgcaggaagatagtatatgactatcggattaagatcatagaagagattattaaatccggtataaagatagatgtgtttggagatacgtggaaacaatatgatggtatgtatatggataacctgataatacataaagcggtaacagttgatgaagcacttgatgtttggggacattctaaaataggtcttaatattatgacgtggcataaatatggaatgacagaaagaatagctgatatatgtttgtcaggtgctgtatgtcttacggatgcatcagaatatttaaggaacaattttaataataatgaaaatattattatgtatgatttaagcagacttgatgaacttccaggtattattaataatgtattgtcagatgatagttttaggaagcatacggcggatgctgcatatttactggcaaaggaaaaacatacatggaagattcgtaccatggagtttttacgtatgattaaaggtgaaaataataaataattatattaaaaggcataagagtagggcgaaagtatgaaaaatgatagttattatgatacacaacaagatacgaaagtatatgatgctatagtaatagtaacaccagctgatttcaagcgtgttgaatgcaacaataaacgaatagttgattatttacctgtaaggaaagtcatatttgtaggaagctctgagcttgaaaaaatggttaaggaatctgatttaggtgacagggctggttttgttaatgagaatgacattataccatttcaggatgtatatgattgcatgaaagaggttatgtcagatatattatgtggacgtgagcttccaagaggaattgtaggatggtattatcagcaattcctcaagatgaaatattcagctatatgtgaggatgaatattatatgacctgggatggggatacagttccatgtaagtgtttttcaatgtttaatgcgagtggaaagccatattttgatatgaagcatgaatatcatgaggaatatttcattacattagagaatatcctgccaggaataaaaaaggttactgaaaaatctttcatatcagagcatatgctgtttaacagcagctatatgaaagaactgatagcagctatagaatctaacaagaatattaaaggagcagtattttgggaaaagattcttaatgcaataagaattgaacatatacaggaaaacagtttcagtgagtttgaaacatatggctcttatatgatgagcaaacatccagaagtgtatgattatcgtagctggcattctttcagatatggcggttattatttccatcctgagcagatgactgagcgtgattatgaatggatgggcagggacttttatgctatatcctttgaaaagtcgcacacagtaagagaggatcatgagaatctgttcaataatccgagatatcaggataagctgactgcacgtcagatggttgagatagtgcaggaagaggcagaagggtataatgaggtgtgggattagtggaaatcaatgattttatgcgttaatatttgatgtggaatgaatatacggattatctaatctaatccgtatacttccatataatctgctcatagtatgaattatcctgaactggttcaggaatgacatcagggtcaacttcgttattgtatcggctaggtatgctggttctgttttcggcaccagcaagataccacatatattcaaggtcaatatgtccaacgtcaatagcttgatagtcattttgtactaaatcgtaagctagcacgccagatgaaggaccgattgctaataaaaataaatcattttttgaaccatacttaaggcacgcatttaatatatcatcatatttacgaaatgagtttgttcctggggctataatacgtttgaatgatgctgcattatcaaaaaggttattgccaactcctaaacgtgtgaattcaccttccactgcaattacatttttattattccatatttttttaagatttgataatctattggcaggtgcttctgtttttttatcattcatcatcatataccatcgcgtgatatatgcatcgtgatatgttttgtttttatttagtagtgtttcatgtttttttcttgtttcatcagtcatataggcacgtatttcggattttgattcggatgtatacttgctcagatcaccataattatcagctatagcaatcattagtttatcattatcagactgtaagacttgtagtagacgttctgatagttgctcatcatattgctggaaactccatctgtttgtgccgtatattatactaaattcgccatctccgaatcttgcaagtgatttaccttcattaataatattattaatggttgttttatgagattcaatttttggaaaaaataaatggttattatgagttatgtaatctgcaatctcgtatttaagattgtttcctaatccatctatcataagttttagggctggaaggactctctcattcatatctgttgtactgtttttttgcataataagactatttttaacagtattatacagattatttatgtcatttttcatttgctgttgttctttttggaattgttccattatagatattatttgttctaattcgttcattgattcacctataagataatttatttgataatgaaattataacatttgaagtaaaaaaaacaaatgaaaaagtgaaagtcgtaataacaggtgattgagacttagatgattaaatgatagaatgaatttacagtagtgaattatataaaagaagattttgacatcgttaattaaaagaaaggcaaagcaactatggggacaattgttaatccagataattcagcgtttcaggttgcactgaattcagagatatatgttgataaaaccggcttgattgagtataccaataaggtcatgaacacattacaggggtatatatgcaacagccgtccaagaagatttggaaaatctgtcactgccaatatgcttacagcgtattacagcagaggatgtgattcggctgatatgtttaataatcttgatattagtaagtatgctgattataaggaacatttgaataaatatgatgtaattcatcttgatatccagtggtgtattgagccagctggtggagttgagaatgttgtttcatatatttccgaaagcactattgcagagcttagggaatattatccggatataataagcagggatgcagtatctttgccagagacattatcgcagataaacacgatgaccggaagtaagttcatagttatagtagatgaatgggatgtattgatccgtgatgagaatactaacagccgtattcagaatgaatatattagttttcttagagctatgtttaaaggaactgaaccaacgaagtatatccagcttgcatatatgacaggtattttacctataaagaagcagaaaacacagtcagctcttaataattttaaggattattcaatgttatatgctggtccgttagcatcatatattggatttacggaagatgaggtgcagcagttgtgtgatgtttacaatgaagactatgaagaagtcagacggtggtatgatggctataagttaggaagatatcacatatataatcctaatgcggttgttaatcttatgttagatggcagctatcaaagttattggtcttctacagcttcatatgaggcgatagttcctttgataaatatggattttgacggacttaaggaagctataataacgatgctgtcgggtaaccagattcaagttgatgtgacatcttttcaaaatgatacgatcagctttgtcaacaaagatgatgtgattacttatcttattcatcttggatatttagcttatgatcaaggctttaaaatagcagttattcctaatgaggaaatcagacaggagcttgttaaagcgactagaaggaaaaagtggaatgagcttgttacctttgagagacagtcagaacagctgcttgaagatacattgaatatggatgggaaagcggttgctaaagggatagaagagatacattcagaatatacttctgctatacagtataataatgagaattcacttagcagtgttttatctatagcatatcttagtgcaattcagtattatttcaaaccggtacgggagtttcctgcagggcgtggatttgcggatttcgtatttatcccaaaaccagagtatatagcttactatccggcacttgtggttgagttaaagtggaataagagtgctgatacggctttgcagcagatagaagaaagatgttatccagattctgtaagatcatatacaggtagtatattattggttggaattaattatgacacacataccaaagagcatacctgtcttataaagaaatatattaaagagtcataagggcagaggtaactggtaaagataacatgtaaagataatatggatttatttagtatatgcgggcattacaaaagcccgcatacactaaatatctcattaagtcttgtcctgtagttatgcagctgcaggacttttttatgcccgttagcggcgatttttatacgttcatcctcatgttttagatagtaatcacattttcttatgaggtcatcctttgattcaaagtatacgaaatcaacatcaggcacgaagtgattaagcaggtcggcctggaagttcgtcataagaaagccaccggcacccatgatatccatacatctgagcggaattccgttttttatgcttcggagtgttatatttaagttgattttgctgcatttgaacacataaggcatgttgtcgtagaagtctataggtccctgattgataacatacggcatatcaggtgtctggttatgtgtatacagctttgttttaaaatgctctgatacagcagtaaggaggactttacgttcgttctgtgcgacttttcttgcaagaaagtagttggcatatgcgtatgcaggagtttctacgccatcgtggttaggtgtatagggctccacacgcataagctctgcaagtattttgttagtttcgggtgttccagacagcatatcttcaaggaagttcattccatatacattctgctgggcggatatgatggcatcaagatagcctctcgcccaaggattcagcttgtcatatattctgtcgtagaagtttcctttttcgttgtacatagagcctacaaaagatatgtcactgtcaaacacttcatgaatatgttcattcagtgtaagcttatccagtctgtctgtgttggcagcaagcggcatatagtacactgtatcgattccaccattcttaagctcaatatactgtgcgctgtcgaaaaggaatatgtggttgcatgggttggttatagtgtatgagtatattgtaagcagagggctgtcgtatacccatgctatataagggatgttgtggcggttacagcagttggatacgacaacgctgtagttaaatgtaaatacagcatcatatttgttctgcttcctaggcatgacagtattacaacagctattactattatagctattactattgtggttatcattatttcctataattagactgtcaaacagcttatcaaactcttcacttctccgttctagtataagaggagtggatataactgtaagttcatgtcccatggcaggaagtatttctttcatatcttcaacaccgaagtgtttatgttcaaactcaagaatacgcataattattttattcgttgtatatcagttgttttcactattatgtatacaagctgacattcctttctttttattttctagaaattattctgcaaagccagtttttatattcatcattttgctgggaatgccatatctatcatctgtatcagtcttgtatcatatgtatgcagcttcttaactgtttcatatccgtgattggcgatttccatacgttcatcctcatgcttaaggtagtaatcacattttgctttaagatcctccatgctttcgtatgcaacaaggtctttgccaatttcaaagaattcgggcaattcagcctggtagttggttataaggaagccaccgcagccaagcacgtcgaatacacgcagcgaaagtccggagcgtatggatttggcggttatgttaaggttgattttactgttgttaaatataagcggcatttcctcaagtgacttggcgaagcctctgttgttgatatgcggcatggatgatgtgtcactgcctgtatacatgtctacattgaaggaatctgataacatacgcagggcacggagtctttcctgctctgcaaccttgacacttatgtagtgctgtgctacaagtgctttggagttacagcgggagttctcaggaaatacatacgttcctaagttgctttttatgaatctttctgcgaattcctcagatatgacatcttcaataaagttatatccatatatttttagttgtgcctctattaacccatcaacatatccggtatcgtattcgttaagttttatcttgttgtagtcgcatttttcctgatatgtagaacctataaaggatatgtcacttgaaaagtgcttacgctcacttatgctggaattttgtatgaccttgtcagttcttgctacattggtcgcaagtggtatatgaaatacatgacctggattataaggtacgaattccttataaagcatgcggtcaaaaagaaatatacggttgcaagggttggatagagattctgagtacagctcaagcacgggactgtcaacgataagacttatgtatacaatatttgctatattgcatacctcggaaagccatgggaaaaagttaatggtgaacacaaaactgtagccgccgtcaactatatcagaagctgtccgcttaatacattcagacggggtaagatttttattaaatatttccatacattcttcatgaacgtcaagtccaagtcttttgaaagaatctattatgtcaggttcgcatatgctgccgtatctgtatatatatattttcatgaaaaacctcatttctaaaggcttaaattaaatataactgtgctgtcaaagtaactctttattctggcatctataagtgataagcttcctctttaatattcatacaagccttatatctttaatataaatgtattttcgtaagaaagcaatagtggttgtttagatgagtgggttaattcatagtaatagagtaaagattttgtgcgttggattcatagtgattgtttacgtaactggtattccattgtattataattcagtaaggttctgacatgagaatgttatgagaatatgataagaatgttataagaataccttaagaatgttacgagaatatcataataatattatgagaacatcataagtatgtaataagaatgtaacaggtgtcatagacagatgctacatgaaaaatgtacaatactatatgatggtatacaatagaagcaaagagggtgagaggaacatgaatatattatttttccaatggttcgcattcatgcagaagggcatagagaatgcattaaagaagatgaatgtaagctatgatgtgttttactatgacatgaaagactgggataatgatgatgagcttgagagaaagctgtctgactatcttaagaatagtaatgttacatatgatgctgtgttttcagtgaattttattcctatggtatcggatgtatgcagcagattagtgtctgagtttaatacagatagatacaggaagcttaagtacatatcatgggtatatgactgccctatcaatataagaaggacagctgcgttaaagaatgactgcaatatcatatatttttttgacagaatacaggctgaaagctatgcaaagcagggagtaagaggtgctggacatatgccacttgctgttgatactgatatctttgctgaggctattaataatgcggtttgtaatgttgtagacaatgttgcaagcaatgttggaaattcttgtattagtgatgttgcatttgtaggcaagctttacaggtcggattatcagtatataagcaagtatcaggatgagtatacaaggggctatcttgaaggtatagtatcaacacaggagaagatatatgggggatatgttatagatgattgtgtgaatgataatattatgaaatgtatcaatgataactttgcgaaagtgtcaggtggaacttattctgttattaagccggaggttacttatgcgcttgcaactgaggttacggggagagagcgttataaggcacttgcgctgctgcagaacaggtgcagggttaatctttattcaactgataaggatgacaggctgtcaggacttaaccagtgtggtccggtggattattataatcagatgccgcttgcttttaatcaggcaaagattaacctaaatatatctttaaagattatacagtcagggattccgttaagagtgtttgatgttttgggctgtggaggctttcttataacgaattaccagcaggagatagcagagaactttgaggatggaagggaacttgtaatatatgaggatattccagatcttattgcaaaggtggattattatctgtcacatgatgatgagcgcctaaggatagcgtgcaatggatatgaaaaggtaaagagtgaatgtacatttgaaaaaagaatgaataaaattttgtcaggaatgttataattatgcttgtataaaatcattgattaacttacaataaaggcatataagtaatatcataaagccagattatgagaatttagtaatgcatattgagaaagattataagaggcaggttgtacagattatggaaaagcttaattcattttataaaatgcttaaaaataatgcagagaaatatcctaataaggaagctataatatatgatactatgactatttcatatagcaagctttttgaggatgtatgtaagaaagcacttcaccttaagagatttacaggaaaccgtattgcactatatggtccttcatcatataggtggattgttaatatgtttggtataatacttgctggtaaggatgttatgcttgttgatttctttctgccacagaatacccgcaacgatatacttaaaaaggtcggggttgactatgtacttacatctacgaatcagtatattcttgcagatagtaacgcaattatgataccggatgccgaaaaggatgatgtggaaggctttgtgtatgatgaggattcggctgtggagggcaatatacttatgcttacggctgttccacaggagtgtgataaagcagtagtccttactgtatctaatatttttaatactatcaatgagattaatgagttctgcttatgcgaagagaatgataaggttctggcacagatagcacttcatcatatatttggttatatatatagtcttatatggccgttgcataatggtgcgtgtgtgtgcataggaagaggcttaaggcatatagatgcggacacatattattataatcctacaattcttcctggttcaccatctatgatagattatttaaagagaatcaaagcatttaacaacgatttaaggacggttattatcggtggtgccagctgtccgttcaggctttttgaggctttaagtgacagggacttaaaggtatataatgtatatggcatgacagaaacatctggctgtataggaataaatgatacaatggacggtacttataagctgtttggtgaaacgcaggttacaatcgcagctgatggtgagattcttgtcagcggagattgtgtcatgaatggttatgataaggatgaagcttatacagcacgtgtactaaaggatggtgtgtatcatacaggcgatcttggaaggattaacgagaagggacgtcttgtgcttcttaagcgtaaccctgagattattcttcttccaacaggtgagaagataagccgtacagttacaataagggaaatcacagcacttgatggcgtttcagaaagttatgtaaccttgtataatgataaactcacagcattaatagtacctatagataaggaagcaaggatagaccgttttgtaaggcttatcaacagatataatgaaagaaagggcttccgctgggagatacagaaggttaagcttataaaggagccgttgccaagacttgataatggagatatagatcaggatgctgttgatgatttaatggttgatctgacagatgttggatagacagcgcacgtataaagggtgatatctggtatgtcagggttaagaatgactggcgtgtgccgatatatttatcgtgtattatgaaccgatagtaaacatgatggtataataatattattattagaatgagaggtagtatatcatggaggatataagaagtaagcagttagaggtgttaggagaagctaaggattattgcataaaggtgcttcacagtatagatactgttattcctgagcttaaaggtgctaagaaggatgatacagatgagtatcttagaatgacagtagatgcgattaacaacacattagagatgtataacgcaacacgcacgattgtaaaggaatactcagatatagatgaaacagaggtaaataaagcggttgggaagcttggagctgcacttaagggcagtgttgataaagataaggcagcagcacttgaagatataaaggacttcataagggcttatggcgaggcagcaaagaatattacagaagcatagatacatttatttgtcagtattgttgtttaattgaatattagttggtgacgaacggacaacagcatatatgctgtctgactttagcttaatttacgaaaatgaatgtgtggctaaatcagaggggagaggcatgagcggcggaattgtgcgtaaaacgctaagttcttgcaacgaatatgacttggattgtcaattttgcaaatagagtcaaattttcacaacttcaatataaaatacataggtgggattgagcacaaggtactcaatcccacctttttctggcttttcactgtatcaacgtagttgaattttaatactatattatgtcaaagacagccataaggctagtgaggtattttaagaataatgcgcaaggaacacttgaaagctgattgtgatagttcttagatattccctcaatatccagcaacgattatacatggatgtataatcgagcgaaaacgaaacatggatgtttcgtatgagcggttgtgtccgtaaacaatacctacatggaatatcttagaaatatccaatcagctttctggtgactgtagaattattcttaaaatacctcactagccttatagcgtccgttcgtcaatataaatacatcaatataaatacatcaatataaatacatcaatataaatacatcaatataaatacatcaataaaatacgtcaaaataaataatatgaatcaactgtgccaaacaatatatttatatgtatccgttaaacatcatgccagtataagctgaaaggttatacggatcattgtatgtacgggtagggtttttataagcaataatcttattgttgacatagtccataggattaagtgctatattttcagcctttgttttaatagagtctttgaatgagttaagactttcaaaaactttgcttaactggttgtcatcagcagccttgcttagaacttctttgttagtgcttattgttccatccttgttaagagtaagtccgttgctttcaagctgttttttgtgtgaacgtgctatagcagttatttctttgtgaaggcgttctgtaccctggaactgattgttggctttgtcgttggcagcagatataagattgttatatcctgataccagttcattaatactttctgctattgaatcagcatcagctttgaggctgatagttactggattatctgtaacctctgaaagttcaagtgcatatgacttgttgattgttacaaggttattcatggaagaacgttcttcatcgtttatgttaaatattgcgtttgaaggatattgtgcaacacggtcaagtccaagagtgcttatcaatgcagcgttggcagatacatcagtcttatcgctgttctggcttggttcaatcttgaatataacaggtgaggaaccgctgattccggttgcttcggactctatgtttatggctgtgttgccaagactgtcttccttgatagttgcagtaagtccgatgtttgatctgtttataagccttgcaagcttattctgtatgttgtttaaggtttcactgctctccacactaaactggaattcataagttacattattaatagacagatcaaaggaataatcacctgcttttacaagtctggagcgaggatgcagatagttgccggtattaatctgggatgctgcaagctgctttacatttatgtcaaatgattcatcatctgaggcaaggctcgaatctccgatgtactgtgctgatacagcatcagaattgcttgacacagcagattttttaaatgtcatctcaccgcttgaactgtctgataagtcctgggttatattctcaagagcacgtgcgttttccttaaggtctattgcatatttctgggcagcactcgataagtcaagcttgtatacaggggtctggctgttaatctttacaaccttgctgtatgtgtttttaagctgggatcttgtatgggtatcatacttggaatccatcctgtgtccgtactgggacaggtagtagctatatacactactgatcataacagtcacctccttgtctgtataatcaatctgtattatatctgtagtggcagcactgttaaaaaagattatagaaacagtgctatattaatatgtatcggtacgtataacaaatatataattatcaggaaatccatttccataaaaaatatcgaccggatacattgctgtgtggtaaatttgcttttaacacacacattataacattgtttataataatgcacaatgtcgccatattcttattttataagcataatgttgattttgcaatcattttatagtaatattttgataagaaaattttgtagatgaaatttttgatttataaggcattgacatcactatgattgttacaatataagtatgaatgaatataacaatgaaaacataattttaatataatgcaaacaaatacaatgtagataaatataatagataaatataataaaagaaataaaagttataaaattaataacaaatgggttgacggattgataaataatgtgatatattaggctggctatggaagcggtcttttttttatgccctgaactgacccaacggtacaggatataagaaaaaaccaattggtgttaataacacctgcaaaataaataattggaggtggaagttgtgcgagtaaagataacattggcatgtacagagtgtaaacagcgcaattacaacatgactaaggaaaagaaagcccatccagacagaatggaaactaagaagtattgcaagttctgtaagtcacacacattacacaaggaaacaaagtaattagtatcagtgaggtattaagatgagtgaagctgttaagacaaagaaacagaaaaagagctggttcaagggacttaaggcagagttctctaagatcatttggccagaccagaagtcacttacaaaggaaaccatcgctgtattggttgtatccgtattattaggtgtaattatttcagttgtggacttgattgttcgctttggaattgaattcattgtaaagtaaggaaaaggtgatcagatggacgaagcaaaatggtatgtggctcatacgtattctggctatgagaataatgtaagagttaatatcttaaagacagttgagaacagaaatcttcaggatcagatctttgatgtgcttgtgccggttgaaacagtagttgaagtaaacaacggcaagccaaagacagttgagagaaagatattccctggctatgtatttgttaagatggttatgaatgatgacagctggtatgttgtcagaaataccagaggtgtaacggggtttgttggtcctggatctaagccagtgccattatctccagctgaagttaaatcattcggaatcgatgatgagaatggttcagttgaagaatctaagccagtggttgagttcgctggtaaagtgggtgatcagattcagattctttcaggtgcctgggagaatacagttggtcagatcacaagcattaatgagggcaagcagtgtgtcactattaatgttgaaatgttcggtcgtgaaacaccggtcgaagttgacttcacagatgtgaaggtactgtaatcaaggtgatcaaaagctgtacgggctgcatataaaggcctggcatcagttgttttgactgcctgtgggaggcttaatagccgccataaaccacatttataattaggaggtgccacaatggcaaagaaagtaacaggttatattaaattacagattcctgccggcaaggctacaccagctccaccagttggtccagcacttggtcagcacggtgttaacattgtagaatttacaaagcagtttaatgcaaagacagcagatcagggtgacttaatcatccctgtagttattacagtttatgctgatagaagcttcagcttcatcacaaagactccacctgctgcagttcttcttaagaaggcttgcaacattaagtcaggttcaggtgttcctaacaagactaaggttgctacaatcaagagagctgaagttcagaagatcgctgaacttaagatgccagatcttaatgcagctactatcgaagcagctacatctatgatcgaaggtactgctaagagtatgggtatcgttgtagaagactaattctatatgtatctgtaactactgtaattgattattaatgattaattactttcaattgattattagagatttcatagaagaacatgcggatagattaatcctataatttttccgggattgttcaatatgtgggaggaaagatagaatccttccgataacaccactaggaggtttataatgaaaagaggaaagaaatacgtagaggcagccaagaatattgaccgccagacattatatgaagcagctgacgcagtttctttagtaaagaagagtgcagttgcaaagttcgatgagactatcgaagctcatatcagaacaggttgtgatggacgtcacgctgagcagcagatcagaggagctgttgttcttccacacggaacaggtaagactgttaaggttttagtatttgctaagggcgctaaggctgatgaagctgaagcagctggtgcagatttcgttggtggtgaggaacttattcctaagatccagaatgacaactggtttgattttgatgtagttgttgctacacctgatatgatgggcgttgttggtcgtctcggacgtgtactcggacctaagggcttaatgccaaaccctaaggctggtacagttactatggacgtaacaaaagctgttaatgatattaaggctggtaagatcgaatacagacttgataagactaatatcattcacgtgccaattggtaaggcttcattcacagaggagcagttatcagacaacttccaggctattatggatgcaatcgttaaggctaagccatcttcacttaagggtcagtatttaaagagtgttgttcttacagctactatgggacctggtgttaaggttagcacagctaagtatgttggctaatatgttgtttcttgtagttaacaaggaatattgatgcgaaagattgattttgcaatattattaaaacatattttgtaaaaatggttgacaacctatatattatgatagtatactatcagctgtatgtgattattcgcatacgaagtgaaagctatatttcacattttgcctaagacagcaggtcccgaaagggttaaaggtaatacgcctaccgaggacagacttgtattttaaagtgtgtcagtctggaagtacagactgatgataagactttagaatatatttatcagtttattcagtccttctgtcatagcggcaggagggcttttttgatagcctgatacattgtacgtctgggcagaatattatctggaaacagatactaatctaacaggaggtaaatattcatggcaaaagtagaacttaagcagcctattgtagacgaaatcaaagcaagcttagaaggcgctcagggcgttgtggtagttgactaccgtggcttaactgttgagcaggatacacagcttcgtaagcagttaagagaagctggtgtcgtttacaaggtttataagaatactttagtaaagagagcaatcgcaggtacagagttcgaaccaatgacagaggttcttgaaggacctaacgctattgcaatctgcaaggatgatgctacagctccagcaagagttttagctaactttgctaagacagcagaagcacttgaacttaagtgtggtgttgttgaaggtacttactatgatgctacaggaatcgcagctatcgcaagcattccttcaagagatgaacttcttgctaagttccttggaagcatccagtcacctattacaaactttgcccgcgttattaagcagatcgctgagaagaacgaagaggttgcataatatcgcagcataaaacgattatcgacgaggctgcctgaaacttatcagacagactacgaaacttaattaaagactataaaaaggagattataataatgactacacaggaaattatcgaagttattaagggtttatcagtattagaattaaacgatttagttaaagcatgtgaagaagaatttggtgtttctgcagcagcaggtgttgttgtagcagcaggtgcaggcgcaggtgctgcagctgaagaaaagacagagtttgacgttgagcttacagaagctggcgctaacaaggttaaggttatcaaggctgttcgtgaaatcacaggtcttggcttaaaggaagctaaggaagttgttgatggcgctcctaaggttattaaggaagctgcttctaaggaagaagctgaagaaatccagaagaagcttgaagctgaaggtgctaaggttactcttaagtaatttaaaactagaggattacaactttaatatggcaatatgatgaaaaaacacttgattttttgagttatatttggtatattataataaatgtgaaaaagttccagttgttttattgacagctgggactttttttgctattatggataatgcactattatggtatggtgtgcatagtttttgtacacatatctataatgtaataaattaatgtaaagaaaactaaggggtgaaacgtcaatggagaaaaacagaatacgtccagtaaagtcaggcaaagcgatgcgtatgagtttctcaagacagaaggaagttcttgagatgcctaaccttattgaggtgcaaaaagattcttaccagtggtttttaaatgaaggcttaaaagaggtctttaacgacatctctccaattgcagattacaacggaaggctcagtcttgaattcgttgattttgcattatgtgaagaggagagaaagtactctatagaagagtgtaaggaaagagatgctacatatgcagctccactcaaggtacgtgtaagacttcataacaaagagaatgaagatatcagcgagcatgaaatcttcatgggtgaccttcctttgatgactaagaccggtacatttgtaattaacggtgcagaacgagttatagtcagccagctggtacgttcacctggtatttactatgatatacagaaagataagtatggaaagatattcctgtatagttctactgttattcctaacagaggtgcatggttagagtatgaaacagatgctaacgatgtgttctatgttaaagttgaccgtaacaagaaggttcctataacagttcttataagagcacttggttttggaactaatgcagagattattgacatatttggtgaggagcctaagcttcttgcaactatggagaaggatacttctactaactatcaggaaggtgtgcttgaactttataagaagttaagaccaggggaacctttgtcagtagatagtgctgaagcacttatctcaggcatgttctttgatcctagaagatatgaccttgcaagagtaggccgttataagtttaataagaagctttctttcagaaacaggattgctggacatgttcttgcagaagatgtagttgatggcaacggtgagattatcgctaatgcaggcgataagcttacaagagaaactgcagaacagatccagaatgctgctgtacctgctgtgttcttaaaggcagagttaaaggcagctgatggttcggtacgtgaaagagtagttaagatattatctaaccttgcagtagatattactaaatgggtagatattacagaggaagaagctaaggaacttggtgttaacgagtatgtttattatccagttctttcacagatattagcagataatgaatcacctgaggatatcagggatgctatagaaaagaatgtggcagatcttattccaaagcatattacagttgaagatatacttgcatctatcaactacaatatgcatcttgaatatggtattggaactaaggatgatatcgatcaccttggtaacagacgtataagagccgtaggtgaacttttacagaatcagttcagaatcggtatttcaagaatggaaagagttgtacgtgaaagaatgtcaactcaggatttaagtggtatatctccacagtcacttataaatatcaagcctgtaacagcagctatcaaggagttctttggtagttcgcagctttctcagttcatggatcagaacaatccattatctgagattacacataagagacgtctttcagcacttggtcctggtggtctttcaagagatcgagcaggtttcgaggttcgagatgtacattatacacactatggaagaatgtgtcctatcgagacaccagaaggtcctaacatcggacttatcaactctcttgcatcatatgcaagaatcaatgaatatggtttcgtagaagctccttatcgtataatagataagtcagatcctaagaatccaagagtaactgatgatgtacgttactttacagctgatgaggaagatgattaccatgtagcacaggctaatgctgagattgatgaaaatggatatttcgttaagaattcagtatctggacgttacagagaagaaacatctgagtttgataagagcatgattgatcttatggatgtatctcctaagatggtattctcagtagctacatctatgatacctttccttcagaatgatgactgtacacgtgccctcatgggttctaacatgcagcgtcaggcagtacctcttcttatgacagaggctccagtaataggtacaggtattgaaaacaagacagcatgcgactcaggtgtgtgtgttgttgcagaagaagatggtgttgttctttcttctgaatctaacaggattcttgtaagagagacaagcggtaaggttcatgagtacaagcttactaagttctcaagaagtaaccagagtaactgttataaccagagacctattgttttcaagggtgatgaggttaaggcaggagatgttatcgctgatggtccatcaacatctaacggagaaatagcacttggtaagaaccctcttatcggtttcatgacatgggaaggttacaactacgaggatgctgttcttcttagtgaaagattagtaagagatgatgtatatacatctatccatatagaagaatatgatacagaagcaagagatactaagttaggaccagaagaaatcacaagagatcttccttcaacaggttctgatgctgtcaagaatcttgatgaagatggtattatccgtataggtgccgaggtaagagccggtgatatccttgttggtaaggttactccaaagggagaaacagagcttacagctgaagaaagacttcttagagctatcttcggtgagaaagcaagagaggtaagagatacttcacttaaggttcctcatggtgcttatggtatcgtagtaggcgttaaggtatttacaagagagaatggagatgaattagctcctggtgttaacaagaatgtccgtatctacattgcacagaagagaaagatttctgttggtgataagatggccggacgtcatggtaacaagggtgtcgtttcaagagtacttccagtagaagatatgccattccttccaaacggacgtccacttgatatagtacttaacccactgggtgtgccttcacgtatgaatatcggacaggtccttgagattcatttaagtcttgcggcaaaggtattaggctttaacgtagcaacacctatctttgatggtgctaacgaaaatgatattatggatacacttgatatggctaattcttatgctaaccatccttttgatgatgatgagcttgcaaaggaaaaggctgaagcagaggctgcaggtgaagagtatccagcagatatgactacatttacagctgaatataaggatcttttaagagatgatgtatttgagttcctttcagataacagagctcacagagcagagtggaagggtgttcctatcggaagagatggtaaggtaagacttcgtgatggtagaaccggtgagtactttgatagtccagttactattggattcatgcactacttaaagctccatcaccttgttgatgataagatccatgcacgttcaactggtccttactcacttgtaacacagcagccacttggtggtaaagcacagttcggtggacagagattcggtgagatggaagtttgggctcttgaggcgtatggtgcatcatatacacttcaggaaatccttacagttaagtcggatgatgttgttggccgtgttaagacatatgaagctattattaaaggtgagaatatccctgaaccaggtattcctgagtcattcaaggttcttcttaaggaacttcagtctcttgcacttgatgtaagagttcttgatcaggataacaacgaagtccagcttcttgaaagttcagagtatgaggttacagacttcaagaaggttcttgatgatggtggttataagagaaacagccgtgatgaggaaaatgaattaaagaatgccggttaccatgcagaaaagcagggtgatgatggtgaagctactatggaagaactcggatcagatgatgatgacgatttcgatcttgacggctttgatgatgattttgatgattacggtgacggaaatagagaagaataatagaagggagcactataatggcagaagagattaagtcaaataaatcaatgaaatttgataaaattcagataaagcttgcttctcctgagagtattttagagtggtctcatggcgaggtaactaagcctgagactattaactacagaactttaaagccagaaagagatggtctgttctgtgaaagaatattcggacctagcaaagactgggagtgtcattgcggtaagtataagaagattaaggataaaggcatcatatgtgataagtgtggtgttgaggttactaaggcaagtgtccgtagagatcgtatgggacatattcaccttgctgctccagtttcacatatctggtattttaagggaatccctagccgtatggaccttatccttgatataggacctaagaatcttgaaaaggttctttactttgcttcttatatcgtgattgatccaggtgaaacagatattccattcaagaagattcttactgaaacagagtacagagatctttatgaccagtatggtaacacattcagagttggaatgggtgctgaggctattttagagcttcttagaagcgttaatcttgaagaagaagtggcaaagcttaaggaagagcttgctactactacttcacagaaggctgcaagacttattaagagaatcgaagttatggatgcatttatcgctgctggtactaagccagagtggatgatccttactgaaattccagttattcctccagacttaagaccaatggtacagttagagggtggtagattcgcaacatcagatcttaatgatctttatagaagaatcataaacagaaataaccgtcttgcaagacttatggaacttggcgctcctgaaatcattgtccgtaacgaaaagagaatgcttcaggaagctgttgatgcacttatagataatggccgtagaaacggtcgtcctgtaacaggacctggtaacagggctcttaagtctttatcagacttattaaagggtaagcagggacgtttcagacagaatcttcttggtaagcgagttgactattcaggacgttctgttatcgtagtaggaccagagcttaagatatatcagtgtggtcttcctaaggaaatggctattgagttattcaaaccattcgttatgagagagttagtaagacgtggtcttgctgagaatattaagaaagctaagaagagtgttgaacatcttgaaacagaagtatgggatgtgcttgaagatgttatcaaagagcatccagttatgcttaaccgtgctcctacacttcacagacttggtattcaggcattcgagcctatccttgtagaaggtaaggctattaagcttcatccacttgtttgtacagcgttcaatgccgatttcgatggtgaccagatggccgtgcatcttccattgtctgtagaagcacaggctgagtgtagattcatgcttctttcacctaacaacttacttaagccttcagatggtggtccggttgccgttccttcacaggatatggttcttggtatctactatcttacacaggaaagacctggcgttaagggtgaaggtaagatatttaagagtgttaatgaagcgcttcttgcttatgagaatagtattattactcttcattcaaagattaaggttagagtgtctaagacaaatgcatcaggagaagaagtatcaggtatagttgagtctacacttggacgtttcatattcaatgaaattcttcctcaggatcttggatatgtagatagaagcaaggaagaaaacttcttaaagcttgaggttgacttccatgtaggtaagaaacagttaaaggatatcttacagcacgttattaatactcatggtacaacaacaactgctgaagttcttgatgatataaaggcaatgggttataagtactcaacaagagctgccatgacagtttctatatcagagatgacagtgccacctgttaagaaacagcttattgctgatgctgaacagaaggttgaaagaatcaacatgaactacaacagaggtcgttcaactgatgaagaaagatataagaatgtaatcagagtatggcaggaaacagataagacattgcttaaggcacttcttgatggtcttgataagtacaataacatcttcatgatggccgattcaggtgcccgtggttctaaccagcagattaagcagcttgcaggtatgcgtggtcttatggcagatacatcaggtcacactattgaacttccaatcaagtctaacttccgtgaaggtctggatgtattggagtacttcatttcagcccatggtgcccgtaagggtctttcagatacagcgcttagaacagccgattcaggttatcttacaagacgacttgttgatgtttcacaggatcttattgtcagagagacagattgcagcgttggtaaagttatacctggtatgtatgtatattcatttgtcaatgacagagctactaactcaagtgatgcaaaagaagatattcttgagccattacaggagcgtattacaggaagatatcttgcagaagatatcaaggatccagctacaggcgagatagttgttgcagctaaccaccttgtaactcctaagagagcagaagctattattaagactggtgtaaaccaggttaagataagaacaatccttacatgccgttcacatatcggtgtttgtgctaaatgttatggttctaaccttgcaacaggtcagacagtacagattggtgaagcagttggtatcatcgctgcccagtctatcggtgaacctggcacacagcttactatgagaacattccatactggtggtgttgctggtgataacattacacagggtcttcctagagtagaagaacttttcgaggcaagaaagccaaagagtcttgcggttcttgctgagtttggtggaacagtaagctttgctaagacagataagaagacagatatcgttattacagatgacgaaggtaattcaaagtcttaccctgtatcaagagatacacgtgttaaggttcaggaaggacaggttgttgcaactggtgaggaaatcacagaaggttctgagaatccacatgatatcgtaagaattcttggtgtaagagctgttcaggattacatgcttcgtgaggttcagaaagtttaccgtatccagggtgttgatatcaatgataagcatatcgagcttattgttagacagatgcttaagaagatagttattgattctgctggagattcagatttcttacctggttcacaggttgatactcttgaattcacagaggttaatgaaaagcttgaggaagagggtaagatgaaggccacaggaactcctattatccttggtataacaaaggcttcacttgcttcaacatcattcatgtcagcagcttcattccaggaaactacaaaggttcttacagatgcagctattaacggaaagattgatccacttatcggtcttaaggaaaatgttatcataggtaagcttattccagctggtactggtatgaagagatatcagaacgtagagcttgatacagctgcagcttatgatgaacttgaagaagatgagatattaagcttcacagaggatggagaggaaactcttgattttactgaggatgctgatatacaggaagctgaagatgaggttacagaagagtaatcattcagataaaggctttacatcataaatataacagaaagcaggagatgaagagtctcctgcttttttaaaatcactaatatatttttaagcaaaattttttgctttctttttttggtaaaatacttgacgaattttaaattaaaatatatactaattaagcgtgcgaaaaagcaagctcttttttatgcacgtaaatatagattgggcagcttataaagctggctcacacttatttcttagttattatactaagtgcaaccattcattattctaattccgggaggtgaaaaaggaatgccaacatttaaccagttagtaagacagggaagaaagtcaacagttaagaagtctacagctccagctcttcagaagggatataactcacttcagaagaaggctacagatgtatctgcaccacagaagagaggtgtttgtacagctgttaagacagcaacacctaagaagcctaactcagctcttagaaagatcgccagagtacgtctttctaatggaatcgaagttacttcatatattccaggtgaaggccacaatcttcaggaacatagcgttgttcttatcagaggtggtagagttaaggatttaccaggtacaagatatcatatcatcagaggtacacttgatacagcaggtgtagcaaagagaagacaggcacgttctaagtacggtgctaagagacctaaggatgctaaataattcataaagaattaagcatcataagtctgtgattgatttacaaggtgaatcagaatatttgcagattattgcatacaataatttacgaacaattaaatttaaagtgccggagttagattaatccgaaggttgcaggtttaagatatacggcccgaacacaatttaatttgtgagtacctatgaattaatgaaacgtcgttagttgagggctgatgaggctgttaggcgttcattagtgcgaaatgataacgacaatacaatgttaaggagggaagaaccgtgccacgtaaaggacatactcagaaaagagatgtattagcagatcctatttacaataacaaggtggttactaagcttatcaacaacattatgcttgatggtaagagaggagtagctcagaagattgtatatggagcatttgacagagtcgcagcaaagactgaaagacctgctttagaagtattcgaagaggctatgaacaatatcatgccagttctcgaagtaaaggcaagacgtatcggtggtgcaacataccaggtacctatcgaagttaagccagatagaagacaggctttagctcttcgttggatgacagcattctcaagagcaagaggcgagaagactatggaagaaagactcgctaacgagattcttgatgcagctaataacacaggtgcatcagttaagagaaaagaagatatgcacaagatggcagaggcaaacaaggcttttgctcattacagattctaataataattataggaggttttatccatggctggaagagaatatccattggagagaaccagaaatatcggaattatggctcatattgatgctggtaaaacaacattaacagagcgtatcctttattatactggtgttaatcacaagattggtgatactcatgaaggtactgctactatggactggatggcccaggagcaggaaagaggtatcacaattacttcagctgctacaacatgtcactggacacctgaaaaagaaggtaagccagataagacacagccagaatatcgtattaacattatcgatactccaggacacgttgacttcacagtagaagttgagcgttcgcttagagtacttgatggtgctgttggtgtattcgatgcacagaacggtgttgaaccacagtcagaaaacgtatggcgtcaggctgataagtataacgtaccacgtatggcattcatgaacaagatggataagatgggcgctgatttcttcggatcatgcaaccagcttattacaaagcttggtaagaatccagtactcgtacagattcctattggtaaggaagatgatttccagggaattatcgacttattcgagatgaaggcttatatcttcaacggtgataagggtgatgacatccaggttggtgagattcctgctgatttagctgatcaggcacaggaatatcatgacaagcttgttgagcagtgtgctgaacttgatgaagaccttatggagaagttctttaacgatgaagaacttacaattccagaattaaaggcagctttaagaaaaggtactatcgaaggtacagctattccttgtctttgcggtacagcttataagaacaagggtgttcagaagcttcttgatgcagttatcgagtacatgccagctcctactgatatccctgatatcacaggtgttgatgaagacggtaacgaagtagtaagaaagtcatctgatgaagagccattctcagctcttgcattcaagattatgacagatccattcgttggtaagttagcattcttcagagtttactctggtacattaaacgcaggttcttatgtacttaatgctaataagaataagaaagaaagagttggacgtatccttcagatgcatgccaaccagagaaaagaaattgataaggtttactcaggagatatcgctgctgcagtaggtcttaagattacagttacaggtgatactatctgtgatgaagcacatccagttatcttagagtctatggaattcccagagccagttatcgagcttgctattgagccaaagactaagaatgaccagggtaagatgggtgaagctttagcaaagcttgctgaagaagatcctacattccgtgctcatacagatcaggaaacaggtcagacaatcatcgctggtatgggtgaacttcaccttgatatcatcgttgacagacttcttcgtgaattcaaggttgaagctaacgtaggtgcacctcaggttgcttacagagagtgctttactaaggccgttgatgttgatagcaagtatgctaagcagtcaggtggtcgtggtcagtatggtcactgtaaagtacgtttcactccacttgaagctaacgttgataagtttgatgttgagacaaagaatacagtattaattaatgagcctccagttctcttctgtgagtcatcagtagttggtggtgctattcctaaggaatacattccttcagttgctgatggtatcagagaagcagctaactcaggtattttagctggattcccagttctcggacttagagcagatatttatgatggatcttaccatgaagtcgattcatcagaaatggcattccacattgctggttctatggcattcaaggatgctatggctaaggcagctccagctcttcttgagcctatcatgaaggttgaagttactatgccagaagaatatatgggtgatgttattggtgatatcaacgctcgtagaggacgtattgaaggtatggaagacatcagtggtggtaagatgattaaagcattcgttccactttcagagatgttcggatatgctacagaccttcgttctaagacacagggtcgtggtaactactctatgttcttcgataagtatgaacaggctcctaagtcagttcaggataaggttattgcttcaagagcaaaataatctatcttagtataattaaatgataatttaattactgcgaaatatagtataatgtatttcgcagtaataaatatatgatgtatttatgtctatatctggattaagctggttagaatatgtaaatatatcacttaattcatataaaagtattagtttacaatgcttttatataaaatatggttgaaatattcttgaaaaaataatataatagatttcagctatgagaagtctgcattgcagacgattattctatttaaattaggaggattttaaacaatggcaaaggctaaatttgaaagaacaaaaccacattgcaacattggtacaattggacacgtagatcacggtaagacaactcttacagctgctatcacaaagactcttcatgagagacttggtacaggtgaagctgttgcattcgaaaatatcgataaggctccagaagaaagagaaagaggtatcacaatttcttcagctcacgttgagtacgaaacagaaaagagacattacgcacacgttgactgtccaggccatgccgattatgtaaagaacatgatcactggtgctgctcagatggatgctgctatcctcgttgttgctgctactgatggtgttatggctcagacaagagagcatatccttcttgctcgtcaggttggcgttccttacgtagtagtattcatgaacaagtgtgatatggttgatgatccagaacttcttgaattagttgatatggaaatcagagaacttcttaacgaatatgatttcccaggcgatgatacaccaatcatccagggttcagctcttaaggctcttgaagatccaagcagcgaatggggtgacaagattcttgaacttatgcacacaatcgatgagtatgttccagatccacagagagaaacagataagccattccttatgcctatcgaagatatcttctctatcacaggtcgtggtacagttgctactggtagagtagaaagaggtgttcttaaggttaacgaggaagttgaaatcgttggtatccacgaagacatccgtaaggttgttgtaactggtatcgaaatgttcagaaagctccttgatgaagcagaaccaggtgataacattggtgctcttcttagaggtgttcagagagatgagatccagagaggacaggttctttgtaagccaggttcaatcacaccacaccacaagtttacagctcaggtttacgtattaacaaaggacgaaggtggacgtcatactccattcttcaacaactacagaccacagttctacttcagaacaactgatgttactggtgtttgcgaacttccagctggtacagaaatgtgcatgcctggtgataacgtagaaatgacagttgaacttatccataacgtagctatggagcagggtcttcgtttcgctatccgtgagggtggtagaacagttggttctggtgctgttgctacaatcattgaataattgttatttaatacagtaattttaagggtttccgagattcctcggaagccctttttttgtcccgaaataagtgaaaaggggtgtgaatggtgtcaaaacagtgccgaaaatttttgaaataaataaattgtggtaaagtaaaaaacacccatacacataagtgcatgagtgtttttcagccataatcaatatggctctctctgtgttggtatattaccacatttacaaatttatgacaagagtttatatgattttcttgggaaataagttataaagtatcgaatttgttgtactcaattttggattttggtaaggtaattaatgcatcgagaacattcaaattttttattcccatctgacctctgacattgtcaaatgcatttgtctgcaaagtgttttgcaattctattaacatattttttaattctataatcattggtgtaaattcttctgtgggaggaaaatatttaaagtatacaagaatatcgaaaatgttttttcggtacatctactgtatgatgtgggaagctgtgtataataagggtctaatataagaccacttgcagaattgttacgtgcttgcgtttggtgaatgcaataaacacgctcattatgtgcacaagaattccgtactcttcgcaaccaatgcaaactaccaatcaatagtttaacatttggtaaattattgtcatcatacatagaatatagtttgcaaatagcgtgggttacatttgtcttactgttatgaagaacatcaataaaagtagagaaattcacaacctttatcataatccatgttggaatctgctcatgatttttcatataaaactgtacatattctgatctgcttttgcttaattcagaataggcagatgaaatagtattcatttttgattgtaaagtagcactggaagaataggcatttgtctcgtaccatggatcattcatgttaatttctaattcatttgccaatcgaagtgcaaaattaaatctaatattagaattcttttgaataatagaatagagtgttgtggcgctgattctggttgcttttgcaatttgacgtatatttgtgcctttactatcaagtatttctttcaatttctttccatcgcctatatatgacctcctatattcatacaaagaaaaattacgaaaaacataaagatgaatttacgaagtgctgacatatgagatatatggtgttaatataaatgtacgaaattcgtacaatataaaaatgcaaaaattgtaacaaaattagaaatgaaggtagacggggagtgttatgagagaatggagcttcttatggagcagacaaaagcagaagcaggaattacagaagaattgaaaacttccgatcaaatgaagtgggtagggctaatgaataatgtgagaagttcggcagaggaaaatgtattaaaagagctgatatatgtgtagtgtgggtgcggagcgtaatgctccgcattcatgaattcttggtgtaaaataacttctggtatgatatactcattttggactaagagaaaactttgaagtttactgctggttagttatttttttatatcgatagaatagacacgttggtttttcagcgtgttttactatttaaaaatatttttaaagtgttagcagacagtcaaagaagagatattcttactatgctaaagaatggacgattaaatgctggagagattgcggaagaattgcaaattacaccagcggcactttcttatcatttgaaactattaaagagtgctgatttagtatctgaatataaagaaaaaaactttgtttattacgaaatcaatactacagtttttgatgaattaattatatgggttaatcagtttggaggaaaaaagagatgaaaaaaataatgtggatagtagcaatgattccagttgtagtcacaagtgtggtactacagtttatgccggatgttatacctatgcatcatgatttggagggaaatactgacagatggggaagtaaaacagaaagtcttatttttccgataataattttgtttattacactattttggcagttgctaatcaatgtatttgaaaaaaaatcaataacagcaaaaactgaaaaggaacaaatggaagcaaaatcttctgcaaaagtattgtgtgttgtaggactttcgcaggctataatgttcggtattatgcactgttttattctttactcttcatggatacaagcaaatacgggtagttctcaggctactattgatattgcaaaagtttcctgtattttatgtggcattctgtttattgtattaggaaattttatgacaaaagcaaaacgaaatgcggtagtaggacttcgaaccgtttggagtatgcataatgacgatacgtggagaaagagtaatcgctttggtgcaatatgtattattgttaccggtctattgactatcattacatctatatatacaagtggaatgactggaacaatatttatgttgatttatttattattagcagtgattgtagcagttatatattcgaaaaaggtgtatgataaggaaattgacaaatgatttttagttatgtggagaaagtgaaactttcagtttggttaagagatgtattccggtgccaagaaatcatgcaaataaaaataagacggctaaaactaaagaaaatatgcagattttagccataaaaagcatagaaaatatatcaaaaaacgctattcatatagcgtgagggtggtagaacagttggttctggtgctgttgctacaatcattgaataattgttatttaatacagtaattttaagggtttccgagattcctcggaagcccttttttcgtccccttgatttaattggatattagttggtgatgaatggacgacaaatataagctacaggcagttctgcacactatgtttaatgccagaagctttgatttacgcgatcaacgagccaaagtcatattcctgatatgaccttggcgactggcgcggcttcgtcgcttcgtacatccatgtacgaagctagctggttgactaagggaaagactaagaactatcacaatcaaacttcaagtgcatttcttatataggctgttgtccgtacgttaagaatgtgtgttaaattatcataataaataagtggaagtaaaataattgaatattttttcaaagtttataagattatatagatgatataatgagcgcaaaagaaaaggaagcggctgcgaagcagacatttacttttcttgcgccattaacgaacgaacagccatgcaaagcagggcgggatagcgcgaagcgcgggttcgtgagtgtacgggttaagaaagagtaaattatgatataatgagcgcaaaagaaaaggaagcagctgtaaaataggatgttaacagaatggtagatagaataccaaatgaaataattgattaaaggagttaaaaggtatgactgctaaagaacttatgaaacaatgtgaagctgaagagaaagaattgaaattcagggagttttcatcagaaacagcacttgctataggaatggcgcttatagaagaagcgaaaaaccgtaacaataaaatatgtatagatattgcaatagctggaagaagattgttccattattccagtgatggtaatgctgtaagtaatgatattatgatcgagcgtaagaaaaatacggcgatgcataccggacatagttcattgtgggcgcactatatgcttgaggattgtggtatgaatattaaagaaaagtgggcattagaaccatcagagtatgcacaggtgggaggtgcatttccaataagactagagaattgccagacagcaataggcacaataacatgttctggttttaatcatgaacaggatcatagtattattatagatgtttgtagaaaactgaaaaaagaaaatgttttgtaaattaattgatattatttatttttcaggaggtatgaagcttatatgggtaagtatcattttataataataggttcaggctggcgttcgctttattatgtcagaatagcaaaagcaatgccggatatattatgtctagatgcaatgtactgccgtacacaggaaaaagcagataagatggcagaagaattcggtatacatactacaacctctatagaagagtgcgtaggttataaaccggattttgctgttgtagcagtaaataaaacaagtatatgtgatgtatcaatagaatggatggatagaggaataactgttctttctgagacaccagcagcattggatatggattcgcttaaaaagttatacagatatcatatgtcagatgataaaacagataagaagcaggttgttgctgaacaatacagggaatatccatataataaagcacggattaagcttgttaatagtggtgtacttggcgatatcagttgtctgaatatatcccttgcacacgaatatcacggtttcagtcttataagagcatatcttggtataaaacctgatgaaaactacacagtgtcaggtaaaatatatgaatttccgacaactcagacacttacgagatatgacaaatttacagatggcagaacagcgcctaaaaaaagatgtttagcagcatttgagtttgagagtggaaaggttgcatggtatgattttgactctgagcagtaccgctcacctataagaaagaacatgataaaggtgcagggtgtcagaggggagcttattaacgatgagctgtattatcttgatgataaaaatgaaggacagtatcaaaagattgtgacagatgtgaatgtaacacacactaaagatactaatcctaacctgtctaccattcgtgaaatagagaaaataatgtgcggtgaaaatgtactgtataaaccgaaattagggctgcgtggcttgtcagaggatgaaacagcaatagcggctcttatgataggaacagcaaagtatagcagaggtgaggcagaatcaccatatagcatggaagatgcatttgcagatgcatatgcggcaatattgcttgatgaggcagtaaggacaggtaataaaattagtagttgtattgaaaataataggtaatgaataggtatttcatacattccctacaataatagtagaatgcaaaataaatatagaaatttaattatagaatagattgcaaaataaataagaaaggaaccatgaataatatgcagaacaaaatattaagagtagctcttataggcgttggaaatatgggaaagaaatatgcacagatgattgtatcaggtgaagttgccaacatgaagctgacggcagtagttatacgaagagatgaacttatggagtggggtgaagcgcttgtaaatgttgatggtgggcatgtaagaatatttagaagtgcagatgatatgtttaaagcagaagatgtagatacattatttgatgcagttattatagcaactccgcataaaacacatgctaagcttgcggtacaggcattttcactgggaaaggatgttttgtgtgataaaccggcagcatcagatataggggaagcacttactatgaatgaggcagctaaaaagagcgaaagaatatatggtatggtatttcatcaaagattatatcctaagtatatgaagattaagagtatgattgatgcaggtgagctgggaaagctaagaagggtgaatcttattaattcaagatatttaagaacatcatattatcatcattctggcgcctggagaagcagctttgctggtgaaggtggcggtgcacttattaaccagggacagcatatacttgatatgttccagtatctttttggcatgccgcagagaatgtttgcacttataccttttggcaaatataatgattttgcagtagatgatgaagatactattattatggattatgatgatggcatgacagcttcatttgtactgacaacgggagaagcgtgtcatgaagaaagacttgaaataataggaacaaaagcaaagctgctgcttgaagataatacgcttactataacaagacatcaggatgtagaagaatatataaaaactgaaatggttaattcaagggaaaatatgcaatatactaaggaaacaattgagttcccaaagacaccagagccatatatagaactgcttgaaagatttgccggagcatcattagaacatgatgatacatatcttgtagcgaaaggcgaggaagggcttaattcactgatgttgtgcgcaggagcttattattcagcatgtaatggtattcaggttaagcttccggttgcttcagaggattatagcagacttatggaagaattgattacgaaggaaaagagcataaaaaaataatgcaagaagaataatacaagaaaaacaataaaataaaaataacaaaataaaaataacaaaataaaaatatagtataaaatgctgccacataaaatggcagcattttaattggtgattaatattcagaactgcaccatcttccagaagcgccacaaggaagaacgagcccgttggatgatacaggaagtcctacttcgtttgagctgcagtaaccgtcaaagtttttaagctctgtgcttaacatatatgtaagaaccgctggctgaagccctgttgtatatgagttaatgaggaagaataatggttcctcagaaagaagctgtgcacataactttacaagtggatgtatggcttcttctattttccatatttcgcctttaggtcctcttccatatgaaggagggtccataatgatggcatcgtagtgattgccacgtcttatttctctctcaacgaacttaacacaatcatcaactatccagcggataggtttgtcaataagaccggaagatgtggcattttccttagcccatgcaatgatacctttagatgcatcaacgtgtgttacatgtgctccggctgcagcgcatgcaagagttgcaccaccggtatatgcaaaaagattaagaacctttatctgtctattggcatccttttccttagctttccttattatgcctgaaaaccagtcccagttagcagcctgctctggaaatatacctgtatgcttgaagctgaaaggttttaagttaaaagtaagaggcacatcaagagaaggactctgatagttaatagtccagctctgtggaagatcaaagaactcccattcaccgccgcctttggagcttctgtgataatgaccattcatgtgtttccatcttttatcgtttttaggggtatcccatatgacctgtgggtctggacgtacaaggatataatctccccatcgttcaagtttttcaccacatgatgtatctataacttcatagtctttccagttatctgcaataaacatatattgtgtaatcctttctttgttatatgtgatatgagcataaaagtgggatgataatcctacgatatgctaatattaggtagggtgctatgtgccaatgacacatgtttagcacagaccgaagcgtagcgtagacgttggagtgcgtagcacagaacaatccatagatatcaaagttgttggcttttgcccccaacatcatacttatataagtatataacaatccatatgataagggcaaggaaatgtttttgttagaggtatgcaggcatttttatgtacaccttgttattttcagagtcagttgccaaaatgctgtaaatagttctttacagtgacatattgttaagataaattttattgaaaaatccatatttttactgtaacatataacagataaaaaatataaattgtgatatggtattagtgttaaaagtaactattgataattacattatgtatataaggaaaggaaaatgcacatttgaaaaatatatcttttaaaacagcaaagaacgatattatagcaggtattattgtggcacttgtatctattcctatatctatggggtatgcacagatagcaggattgccggcggcgtatggattatatggttcattacttcctgtacttgtgtatgcatttacaacaagttcaccacagtttgtgtttggtgtagatgccactcctgcagtgctggttggagggacacttgcagcacttggagtaacaacaggttcagatgaagcgatgcggcttgtaccagctataacgcttgtagttgcagcatggcttttaatattcagccttataaaagctggcagaatagtgaactacatatccactccggtcatgggcggtttcataagtgggataggaattactattatacttatgcaggtgcctaagctgtttggaggcacggcaggtacaggcgagcttatagagctcattctgcatataacagaccagttgaaatattttaatgtattgtcggcagttctgggattcggaacagttgtgattattcttgtctgtaaaaaatatatgccgaagtttccaatgtcggttgtacttatggtacttggagctatggcaacagcatttttacatatagacagattcggtgtaaaacatcttccacatgtagatgctggatttcctaagctttctattccggatgttacattacttcgagataatacatcagagatagttgttctaggacttacatgtgcacttgttattatggcacagactttgctggcaacgaacaattatgcaaacagatatggttataaggttgataataacagagaagttcttgcatattctcttgcaaatgtggcatcggcagtatcaggaagttgtccactgaatggaagtgtgtcaagaacaggcattgcagaccagtttggatgtaagacacagcttatgtcagtgacagcagcagtaaccatgcttgttgttgttttgtttgcaacaccgcttcttgaatatcttcctgtgccaatacttactggtatcgttgtggcagcacttataggtatagtagagtacaagctggcagataagttaagaaaggttaacagagctgagtttttcatttttcttgctgctatgttcggagtgcttttattcggaacaatatatggtgtaataataggtgttattctttcatttatagcagtgattataagagcggttgttccaccaagatcacttcttggatgtataccaggtcatgaaggcttctataatcttaaccgtaacaggaatgcgcttgagatacaacatgttgtgatgtacagattcagtggcaatcttttctttgcaaatgtgtctacatttttacaggatatagaaaatgcgataaaagatgatacaagagttgttatagttgatgcaagtggtataggaagcatagacataaccgcagccgacagacttgtttcatttaataagattcttaaagataaaggtctacgtttttatataacagagcatgttggtaatgttaacgatcagctaagaaagctaggtgctggatgtcttgtggaagagggtgtcacacgaagaactatatcacttgcgttaagagatgctggcgttgacagaccttatccacttgcaggtacactagaacagacagaggcacataatgactttatagaggacaatgaaagacttgctgagatagagtgggcatttggcgaggatgcatcggaatggcttgataagtttgcagtgcagatgacagatgatatcacgcatattgatgaaaatagtgagcatattccggataatgtacttgcagaggctgaaagtaagaatacatggggacgtattggtctgtttgatgaggatgagcttcttgagagagttgagatgcatttatcagggcttacacaaaacaacagcaatgcagaagcgttagaagaaagaatcgaagagcgaagattaagacttgaggcaaagattgcaaagcttaatccggatgcacttgcgcacctaagacaccacagaagagaggttatgttgcattttaaggagaataatcctgaggcatataagcatatgatggaacgcagaatggagcatataagtaagcttgagaaggaaaatccggagctggctgccaagatgaagaaactgtataagctggatgatattgcaggtgattacagtagtgttaaagaaaggtaattgttgtgaatatattaaatgtagaaaaagtgagtaaaacatttggcgagaaggtactacttgataaggttacacttggaataaacaagggtgataaggtgggggtcataggtgtcaatggtactggaaagtcaacattgcttaagataatagctggtattgaagagcctgatgaaggaaatgttataaagggaaggaatgttacagtaacataccttgcacagtcacctgaccatgcgaaggatgagacggttctttcctatgtgctgagaggaaaagctaatgccagtgaggccaaagcaaaggagattcttaacaagcttgggataggagcatttgatgcttctatggatatgctttcaggaggacagaagaaaagagtggcgcttgcaaaggcattggttgaacctacagaggtgcttatacttgatgagccgactaaccatcttgataatgatatggttgtgtggcttgagcagtatataaaggctttcaagggcgaacttcttatggtaacgcatgacaggtatttcctggacaatgtaactaacaagatagttgagatagaccatgctgcgctttatagttatgattccaactattcaggctttcttgaattaaagactgaaagagagcagatggaaagagctacagaggctaaaagacagaacacattaagaagagaacttgagtggataagaagaggatgccaggcacgttcaacaaaacagcaggcaagaatagaccgttttgaggatatgaaggaagcttcccgtgaggcaagggctaaatttgacaagagccttatggatatgagctctgtaagcacaagattaggcaaaaagacgatagagcttaacagcataaccaaagcatatgacggtcatacttatatcaatgatttttcatacatttttctaagagatgaccgtataggtataataggaagcaatggatgtggtaagtcaacacttatgaagataataacaggacagatacagccggatagtggaagcgttgagataggtgacactgtacatataggttattttatgcaggaaaatgaaccgctggatgagaatcagacagtgcttgagtttgtaagaagcataggtgagtatgtgcagacagtagatggcaaggcaacagcgagccagatgtgtgaaaagtttctcttttcaccaaaacagcagtggacaccaataagaaagctgtccggaggagaaaagagaagactgtatcttttaagtgtgcttatgagtgcgcctaatgtacttatacttgatgagcctaccaatgatcttgatattgaaacgcttgaagtacttgaggattatctggatggatttgcagggattatcataacagtttcacatgacagatactttcttgacagaacggttgacagaatatttgcatttgaggcggggggtcaccttacccagtatgaaggaggctattcagactacaaagaaaaatgcgtttcttctatatataatgtgccaggaaatggaatatctaaaggtacagcattatcaggtaatggtctggtatcaggcagcggtgtggcaggaggaagtaacggtgataaatcagcagatggtacacagaaggttacagctggcaataagacacttacaagtaaggaatataataaatcaagaagtgagcgccttaagtttacttacaaggaacagaaagaatatgagagtattgatgatggtatagctgcattagaaagcgatatagaaagaatagacagtgaaatggctaagtgtgcaactgactatggtaagttaaatgacctgtctaaggaaaaggctgaaaaagaaaaacagcttgaggaaaagatggacaggtgggtatatcttaacgatcttgcggaaagaatagcaaaccagtaaagatgtgtgcaaacaaagcagaaatgtttataaatattcatcaaataatgcatacttgtggataaataataacaaaaatggataataattaaaccagagaaatattacagaattgtacttaaaaaaatacaataaaataatatttttctggttgattttatattaagtgtagtgtatattaatacttgctgtgacattgatagcgtagaagcgtgaggttgctgctcataagagcaggttttccgtggagcgaatgtcaaggccggtaagagaccggcgaagaatctggcgacaagtcactgtacctaatatcatctgcaagatgcagaaatgacacgttggtaatcgggataattcaacaggtgattctcgatacacgtgggagtgtgtacagtcaccgcttgtcgtacttaaacaataaagtgcgaaggaggcgactttttttatggcaaatcaggtaataagaattacactgaaagcttatgatcatcagttaatcgatcagtcagctaagaaaatcatcgaaactgctaagaagacaggagcaaatgtgagtggtccagtacctcttccaacaaagaaggaagtagttacaatccttagagctgttcacaagtataaggattcaagagaacagtttgaacagagaactcacaagagactcatcgatgtattatcaccatcacagaagactgtagatgcattatctaagttagagatgccagctggtgtattcatcaaccttaaggtaatgaactaatcattacacaatttttcattattatttaagagcaataatcctaagggtttaatatagaagtaacgtacacgaaagtgtagcacagtggtgcaggttccacttatattagctgttctaggatgacaggatgcgcttatgacgtatgattttataaatgtagaaaattccgggctgaaaccggaagaaaatccgtcaggattttgcttccagatgattgcgccggaagcggcataatcatcttgtccgctgtagattaaacaggaggaatatcaatgaagaaggcaattttagctacaaaagtcggaatgactcaaatcttcaacgaagacggtgttttaacacctgtaactgttcttcaggctggtccttgtgttgttacacaagttaagacagtagaaaacgacggttacgatgcagttcaggttggttttgctgacattagagaaaagttagtaaacaagcctgttaaaggacattttgataaggcagaggttccttacaagagattcttaagagaattcaagtttgaaaacgcttcagaatactcagtaaaggatgaaatcaaagctgatatcttcgcagcaggcgataaggtagatgcaactgctatttcaaagggtaaaggtttccagggcgcaatcaagagattaggccagtcaagaggacctatggctcatggttctaagttccacagacatcagggttcaaacggatcagcaacaacacctggtagagtattcaagggaaaaggaatgcctggacatatgggttctaagagaatcacaatccagaatcttgaagtagtaagagttgatgttgaaaacaacgtaatcttagttaagggtgctgtacctggacctaagaaatcattagtaacactgaaagaaacagtaaaggctagcaagtagtttttgctaaggaaggaggaccacacagatggcaaacgtatctgtttacaatattgaaggcaaggaagttggctcaatcgaattaaacgatgcagtgtttggtgttgaagttaatgaacatcttgtacacatggcagtagttaaccagcttgcaaataatcgtcagggaacacagagcgctaagacacgttcagaagtttctggtggcggaagaaaaccttggagacagaagggaactggtcatgcaagacagggttctacaagagctccacagtggacaggcggcggtatcgtattcgcaccaaagccaagagattattcattcaagatgaataagaaagaaaagagaatcgctcttctttctgctttatcttcaaaggttgcagaaagcaagatcgttgtacttgacgagttcaagttagatgaaatcaagacaaagaagttcgtagaagttatgaacaacttaaaggttgaaaatgcattagtagttcttgaaggcgagaataagaacgtagttctttcaggaagaaacattccttcagttaaggttacagctactaacgaaatcaacacatatgatgttcttaagtatacaacattagttgttactaaggcagctgtagagaaattagaggaggtgtatgcataatggcaaacgtacagtattatgatgtaatcctcaaaccagttataacagaaaagtcaatggcagatatggcagataagaagtatacattcttagttcatacagaagctaacaagactatgattaaagaagctgttgaaaaaatgttcgaaggaacaaaggttgctagcgttaacacaatgaacagtgttggcaagaagaagagaagaggaagagctgttggtacaactgctaagactaagaaggcaatcgttcagttaacagcagatagcaaagatatcgaaatctttgaaggactttaagatttagcaacatttagaagtgtagaaaacaatattacacaggctcgaaaggagagaatataatgggaatcaggacttataacccatatacaccttccagaagaaacatgactggatcagatttctcagagatcacaaagacaactcctgagaagtcattactcgctaagaagagtaagactgctggtcgtaacaaccagggtaagatcactgttagacatcatggtggtggaaacagacagaaatatagattaatagatttcaagagaaataaagaaggcgttcctgctaaggttatcggtattgaatacgatccaaacagaacagctaatatcgcacttatctgctacgcagatggcgaaaagtcatatatccttgctcctcagggattaacagatggcatgacagtacagaatggtgctggtgctgaagtaagagtaggtaactgcttaccacttacagatattcctgtaggtacacaggtacacaacattgagttatatccaggtaagggtggacagcttgttcgttctgctggtaactctgctcagttaatggctaaggaaggcaagtatgcaacattaagacttccttctggcgaaatgagaatggtaccaattatctgccgcgcaacaatcggtgttgtaggtaatggagatcacaaccttattaatcttggtaaggctggacgtaagagacatatgggtatcagacctacagttcgtggttctgtcatgaaccctaacgaccatccacacggtggtggtgaaggtagagcaccagttggtcgtccaagcccaatgacaccttggggcaagcctgctatgggacttaagactcgtaagaagaagaagtcttctaacaagcttatcgtaagaagaagagatggaaaggctattaagtaattaatagcctccggtattacaagaaatattagactaagatttgatagattataaggaggtttcaacctatggctcgttcacttaaaaaaggaccattcgcggacgaaagcttacttaagaaggtagatgcattaaacgcatcaaacgacaagcaggttatcaagacatggtcacgtcgttcaacaattttcccttcattcgtaggccatacaattgcagttcatgacggaagaaagcatgttcctgtatatgttacagaggatatggttggtcataagctcggtgagttcgttgctacaagaacttacagaggacacggcaaagacgaaaagaagagtagataatttgtattatttgaaaggaggtttaatcgatggctaaaggacatagatcccagattaaacgtgaaagaaacgctgttaaggacacaagaccaagcgcaaagttatcttacgcaagagtatctgttcagaaggcttgtttcgtattagatgctattagaggcaagagccttgaagaagcacttggtatcgttatgtacaatccaagatatgcttcatcacttatagagaagttattaaagtcagctgcagctaatgcagagaacaataacggtatggacccaagcaagttatatgtagaagaatgctacgctaacaagggaccaacaatgaagagagtccatccaagagcacagggtagagcttatagaatcgaaaagagaatgagccatatcactgtaatattaaatgaaagataattgcatttcctaaagaatagaaaggagattttatgggacagaaagttaatcctcatggtttaagagtcggcgttatcaaagactgggactctaagtggtatgcagaagaaacttttgcagataaccttgtagaagattataacattagaaaattccttaaaaataagttatatgctgcaggaatttcaaagatagagacagaaagagcttcagatagattaaagattatcattcacacagctaagccaggtgttgttattggtaagggtggtgctgaaatcgaagcactcaagaagcaggttgaaaagcttacaagcgctaagagacttagcattgatattaaagaagttaagagaccagataaggatgctcagttagtagctgagaacatcgcacagcagttagagaatcgtatctctttcagaagagctatgaagtcttgcatgggaagaactatgaagcagggtgctaagggtattaagacatcttgttcaggtcgtctcggcggtgctgatatggctcgtacagagttctatagcgaaggtacaattcctcttcagacacttcgtgcagatatcgattatggttttgcagaagctaacacaacttatggtaaagttggtgttaaggtatggatctatgaaggtgaggtacttccaacaaagacaaacaaggaagggagcgataagtaatgttactacctaagagagttaaacatcgtagacagttccgtggttctatggcaggtaaggcaacaagaggtaacagaatcactaatggtgagtatggtatcgttgcaacagaaccatgctggatcaagtcaaaccagatagaagcagcccgtgtagctatgacaagatacattaagcgtggcggtaaagtatttataaagattttcccagataagccggtaacaggtaagcctatcggtgttcgtatgggtaaaggtaaaggtaacttagagtgctgggtagcagtagttaaacctggacgtgttatgttcgagatttcaggtgtacctgaagaaacagcaagagaagcattacgtcttgcaactcataaacttccttgcaagtgcaagatcgtttcacgtgcagacttagaaggcggtgataacagtgaaaattaataagtatgtagaagatttaaaggcaaaatcagctgcagaattgaatgaagaattagtagctgctaagaaggaacttttcaatttaagatttcagaacgcaacaaatcagttagataatactagcagaatcaaagaagttagaaagaacattgctagaattcagactgtaattgctcagaagaatgcttaaattatattatagtttgtaagtatttcctaagaaaggagtataactgtggaagagagaaatttaagaaaaactcgtacaggtaaggttatcagcaataagatggataagacaatcgttgttgctgtagaagataacgttaagcatccactttacaacaagattgtaaagagaacatacaagttaaaggctcatgatgaaaacaatgaatgtttaatcggtgatgttgttaaggtaatggaaactagacctttatctaaggataagagatggagattagttgagattatcagcagagctaaataattttgacaattttttaatagaattgatattactgaaaggggtagtattatggtacaacaggaaaccagacttaaggttgccgataacacaggtgctaaggaaattctctgcatcagagttatgggtggatctacaagaagatatgcaaatatcggtgatgtgattgtcgctactgttaaagaagcaacaccaggcggcgttgttaaaaagggcgatgttgttaaggccgttgttgttcgttctgtaaagggcgcacgtcgtaaagatggctcatacattaaatttgatgaaaatgctgctgtaatcatcaaggatgatcagactcctaagggaactcgtatctttggaccagtagcaagagagttaagagataagaaattcatgaagatcgtatctcttgctccagaagtattataggaggtaccacaatgtcagctgtaagaattaaaaagggtgatactgttaaggtaatcgcaggtaaagacaagggcaagacaggcaaggttatgtctgtaaacgctaagaaccatacagcattagttgagggtgttaacatggtaacaaagcatgctaagccaagcgcagctaatcagcagggtggaattctccaccaggaagcaccaatcgatatctcaaacatcgcttatgtagttaagggtgacaagacatctaagattggttatgacttcaaggatggtaagaaagttcgtgttgctaaggcaactggcgaagttatcgattaataaaggaaggaggcaataattttgagtagacttagagatttatacgaaaacgaaatcactaaaaaaatgacagataagttcggttacaagaacccaatgatggttccaaagatcgacaagatcgtaatcaatatgggtgttggtgaagctaaggaaaattcaaagcttctcgatgcagcagttaaagaactcgagactatttcaggtcagaaggtagttcttacaagagctaagaattcaattgctaacttcaagttaagagaaggtcaggcaatcggatgcaaggttacacttcgtggtgagaagatgtacgaattccttgacagacttgttaatcttgcattacctagagttcgtgacttcagaggcgtaagcgctgaatcattcgatggtagaggaaattatgctttaggtattaaggagcagattatcttccctgaaatcgagtacgataagattgataaggtaagaggtatggatgttattatagcaacaacagctcatacagatgaagaggcacgtgaattacttagaatgttcaacatgcctttcaagaattaatagaaggaggtaaattttaatggctaagacttcaatgaaggttaagcagcagagagcacctaagttctctacaagagcttatacacgttgtacaatatgtggtcgtccacattctgttttaagaaagtacggaatctgcagaatttgcttccgtgaattagcttacaagggtcagatcccaggagttaagaaggcatcttggtaagataaaaagataatcacaaatcagtgatttatcacagtggtttgccactattaccttgatataatgcataacatagtaatacggctttctgccgtatgctataaatgcatggaacaattgacgtagtcccgataagggaaaccagtgaattatttaaggaggaacatttaaaatgacagatccaattgcagatatgcttacaagaattcgtaacgcaaacacagcaaagcacgacacagttgatatcccatcttcaaagatgaagctttctatagctaagattcttttagatgaaggttatatcaagtcttatgagcttgttgagaatggtaatttcaacgatatccgtgttacattaaagtacggtgctgataagaatgaaaagattatttcaggactccagagaatatctaagccaggtcttagagtttatgctagcaaggatgaacttccaagagttctcggtggtcttggtgttgctattatctcaacaaacaaaggtgttgtaacagataaggaagctagaaagctgggcgttggtggagaagttctctgcttcgtttggtaatttataatagatactcactcacaaagaaaacatgttcctattttaaagtgttttcttaatcaaaattaggaggtgcacggcatgtcacgtataggaagaatgcctatcgctgtcccagcaggtgttactgttgagatcgcagaaaataacaaagtgactgtaaagggtcctaagggtacacttgaaagagttttacctgcagaaatggacattaagatggaaggttcagaaatcgttgtttctagacctaacgacttaaagaagatgaagtcattacacggattaacaagaacattaatccataacatgataatcggtgttacagatggttatgagaagaagcttgaaatcaacggtgttggttacagagctcagaaacagggtaagaagcttgtattagctttaggttactctcatccagttgaaatggaagatccagaaggcatcgaaacagttgttgatggaactaacgttatcatcgtaaagggtattagtaaagaaaaagttggccagtacgcagctgaaatcagagctaagagagctccagagccatataagggcaagggtatcaagtattctgatgaagttattagacgtaaggttggtaagactggtaagaaataattaaaggagtgaatacaaaatggttagtaagaagtcaagaacagtagttcgtgaaaataagcacagaaaattacgtaatcgtttcagcggtactgcagaaagaccacgtttagctgtatttagaagcaataatcatatgtacgctcagattattgacgacacagttggtaagacacttgtttctgcttcaacacttgataaggatgtaaaggcagaacttgaaaagactaataacgttgaagctgctacagtagttggtacagtagttgctaagaaggcattagaaaaaggtattacaactgtcgtttatgatagaggcggatttgtatatgaaggaaaagtaaaggcattagcagaggcagcaagagaagctggccttgaattctaagcggaagggagaaacaaacagtatgaaacgtacaataattgatgctagcaatttagagttaagagataatgtagtatcaatcaagcgtgtaacaaaggttgtaaagggtggacgtaacatgcgttttgcagctttagttgttgttggtgatggcaacggacatgttggcgctggtgttggtaaggcagctgaagttcctgaagctatccgcaagggaaaagaagatgctatgaaacatttagtagaagttcctatggatgcaaactgctcagttccacatgacttcacaggaaagttcggaggagcaacagttcttcttaagaaggctccagaaggtacaggtattatcgcaggtggtccagcccgttcagtacttgaacttgcaggaattaagaacatccgtacaaagtcacttggttctaataacaagcagaatgctgtattagcaacaatagaaggtcttaagtctatgaagactccagaagaagttgcaagacttcgtggaaagtctgttagcgagatccttggctaattaacaaataaacattgatatagtcgttaatcgacagatggaggttaaaatggctgataagaagttaagaataactttagttaagtctccaatcagtgctgttcctaagcatagaagaactgttgaagctatgggtcttacaaagatgcataagacagttgaacttccagataatgctgcaacaagaggacagattcagcagattggttatatgttaaaggtagaagaaatctaatttaataattcagataaggaggtgcaataatggatttatctaatttaagcccagcagagggttcagtaatgagcgataatttcagaagaggccgtggacatggttcaggaaatggcaagacagctggtaaaggtcataagggacagaaggctcgttcaggagcaccaagaccaggttttgaaggtggtcagatgccattatatagaagaattcctaagagaggtttcacaaacagaaaccgtagagaattcgtagctatcaacatcagcacattagaaagatttgataatggtgcagaagtaacagttgatacattaatcgaatcaggtatcgttaagaatcctaaggatggtatcaagattcttggtaatggcgaactcacaaagaaactcaatgttaaggctaacgcatttagtgcttcagcacaggaaaagatcgaagctcttggtggttcttgcgaggtgatctaatatgttaaagacacttgtaggcgcttttaaaaacaaagacataagaaaaaagatcttatatactcttatgattcttgttattgtcagagtgggaagtttacttcctattccaggagtagatacagagtatttcagtagcttacttagtggaattaatactggtgatttgagctatcttagcgcatttacaggaggttcattcgaaagaatgtccctctttgcgttaagtataacgccatatattacttcatctatcatcatgcagctccttgctattgcgattcctaagttagaggaaatgcaaaaggaaggcgaagatggtagaaagaagattgcagcaattactagatatgtaacaatagctcttgctcttatcgagagtatagcaatgtctgttggttttggtagatctggtcttattaagggataccagggctttagtacattgcattatattgtaagtatcatagtagtagttgcagcacttacagcaggttctgcaatgcttatgtggcttggtgaaagaattactgagaatggtgttggtaacggtatttcaatcgttcttcttattaacatcatatcaggtatgccaagcgattttgctacattgtatagcacatttgttgcacctagaactattgcaaagggtgtattagcagccgcaattattattgcaattcttgtagtaatggttgttctggtatgctttttacaggatggagagagaagaattcctgttcaatattcacagaaggttagtggtagaaagtctttcggcggacagtctactaacattcctttaaaggttaatacagcaggtgttatgccagttatttttgcatcatcacttatgcagttccctgtaattattgcacagttattcggaaagtcatacgaatggacaagatatttaagctcttcatactggtgcagagtatcagcacctaagtattcgttaggtttaatattatacatagtattacttataatatttgcctacttctacacatcaatcacatttaatccgattgaagttgctgataatcttaagaaggctggtggagttatcccaggtataacacctggtaagtcaactagtgattatcttaataatatacttaactacattgtattcgtcggtgcagttggattactcatcgttgcattaataccaattatgtgtacaggattctttaatgcaagtgtttcatttggtggtacatctgtcatcatcatcgttggtgtagtacttgaaacattaaagcagattgaatctcagatggttaatcgttattataaaggattcttaagcgaataagcttattagtatttagaggacttgcctgacagtaatgttgggcgagtcatttgtgtataaaaagcaaatgaaagttaatgaggtagacatatgaagattattatgttaggagctccaggagctggtaagggaacacaggcaaagaaaatcgctgagaagtattcaattcctcacatctcaacaggagatattttcagagctaatattaagaataatacagagcttggtcagaaagctaagacatatatggataagggagaacttgtaccagatgaattagttgtagatcttatcatggatagattcaaggaagctgactgtgctaatggatatgtattagatggtttcccaagaacaattcctcaggcagaggcacttgataaggcacttgctgctaataatgaagctgtagatttcgctataaatgtagaagttccagatgaaaatattattaacagaatgtctggaagaagagcatgtgtaggttgtggtgctacataccatatccagtttaatgcacctaaggtagaaggtgtatgtgatacatgtggagaaaagctcatattaagagatgatgataagccagaaactgttaagaacagattatctgtatatcatgagcagactcagccattgattgattactattcaaagaagggtgtattagcagaggttgatggtacacaggcaatggatgatgtattcaatgcaattgtaaatgttttaggaaagtaggctggttatgtctgtaacagttaagtcaaagcacgaaatagaattaatgagagaagctggcaggatacttggaacagttcttaaggaacttgaaaaggaatgtaaaccaggtgtgacaacatatcacattaataaaatcggcgatgagatgataaaaagctacggatgtataccatcattttatggatatcagggatatccagcctctatatgtgtatcagtaaatgaagagatagtacatggtattccatcaaaggcaagagtgcttaaggatggagacatagtaagtcttgatgctggtgttatatataaggggtatcattcagatgctgcaagaacttatggcgtaggcaatataagcgataaagcagcaaaactgattgaagtgacaaggcagagtttctttgaaggaataaagtttgccaaagaaggctgtcacttatatgaaatctccaatgcaattgcagattataatgagtcattcggatatggcgttataagagaacttgtaggtcatggtatcggaacacagcttcacgaagaaccagaaatacctaacttcagacagcagcgaagaggcatgaagttatatgaaggtatgacgcttgccatagagcctatggttagtgcaggtgactacagagtgaagtggatggatgatgactggactgcatcaactatagataattcgttgtcagcccactatgaaaacacagtgttagtaactaaaaacggaccggagatattatcactggcagagtagaagcatgtattacagcagactcgtaggataaagcaagtcaatgtataaaatgacaattgttacaggatactggttatagggagggtacagcttgaataaatatataggatgttttgccacatctatagcaggacatgatcataataacatatatgttattattgatgcagatgatgagtatgtatatcttgtggatggaaaaataagaaaagtaaataatccaaaaaagaaaaagctaaaacatgttcagttaattaaaagaactgacgatacaataacaggcaggattaataataatgttgcattgtcgaatgaagatattaaatatgcaattaaaaatattcagtaattatgctggatataaatatttgtcatataacataacaatgtaaatcagagattaattaaggaggcagttaaatgtcaaaggcagacgttatagaaatcgaaggaaaagttgttgagaagttaccaaatgcattctttaaggttgaacttgagaatggacatcagattcttgcaacaataagtggaaagttaagaatgaacttcattagaattcttccaggagataaagttactatagagctttctccatatgatcttactaaaggaagaattatctggagagataagtaaaatcttttaaaaagtatctaaaaaatattgtaaattttgtgcaatattttttagagaaaattgaaagtttttcttgcatttaaaaatatggctatgatataatagctaacgaacttgtctgaaaggaggcttttgcagtgaaggttagatcatcagttaaaccaatttgtgaaaaatgcaaagtcattaagagaaagggtagaatcatgattatatgtgaaaaccctaagcacaagcagagacagggttaatccttttggagagaagtagggatacttctcatgtttgtgcgttatggtgtcaatatcactagttgatgtcataacatattgtaggtttgtactgttactcactataacagacaaattaagtagttttgcggctgcagtgatgaatcacccggctaagttgtaaggtggtcattgctattttataaattatcgtagcagttatggcaacgcacacatttcagacggcaggaaactggcgggctgcgtatgtatacagctacacagaattgattaataacatatatatttgattaacggaggttaaagaacacatggctcgtatttcaggtgtagacttaccaagagaaaaacgtatcgaaatcggacttacttatgtttatggtattggacgagttagagcaactaagatccttgcagaggctggtgttaatccagatacacgtgttaaggacttaacagatgaagaagttgctaagatcgctaaggttatagatgctgatccagaacatttagtagaaggtgacttaagaagagaagttgccatgaacatcaagagattaaaggaaatcggatgctacagaggaatccgtcatagaaagggtctcccagttagaggtcagaagactaagactaatgcaagaacttgcaagggacctaagaagacagtagcaaataagaagaaataattgttaaactcacaggaggttatttatcatggctcagaaagttacaaaaaaagtgacaaagaagcgtgttaagaagaacgttgaaagaggacaggcacatattcagtcatctttcaataatacaatagttactttaacagatgcagaaggtaatgctttatcatgggcatctgcaggtggactcggattcagaggatctaagaagtctactccatatgcagcacagatggcagctgaaacagctacaaaggctgctttaattcacggattaaagtctgtagacgttatggttaagggaccaggttcaggtagagaggcagctattcgtgcactttcagcttgtggtctcgaagttacaagtatcaaggatgttacaccagttccacataacggttgtcgtccaccaaagcgtagaagagtttaatttagggaggtaagattacaatggcagttaatagaacacctgtgctcaagagatgcagatctcttgatttagatcctttatatttaggaatagataaaaagtctaacagaaaggctaagaatgctggtagaaagattagcgagtatggtatgcagcttcgcgaaaagcagaaggctaagtttatctacggcgtattagagaagcctttccttaattactataagaaggctgagaagcagaagggtatgactggtgaaaaccttatggttactcttgaactcagacttgataatgttatcttcagattaggttttgcaagaacaagaaaagaagcaagacagattgtagatcacaagcatgtacttgttaacggcaagcgcgtaaacatcccttcatacttagttaaggctggagatgttattgaaatcagagaaaagtcaaagtcttgtgcaagatataaggaagtacttgaagctactaacggaagattagttccagagtggttagagtcagacagagaggctcttaagggtacagttaagtctttacctacaagagaagcaattgatgttcctgtaaatgagatgcttatcgtcgagttatattctaagtaatccattaataagatttttggacgctgcattttacatgtcgtatgtgaatacagtcgtttgtttaagacaacagaatgctgtatatatgcgttctgttgtcttatggatagaaggaataaacttattaaaacccataaaaggaggggctatacatggttgatgcagattttaatttcaagatgccaaagattgagatgactgaacagtcagaagatggaaagtatggaagatttgtcgttgaacctctcgaaagaggttatggacttacgcttggtaattctttgagaagaattatgctttcatcattagttggtacagcagtaagcagtatcaagattgatggtgtacttcatgaattcagctcaattcctggtgttaaggaagatgttactgagatagtgatgaacatcaagcagttatcaatcaagaacaatggtaattccgttgagcctaaggaagcacatatcgatttcgtgggcgagggtgtagtaagagcatctgatattcaggttgatcctgatatagaaattattaacccagatcttgttatagcacatcttaacagtgctgatagcaagttagttatggaacttacaattactaacggacgtggttatgtaagttcagagaagaataagaaggaagaccagccagttggcgttatcgcagtagattctatctacactcctgtagaaagagtaaatatggctgttcagaatacacgagttggtcaggatacagattttgacaaacttacacttgatatattcactaacggaacaacagctccagatgaggctttaagccttgcagctaaggttcttagtgaacatcttaaaggattcatcaatctttcagaaaatgctgctaatgcagagattatggcagaacagccagttgatgaatcaacaaaggctctttcaatgagcattgaagaccttgaattatcagttcgttcatctaactgtcttagaagagcaggtatcaatacagttgaagaactctgcaacaagactccagatgatatgataaaggttagaaatcttggtaagaagtcattagatgaggttcttttaaagcttaagcagttaaatcttcatcttagatcaagcgaagattaatatatagaaacaattaaagcgtaatattagaatttgtagaaaaaacatttatacagtaagaccatatgcgcatgtataaacgttacaaatggaggttaaatcaatggcaaagtatagaaagcttggtagaacatcaagccagagaaaggctttattaagaagccaggtaacagctttaatcgagaatggtaagattgttacaacagaagcaagagctaaggaagttcgtaagcaggcagaaaagcttatcacacttgcagttaaggaaaaggacaactacgaaacagttacagtatctgctaaggttgcaaagaaggatgctgaaggtaagagagttaaggaagttgtagatggcaagaaggttactgtatatgaaacagtagaaaaggaaatcaagaaggatcttccttcaaagcttcatgctagaaagcagatggacaaggttctttacaaggtaactgaggttcctgcagatgctgctggaaagaagaagaacacaaagactgttgaccttacaaacaagttattcgacgaaatcgctccaaagtatgctgaccgtaagggtggctatacaagaatcgttaagattggcttaagaaaaggtgatgcagcaatggaagtacttcttgaattagtttaatcaagtgcttttaaggcgggtaagaagtaattcttatccgctgttttgttatataaagatattgtatggattaacagaatgtatgaatcaggaattggagaaaatagtgggaatagtacaagctaaggatttaacatttgaatatataagacgtgatgaagaaggaaacgttgaaggcattacaacagcagttgacaacgttaatatagatatcaaagcaggagattttgtggcagtattaggacataatggttctggtaaatcaacatttgcaaagcatcttaatgcacttgttatgccaacagagggcactgtatatgtagatggaatggatacaaaggatgcggataatacacttaaggtcagacagactgctggtatggtatttcagaatccggacaaccagatagtaggtacacttgtagatgaggaggtaggtttcggtccagaaaatataggtgttccaacagaggaaatctgggaaagagtagaaaagagccttaaagcagtaggtatgtataagttcaggaatgcatcgcctaacaagctgtcaggtggtcagaagcagagggtagctatagctggaatagttgctatgaaacctaagtgtatagtgcttgatgagccaacagccatgcttgatccgcttggaagaaaagaagtaatacatgttctgcacgagctcaataaaaaagaaggtgtaaccataattcttataacacattatatggaagaggttatagatgcagaccatgtttttgttatggataatggaaaggttgttatggaaggaacacctagacagatattttcgcaggttgataaactaaaggaattaagacttgatgttccacaggtaactgagcttgcatatgaattaaaaaaagagggacttcctgttaaagatggtattataagaaacgaagagcttgttgaagagataaaaagactcgatttattaaagacagataaatgatgaaacatctgacgaatataggttggtgattattacggtttgattttaggtagatttaaacatatttagttagataataaattcaagtggcgtgactgtattatatacagcatacacacagaaatgaggaagtagaatgtcaataatagttgataaaattagccatgtatatgaggcgggaacaggctttgaaagaaaagctctggacaatgtatcatttgcaatagaggatggagagtttataggtcttataggacataccggctcaggtaaatcgacattgattcagcatctgaacggccttttaaaggctacatcaggacatatatattacaatggtaaggatatatatgaagcagggtatgatatgcgtgaattaagaaaaaatgttgggctggtattccagtatccagagcatcagttattcgaaacagatatatttaaggatgtatgttttggacctaagaatctgggcttatccagacaggaatatgagataagggctttcgagagcctgaaacaggtgggattggacgaaaatctgtattatcagtctccatttgacttatcaggcggtcagaaaagaagagttgcaatagcaggcgtacttgccatgaaaccacaggtgcttatacttgatgaaccaacggcaggactagatccaaagggcagagatgacattcttgaatgtataaagcagctgagggaggaaactggaattacagtaattctggtttcgcatagtatggaagatgttgcaagatatgtaagcagaatcatggttatggatgatggagtgcttaaatatgatgatacaccaaggaatgtgtttgcacatcataaagagcttgaacatataggacttgcagctccacaggttacttatattatgaatgaccttattgcggctgggatagatgttaatcctgatgcgattacagttgaagaagcaagggataatatattgaagcattttaatgttattaataacagataaacagatacaagcataacctgtataatgtacaggagtgaaatgtagaaaatgtgcacatgcacaggattggaaagatatgattaaagatataacaataggacaatattatcaggcagaatcaattattcacagacttgacccaagagtaaagcttatgggtacattagtttttataatttcgttatttttaggaatgaatatatggatatatgcatttgtaacagttgcacttgcagcggttatagctatatcaaagatacctcttaaattcatggtaagaggacttaagtcaatagtaattcttattataatcagtgcagtatttaacctgtttttaacaccgggcgaaacacttatccagatatggaagctgacgataacatatgaaggtcttaagaccgctatatttatggtagtacgtcttgtgtaccttatattaggcacatcacttatgaccctgacaacaacacctaataatctgactgacggccttgaaaagggcttaggatttcttaaatatataaaagttccagtacacgagatagcaatgatgatgtcaatagcattaagatttattcctattcttgtagaagaaacagataaaataatgaaggcgcagatggcaagaggcgcagattttgaaaatggaaatattataaaaagagctaaagctatggtgccgattcttgttccactttttgtttcagcattcagaagggcaaatgagcttgctatggcgatggaagcaagatgctatcatggttcagagggcagaactaaaatgaagccgcttaagtatgctaaaagggataagatagcatatttgtgtatgtttgcataccttggagtgttaattcttattaaaatatttgtttaatagtttgttttatcatttatacaagcaggatgtattaatagatgttagaaatcgcttagaattaacctcaacagcatatcaacggaattaaggatgcgtattaataagtgctggaaatcgctttagacattcatataaggttatagcagaaatgaggattagaatgagaagaataaggctgagggtagcatatgacggaacgaattattcaggctggcagatacagccatctgccataactatagagaaggtcttagatgacgcaatacatcagcttacaggagaacatatacatgtaataggtgcaagccgtacagatgccggggttcatgctatgggaaatgtagcggtgttcgatacagcttcaagtataccggcagacagatttacgtatgcacttaacaggtaccttcctgatgatgttattgtgcaggaatccgatgaagttaatgcagactttcatccaagacattgtgacacaaagaaaacatattgctacaggatattaaataccgaattcggaataccacagaaaagaaattatacatggaatgtagcgggtaatatagacatagacagaatgaagaaggctgccggatatcttataggagagcatgactttaagagcttctgctgtgtaaaaacacaggcagaatcaactgtaaggacagtatattcacttgatgtagacaaaaaggatgatgaaatacatataacaataaccggtaatggattcctttataatatggtcaggataatagctggaacgcttatacaggttggaaagggcaggttcgaaccagaatatgtccaatatatgcttaacgcctgtgataggacaaaggcgggccagacggcaccaccacagggcttgacacttatgaagatagactatctggaggaagaaggcttataaggagacatatttagcatatagaataaagaaagtgttggagtatgtattaagcattcgaggaataaataaacataattagcagctagaaaagaaagtataaaggaaagtgttagatgatgtattaagcgatttaatgaaaaatagacgtaatcagtatatagaaaaagtaaatggtttaaaagcagaaataaatagttacttaatgtgaatacaataacttcatatgtgaataaaaggaaacaaaaatagacgaattgtggataaccattttaaattatagattaaaattatacaataaaaatagattttatcattgacacacgcggttcagtgttatataattcttaaatgtggcgtgataagtgcgccctgtttggttaattcgaattaggtgtttcaccatatgccccggagaagcatttaatatatattaacattaattatattcagaacaattaattatgcatttaagcaatatttaggaggaaaactaatgagtacttatatggctagtgcatctaacatcgaaagaaaatggtatgttgtagatgctgcagattatacattaggtcgtttagcatcacaggttgctgctgtattaagaggtaagaacaagcctacttatacaccattccttgactgtggtgataatgttatcgtaatcaacgcttctaaggttaaggttacaggtaagaagttagatcagaaggtttactacaatcactcagagtatgttggtggtatgaaagaaacaactcttaaggaaatgatggaaaagcatcctgaaagagttatcgaacttgctgttaagggtatgcttccaaagggacctttaggaagacagatgtacacaaagcttcacgtatatgctggtccagatcatgaacaggcagctcagaagccagaagttttaaagttttaattaaaggacatatcataaggaggaattaacagtggctaagaaagcaaacggaaagttctacggaacaggtagaagaaaaagcagtattgctagagtatatttagtaccaggtaatggtaatattacaataaataagagatcacttgatgagtatttcggtcttgaaacacttaaggttgtagttaagcagccattagtacttacagaaacagctgataagtatgatgtaatcgttaacgtacacggtggcggatacacaggtcaggctggtgctatcagacacggtatctcaagagctcttcttcaggttgattcagacgaatatcgtccatcacttaagaaggctggtttcttaacaagagatccaagaatgaaggaaagaaagaagtacggtttaaaggcagctcgtcgtgctcctcagttctcaaagagataataaattcttttttgcaaaagaattacaagaacgcatatatcaagaaaagcccatatttcaagggttacagaggttgtggaaagttgtcagatgtgctggaatttacatcgaatgcaacacatatgcaacaaatatattgatatgtataggacatttttcagtagcgatactggaaaatgtccttttttgcgcgtttctacaagcggtgcaacagacagtaaataggccacgataatgcttgctttacaaattgcttataaggaattggagcgtagacagactaaggaattaaatgaaaagcgttcagaacttcaatcggtaagacaggagattgcaagcatgacggtcaaagcaaatgaagcagtagaattgcttgataagatcaatgcttttgtatcatcattcagattatttgcaccgacaatagaagaatatgctaatcatgtggaagcagataaggtgatagaagcaggaaactcattcaggggaatattgtatgagataggaaagctgctggagacatttaaggaactgataaaagaaggattatgctggtttccaaggcttatgaggtggaaaacttctaagggtgaagtagctccggtattcatagagaaaagcaatggatattcatattcggtgtatggatatatgaatgtggaggctagggaatattatagcaaagagtcaattcagtgggagattaaggctggtaacaggacagggacagttgagcagatggatgctaatgttgagactatggctagggatttgcaggagatattgaggattggagcgaagcagaagaggttgtgggaggtgtatgaggggagataaaaatatttaagatgttaaaaaatgcaataactttaaataaaacagacatttttaaataacatatttcggacataaaaattgatagtaaaaagaaaaaaattactgtataattattatggttgagtctacaaggaggaaatcatcatgaatccaatgattaagtatagaggtggtaaatcgaaagaaatatcacattttattagtaatatgccagagaattacaatagatatattgaacctttttttggtggtggtgctttatatttttatttagaaccacagaatgcaataataaatgatgttaacacgaaattatattcattttataaacaaatgcaggaagagtatcctagtgtaagaaagcagctagatgagcttcaaatggtatatgagcaaaatcaaaaagagtatgaggaattgaaaaagaaacatccagaagaaagagtggaaaacaaaaatgaagcattatattataagattagagatatgtttaatcataagatagagagtgaatatttggaggctgtagtttatttctttattaacaagactgcatattcaggtatgattagatacaatgcaaaaggcgagtataatgttccgtttggaagatataaaaatctaaatacaaaattaattacggataagcattatgaattgttaaaaagaacagagatttataattatgactattcagaaatattcaatatggcaggaaacaatgattttatatttttggatccgccatatgactgcgtatttagtgattatggtaatgaagcatatagagacggatttggggaagatgagcacagaagattggcaaatgactttgcaaatctttcgtgtaaatcaatgctagtaattggaaaaacagcattaacagaggaattatatgggaaatacattgttgaagaatatgataaatcatatgctgtaaatataagaaataggtttaaagcggatgcaaaacatataattgttacgaactattagaggaggtagaaaaagtggcatatttaaaaagtaaaacattattttttacaacatctccaagaacacctttaaaaatgattccagaaatacaagtgctatataataactttgaaggtaaaaaatggaatacaaaaacacaagttgagtttattaaaaagcttgctgaggggaatgactttgatggtaaaggctcagaaaaagatttggcttttagtgcaagagatagaattaatagagcaccaaaagctttaggatttgtagatttaaagccacatattaatcttacagaagcgggtgaaaattttataagtgggaaacgtacagaagaggtattactcaggcagttgctgaaatttcaattaccttcaccttatcatagggaaccagaggaatttaaggaaatattttgcgtaaaaccatatcttgagatttttaggttaatatatgaattgggtacgataagttttgatgaattaatgatatttggaatgcaattaacccactataataaatttgacagtattgtagctgagataaaaacttttagacgtatgaaactttatgctaagttaagctataaagcatttagagggaattacctaaaagaacaagtagaaaaaatctatgcagatgatattaatgatgggaatactaagaccagagaatcaagagataaatcaatagataagtttgtaacaacaaagtcacgaaaccttagagattatgcagatgcttgctttaggtatttaagagcaacaggtatggttgaaatatctcagaggggacattcaatatcaattatgccggaaaaacgtaaagaagttgagtttttcttatcgatggttgatagaaaaccaatatatatagatgatgagaagaattataaaaagtatttatttgatggttcagttccagaattatatagtgataatagatttagattaatagagcaggtaaaagaagtaacaggaaagagtgaggcgttagaagaacatacaactaatgaattaaaagatattcttgaaaatgctatagcaaacaagaagaagcagattataagtaaacagataacagaacttaaggaatataaaaattatgcggatgtaatggatacatttgatgacataaaaaataatgtgttatatgatgctccattaatgctcgagtggaatacttggagagcaatgacaatgttagatggaggagatattaaagctaatttaaagcttgatgataaaggacaaccaatgtctacggctgctggaaatatgtctgatattgtatgtgattatggcgactttggactcgctgtagaggtgacaatgcagtcgggacaaaaacagtatgaaacagaaggtgagcctgtatctagacatctagcaaagttaaagaaggagacaggaaaggatgcttattgtttgtttatagcacctaaaattaatgaatcatgtattgcatatttctatgcattacatacaatgaatattgcattctatggaggtaagtcggttatagtaccattggaattggatgtgtttattaatatggttgagcagtcatataaagcaggatatgtacctaatcctcaacaggtaaaaagcatatttgaatattctttagaacaagctaaaaagtctgctgacgagaatgaatggtacgtaaaagtgaaagagaaagcattgaattggttgtgataggtgtattagcagtcagcaaatataaaggcaaattaagtaagatattaatttgcatatttattatttaaacctataaagtaatatacaatgatttttgataagaatattatatcactcaggggatacaatatagtgtcaggaggtgatataaattgaaaataggaggcaaagtttatatgtcagatatatttgcaaatgaagaacaggattatagtttggatgtgcctaaagaaaaaagatttcttaatactacatcttatgactattcagtagaatatttatttaatttgataaaaaaaggaaaaattgttttagaagttccttttcagagaaagcatatatggaaaaatgataaagcctctatgcttattgagtctataattatgaatgtaccaattccccctttgtattttgcggaagaagatgatggaagctggttagtattggacggattgcaaagattatatagtatattaaactattatgataatgagtttgcattaacaaaagttgaagtgttagaggaattacagaaaagaaaatataaagatttaccacctaaagcgaagagtttattagatgatggattgctacgtgttaatattataaaaaaggactctcatagagatattaaatatgatatatttatgcgtttaaacagaggtgcggtaacattaaattatcaagaacttagaaattgtttatatagagggaatttaaatgatgcagctaaggaattgtgtagtgaaaatagggattttttggctatgctgaaacaaaaaaaacctcatcaaaggtatttagatgttgaatttataatacgttattttgcattatcagacaatatcaaaaaaaagaatggaatttttgaggtagaaggatataaaggtaagttggtttcatatttgaacgagtatatggacaataataaggattgttctagcgaagaaaaagaacaatacaaaaaacgctttaatgaaacaattgaaaaaataaaaattgtatttggtatagataaggcatttagagatatttcaactgagaatgtgaaagtatacaaaaccattgcagattttattatgccaagttttgaaagaatgtcttttgaatatataaatgaaaataaaatgaatctgtataacaaattattcttgtttttacagcgtgaagatattcaaaaaagcttgttggtgaaaacatcagataaagatatggttaatttgagaattggggaatggtttaaggagattaacgatggaatatcactttgatgcaacagaggatttcttggtgcgtcagagtgaaatatatattttgttaaatacagcaaatgagaagaatgataaaaaagatacatttttaaaattggctgtagtttcgttagtgacaaaatttcaagtttatattgaaagtgtattgaaagagtttttgtattatataacgagcagtaatattagatataataaacttccaatctatatgagacttaattctataagaattggattaaatgataatgcattgtcgaaattatctaagcataataaatttgatttggatacatcaggaaagataaagaattatttagagagcataaattatataattgatgaaaatttagtggttgatgagaaattaaaaattaatacatcatttccactaggaagaactggcaagggagaattactaggactgtttaaacaaatagatggagatgacaatatttttagaaataaagacacgaatgaagatataattgatattaatcagctagattcattattacagacacggcatttgataattcatcaagatagatttaatcaaacagaaaataaaatagaagaatacataaattatcttaatgaagtagtattgttttgtgatgattatttaaatgataagctatctgaatatggtatttcactagaaaaaaagacatatgatagtgatttaacgaactctaatgctcattcataatatattggtcagggcttgtaatttacaagatatggtgtaggatagattcattaatagagtataaataagattctttgtgtatggggtgagtgaattaattttgaaaaaggtgaaaggacagatagaaaaagagctgtcaacgacagctctttcgaatgaggtgagagggattcgaaccctctgtgcatttatgtgaatcagatttcctgctataagcccttgtggatagactaaaccaccccacaaatgcacgttatcaccacgcctagattatttactctcatgttataaactcccttcattgctaaataaatttgtatattcatcaaagtaaaggtaattatgtcaggagtaatgccacagaggaatgaaagcaaggaaactgcttcaaccaatatatatgcatatgataacatggtttctaaaaaaatgtaaagggtaagcagataaaattattaaaatagaatcagttggataataaggttttactcgtgagtatatatttggtatttttgaatatggttttaaaactaatattgttgaattaaacagctatatatgctatgaatgatcttatggaatattaacatcaatcctcatccatagcatcagtccaagcctgcaactcacaattcatagctaatgcagcatatttatgcctaggatggtatgttgtttcggcacaagatagaaaaaacataaaaaaggtttaaggagaaacgtatatgaaatgtattaaatgtggaagtgaaattgacaatagcatgttccaagcaggtatgtgttttaattgtggtgccgatataacagaaagtattgagaattacaataatgaaatagagactgaaaaacagaaactaaaacaggaaaagatagacattcataataaaaatgtaatagagaacaattatcagaattttcagaaaaaacaagaaaatgaacagatgttactttctactactaatacactagagggttatgaaatatgtggttattgtggaatagtgtttggggaggtagttgttaagcatgggtttatgaaacaattaaatgctggtatgaatgaccttagtgatatgatttcaattggcgataaggaattgtcaggtagtgcagagttggtagaatccgcaagaaaaattgcaataaataaattgattgaaaatgcaaaaagaagaggagcaaatgctataataggtatagattcagaaacatcattaggtggaggtctaaaccatatcacattgatggggacagctgtaaggatatcaaaaataaatgattagaattgtataattatagattataatgtgcagcatcaattaaaatagaaaagttgagtgtaacatatggatgatttatacttaaaaaataaaaatattaataaaaatttgcaaattatgtgtagtatggagattcttttctgcttcagcacatgagacaaacagaagtacattgtcgttaaaagtaatgtcaattccgttcttgtattggttgtagtaagcaagatgtattttcatagtattagtccctttcgttgtcaaagtgattgagtagttctgggaatgtgtgggcagttaaccgcatacaacacatatgcaacactgtcatacacaaagcccctatttctgggcttttctcgttctcaaaacgttaacaaagaaataatatttcaacaatccagtgcgtcttacgacgtttcagaaaagtgtattacacctcaggactttttgtcctggggtgttttttgtaagaactgtggtacaataaataaagaagattttacatataaaatattattgtcatcagattatcagcaggtaaataaatgccggaaatttctttattttatggaattcgagttacaatgtattatgatgatcataatccgccgcattttcatgcagagtataattgaaataaggcaattattgaaattgatacagctagatgcatcaagggagctttgtcatcaagacagttaaagttgattttagcgtggtgtgtgttacatcaagatgagttgatgcagaattgggaattatcaaaagatggaaagccgttaaatagaattaattcacctgtataggaggtgtttgtctatgtttccgaaggtagttcaggtagtacctatgaaagaatacacagtatatgtgtattttgaagatggaaaaatcgtatgttatgatatgaaaaatatgttgaataaagaagtctttaaaccattgaaggatatttcggtatttactgatacatgtacagttatgaatgatacattagcatgggatataggtggagatagagatgtttgtaagtgtattgatattgatccggatacattatatgaacttccatattgtaaagagaaaatagcttagtgataaatctacatgttattgaaatgttttattacgtagtatatttaagaagagtaacaattgtaagattaatagagtgatgagtagttctgggaatgagtaggtagtgttacgcataaaacagatatgtaacactttcagacacaaatccccaatctaagggcttttcacgcattatgtaagatattgctagttgtattgtatattatgtctatacttaagcggtgaaacaaggaattcttttttaaatgcataactaaagtagctggtacttttaaatccacattcgtaagcgatttcatctattggtttgtcagtatttgacagtaaaactatagcatgttctaatcttaccttagataaatatcttgaaaaagcttctcctgtattttgtttgaatagccttgaaaaatgagagctggaaaagctaaataatttacaaatattatccacatttatatcagtcatataattagagtctatatatctcataacatcattgatatttttgtttattttcttgccctgtctgccgtttatatcatgagataactcatgctcaataataaatataattaagtatgtaagcaatgcctttaatttagaatctgagtatggtgaattaatattatactcagtcagcatcttttcaaaaatattccggacaacttgctggtcttcctgattcagaatgtggtatttttcagcgtagaatctgttaaatgcaacagcagatatttcagactttatataatcagctatatcaaatgaatatttaataagtatgctgttatgcgtttcattgctggtataaatgctcatgtacggtagagaagcacaaagcaaaacaaggatagtcagccctgccactattccgaagtcaggggaacgcaatagaaaaattcatagctgtatgctatacttaattagcatttgaacatatcaagctgacacagcaatctctttacttgccgttaatgcgcgtctaccaatagtccgcacaaagcaagagtagcgtaaaggtataaaaatttcaaacttctttgtaacgaaattccgatttctccgtctaacctatgaagctgaaggaggtgatgacaagtatggactatgaaaagctctataaagcct

SEQ ID NO: 352 - DNA, 55476 bp, Unknown
  gut microbiota DNA sequence
aagatacagataatgtattagttgatttataagtataattattatatactaaaaatagtaaacaatatattgttaagaaatgagcatatagagaatatagtttgttgtttacaaaagtgaaggggcacacttataataaaataaaggagtaaaacttggatagaattgaagaattaataaaaagagtaagacagttaagaccaatagatgatgctatgtttaagaagttagcagaatctaaggcagtgtgtcaggaaatactaagggtaatacttaacgataagaagcttatagtagaagaagtgatatcagaagacagtattgccaatatatttggaagagcagtaaggcttgatgcattatgtacattaggcaacggagcgctgtgcaacatagagatacagaaagaaaatgtaaacgatgatgtaagacgagtaagatataatgcatcaagtattgtatcaagattttctgaaaagggtcagaagttttctgaaataccagatgtcatagttgtgtatatttcagagtatgatgtattcaggctgggaagaacaatctaccatattgattcagttataagagaaactaatacaactgtagacgatggattatcaagagtgtttgttaatacacagtatgcagataccgataatacagatgtaggaaaacttatgaagtgctttttacagaaagaaatcgataatgataagtttccagaattatcggataggttatcataccttaagaatgatgggaagggagttgattctatgtgtgacataattaaagattatgctaaggaatatgcaaaggaatatgcagaagagagagcagcagagatgcttgtgaataatattgaaacattagcaaaaaagataggtactgtagaagaagcttgtgatatgttgaatatcacagaacagcagtatgagaatgctaaagcactattagaaaaaactcttacagtataaaagagaataataataatttcagaaagatagcttttatgtctgtaataagatgtagaagttgtctttttattttggcagcttttatgtgataacttaaatattgctaaaagatagtggtgttgatgatttagcagttgaattgttataatgttgtgcgttttaaactcaccattgccataacccacaaaatacagtaaaatattagtaaatcagtaaaaaacaatgagtaacagttatcatgcagtttaagaaaacactagaaatcaaggcagaccataagcttatggtgattgatgtagcagatatattatatttccgggaatggagctgtatgagaattatccgttattggtaaagcacaagttcctgataccggcatattggttttacaggattgtgcgtttgctctttagtaaaaagcgcagaaatcatatactgcgtgaagtaaaggcggtcaaaaaggtctataagataagtttaatgaagatggatatcagatagttcaggattattatgatattttaaaaagcttttacattcaataaaatgcagaagcttttttgtgtatttatatgaaattaatagcagaatattaataaacaacatatatataattgccaatgcttttttaaaatgatatgattataacgtaaagaaaaatttatatttgatgttaaagaaacaaatatgaataatgaaatggagataatatggtagacagcagttattttaagaataataaaaataatagcagaggtggcaaaagcaatggtaaacttatggatcgtttaaaaaagcataagtggattcctttagtgattcttatactgattgcattggctatgatagctatacagtatattatgcttgatgtgcttcaatattcaagagaattggcagaacagcagaatgcaggatttataaatatttatccttttattaaataagctatgttttcatagtaatgaattttatgatatcaaggtggccccagccctgctggttgtgtgggaggttaactttgttacaacattttttaagacggcagcggacttcttcaggtgtcatgtcatgactggtgagaagacgtgcaatagctccgctgactataggtgctgacatggatgttccactttttgtggaatatccattttttcggttactgcatgctgtgatgttagaaccagcgacaacaagttctggttttggaaaaccgtcagtggtaggtccacgccctgaatgaaatgttttatcatccatagatccaactgttattataatatgacttgtaccaggagctgtaatacttttggcacatggaccattattaccggcggctgcaacaacaactatgccgttatgccacatattttctatgtgttttataagtcggattgtattttcaatatctacattgctgtttggagttgttccaaaggatatatttgcaacctttatattgtaaatgtctttattgttgattatccagttagcgccatctatgacactgcctattttgccattgccatatgagtcaagaaccttaactgatataatctggctcataggtgctattcccttgaaacgcccattgcttgcttttccacttcctgcgattatgccggaaacatgtgttccgtgaccactatcatcatagggaatgttcttattgtttataaaatctttaaaagctattatcctgttgtcaaaatctatatgtctgtaaatgccagtatcaagtacggcaacaccaatattttttttattcataaatatttatcctttttataaaattagaaagtccttatatatttattttattctgtatagacttaaaagttctgattgtttgttttttaaagtattcgagtatccaggaatatccgtgaatacaactaattgtttgctttttaacacaaaataatatataatgtattaacacttaattcgtttttgaaggttttatgtgaatatcgtgaagaattgagaggtttgtgatatggaaaagaaaagaatagtagttgctttgggaagaaattcatttggagttacatttccagaacagcagactaatgtaaaaaaagcagcaaaagctgttgctgatcttgtagaggcaaagtatcaggtagttattacacatagtaatggaccacagattggcatgattcagactgctatgacagagtttgcaagacttgagccagaagacagaacagttgcacctatgtcagtatgtggagctatgagtgaaggatatataggatatgatcttcagaatgccataagggaagaacttcttaacagaggtatatataagacggtttctactataattacacaggtaagagttgatccttttgatatagcattttctgagccatctaagataataggaagatatatgacaaaggctgaggccgaggctgaggaagataaaggcaattatgtaatagaagaagaaccaggaaagttcagaagaatcattgcatcacctatgcctatagatatatatgaaatagatgcagttaaggcacttcttgatgctgaccaggtggttatagctgcaggtggtggtggaattccagtgttacagcagggttctcatcttaagggagcgtcagctatcatagaaaaagattatacagctgctaagttagctgaacttgtaggagctgaaacacttcttttccttacagcttatgatagattaacaataggtaaagggactgctgatgagaaagagtttgataaagtgacagcaacagagcttcatcagtacattaaggctggacatttcccagctaaaacaacattccctaaggtagatgcatctataagatttgttacagcagattctgatagaaaagcagttatagccaaccttgaaaaagcaaaggaaggacttgcaggtaaaactggaactacaataacagcataattattatactgacataaaatatatcaaaaaatatttacatgacagcaaaaatctaacggattacaacaaaacaacaacaacatacaacatcccccaataatccccccaaaaatgtgctacaatgtgcgtaagcattgagccgtgccagacttaattccaaaccagaactgtgcttgcacaaagttctgatttggaatttagtctgatagggcgaaagcccgacagtccaagagagcgaagctcacttggacatgcacggcggagtgcagggcttatattttattattgggaggtgtttttttgttattatttaatttacaaaagagatgggctgaggtggatagtcttatggaacatcttgatagtatggggatggatgtatgcaatgtttacaaaggacagaatgtgacagatgatatatgggatcttagcattgaagaaacaaagaagttatttataaagcatagatatatagtaatggttgtatcggatgaactgtttttaagcgtaagtgctctttattatattgaacttgccagaaagcttcataagaaggggttaataaaggtatatgttgttaataatatgccacatgaagcatatccatcaagatgcagctggctttcagatgcagttgccataaagaattcttctaatacagctgatgaaaaaacttatgcatatgcgatggatattgttcttggtgtaacgagtgatatttttaacatggagtcgtaaaatgccttttgctacgaacatcaggtaggattgtgggagtgcgtagcacggaacaatctgtaggtatcaaagtcgtgggcttttgaccccgacatcattataatttacaattataattcacaatattattagtgcttgcttttaattcgtttaccatatataattgttatgttttagtattgtggcttattatgtttagacaatataagtgttaaaattactcttaatgtccatataatcagatatgattataactaccaggaataaataaggtagtccacaatataaatgaactggttaagttaaccattaatggaggaatgatttaatgattagtgcaaacaacgtaacacttcgtataggtaaaaaggccctttttgaagatgtaaatattaagtttacagaaggaaactgttatggacttataggtgccaatggtgctggtaagtcaacatttttaaagattcttacaggtcagattgaaccaagtaagggagatgtaactataacaccaggtcagagattatctttccttgaacaggatcactttaaatatgatgattatacagttcttgatacagttattatgggtaatacaagactttatgaaataatgaaagaaaaagaggctatatacgccaaggaagatttcacagaagaggatggtaataaggcaagtgagcttgaagcagaattcgctgatatgaacggatgggaagcagaatcagatgctgcacagctgcttaacggacttggcattactacagatcttcattataagaatatgtcagagcttaatggtagtgagaaggttaaggttcttcttgctaaggcactttttggtaatccagatattcttttacttgatgagcctactaaccaccttgatcttgatgctatagcatggcttgaggagttccttattaactttgagaatactgttatagttgtatcacatgacagatatttccttaacaaagtatgtacacagatagcagatattgattatgccaagattcagctttatgcaggtaactatgatttctggtatgaatcaagccagctcatcattaagcagatgaaggaagctaacaagaaaaaggaagaaaagattaaggaacttcaggactttatccagagattctctgctaatgcatctaagtctaagcaggctacatcgcgtaagagagcattagagaagattgaacttgatgagataagaccatcaagtagaaagtatccatatatagatttcagaccatcaagagagattggtaatgaagtacttacagtagaaggtatatctaagacgatagatggagttaaggttcttgataatatatcatttatagtaaacagggaagataagattgcatttgttggttctaatgagcttgcaacaacaacattgttcaacattattaccggtaatatggagcctgatgaaggatcttataagtggggtgttacaacttcacaggcatatttccctaaggacagcgcagcagagtttaacagagaagatactatagttgaatggcttacacagtattcaccagatccagatccaacatatgtaagaggtttccttggacgtatgctttttgctggtgatgatggtgttaagaaagttaaggtactttcaggtggagaaaaggtaagatgtcttatatcaaagatgatgattatgggttctaatgtacttatatttgatgatcctactaatcatcttgatatggaatcaattacagcacttaacaacggacttattaagttccctggtgttgcacttttcacatctcatgaccatcagtttatacagacaacagctaatcgtattatggagatagttccatcgggacagcttattgataagatcacaacatatgatgaatatcttgaaagtgatgacatggcaagaaagcgtcagggttttgctgaggctgccagtgatgatgaagactaagactaagcagtgattcttaagcaatacatgaaattatgaacagaaagatgtcacataccaatgatccatgatgtatgggtacgttagtatatgtggcatctttcttgcgttaaaataatggaaatgttatactaaataagttatagattaaaacacattagattagagatgtgtataagattatgatggaggatttggaaaattatggcttcaaacactaagaagagcagaagtcaaggcaataatagaacatcaaagagtaaaacttctaaaacaactggaacaagaacatcaaacgccagcagaactccgtcaaaaaagagttccacaaagaagggtacaggtactgcatcacagcagccacaaccacagaataatgcattaagagatgagataatcttattattagcatttgcatgtacaataattttattattaagtaattttaatatggctggtatggtaggacagtcaattaagtggtttatgttcgggctgtttggtatagctgcgtatataattccatttatagtagcaggaagtatattgtttatgcttgctaacaaggacataataggtgtcatgcgtattaaagctgcagcagtttatgtcttatccgtgataacagcagcaatatggcagagaatgactaacaaaccagatatcagggattccgttggttcatattttacatattgttcagagcataaaacaggcggtggcctgtttggagggattttatgtaagatactaagtccgcttggtatggcaggaactatggtgattttgattattcttgcaataatatgtgttatattgataacagaaaaatcatttataggtggactaaggaatggtggacacaggcttgtaaaagaagcaagagaagattattctgcatatagggaacattcttcaatgagcaggaaagacagcggtatgagtgatgaagaatatcgtgctatgagagagaatgaaaagcatcaggcaagaataagaagattagaaaaaaaagagcagattatagcagctaaaaaagctaaagaagaggctatggctaatgcgcgtatgaataatgttgtaagaggagtgactaaagatcttacaatacaggatacacagccagagacagctaatcaggatatagatatacatgaaatacagcctgtagccaatgatgatgatgtgtatatggatgatatatatgatccactgatcataccagaaaagcataacaacataaacagaacttctgatatatgggaagtgcatagtgacaggcaggataaagataatacagctttggatcatggtatgtcatatgatgaaacaataagtacaagagaagacgattacgaagaacaggatacagaatatccggatgaaaaagagaaggaactgacagaatatgatcccgaggtatcggaggaatacaatgctgatatatatgacacagcggatgaaggaaatatatataatgaaaaaaatgcatataatgatgcagatgcatatgataccgaagagatatgcgatacagcagatgatataaatcatgatgagaatataacatcgtatgataatgaggaagtaagcagtgcagtaagcacacaacataataagcaggctgttccacaaaaaactaccagcaatattatgccagaagctgcaaggcatgtcagggaatataagtttccacctgtgagtctgcttaacagaaacacaaagtcatcatctgctaatcttgaacgcgaaaacagaaatacagcaatcacgcttaagcagacactccagaatttcggtgttaaggtagatataacagatataagctgtggacctgcggttacaagatatgaattaaaaccagagcttggtgttaaggtgagtaagatagtttcgcttgcagatgatattaaactaagtctggcagctgctgacataagaatagaagctcctattccaggtaagtcggctattggtattgaggttcctaacaaggaagccggcagtgtgtatttaagagaacttattgaaaatgaagcatttaagaataaccaatctatgattgcatttgcagctggaaaggatatagctggcaagacgatagtagcagatatagctaaaatgcctcatcttcttattgcaggagcaacaggttcaggtaaatcagtatgtataaatacaatcatcatgagtattttatataaagcaagaccagatgaagttaaaatgatcatggtggatcctaaggtagttgagcttagtacatataacggaataccacatcttcttctccctgttgtcacagatcctaagaaggctgcaggcgcacttaactgggcagtcaacgagatgacgaaacgatataagctttttgctgatatgggagtacgtaatcttaaaggatataatgatgcagtcggaaagatggatgttaaggaaggagaggcccctgttgaaaaactacctcagatagttataattgttgatgaacttgcggatcttatgatggttgcaccaggagaagtggaagatgctatatgcaggcttgcacagcttgcaagggcagcgggcatacatatggttattgcaacgcagagaccatccgttaacgtaattacgggacttatcaaggctaatgttccatcaagaatcgcattttcggtatcatcaggtgttgattccagaactattttggatatgaatggagctgaaaaacttcttggtaaaggagatatgctgtacttcccatctaacattcctaagcctataagagtgcagggagcctttgtatcggatgaagaagtatcaagagttgttgattttcttaaggaaaatatgacagaggaagcacaatatgatgagagcatagcagaaactgttgcacaaaagacatcagatagtgctgctgttgacaggcaggatgataaagataccctgtttgaggatgcaggaaggtttgttatagaaagagaaagaggctctataggtatgctgcaaagacagtttaagataggctttaacagggcaggaagaatcatggatcagctttcagatgcaggtgtagtaggacctgagataggaacaaagccaagaaaagttcttatggataaggaagagtttgaggcctatataaatagtgcaggttcatgagtgcagggtaaataaagagtaatacatgctataataagcacaaaagaaataaactaaaaagaaaacaaatactttgtaggtgtcacatatgacacggaaaggataaagacatggcagtaaagagtgatatcgaaatcgcacaggaagcaaaattattaaatattaaggatgtagcggctaaggtaggagttacagaggatgagcttgaaatgtatggtaaatataaggccaagttatctgatgaacttatacacagggttgaaaacaaagaagatggaaagcttgttcttataacagctatcaatccaactccagcaggtgaaggaaagactactataagtcttggacttacagaagccttatgtcagagaggagttaatgcaatagctgcattaagagaaccatcacttggaccatgttttggcataaagggtggagcagcaggaggcggatatgcacaggctgttccaatggaggatcttaatctgcattttacgggtgatttccatgccataacatcagctaataatcttttagcagccatgttagataatcatatccatcagggtaatgcacttggcatagatactaagcgtattgtctggaaaagatgtatggatatgaatgacagaacgttaagaaatatcgttataggacttggtgataagccaaatggcgttgtaagggaagatcattttattataacagttgcatcagaaatcatggctatattatgtcttgcagaagacatgaaggatttaaaagaaagactttcaaagataatagttgcatataattatgcaggagaaccagtaacagcatctgatcttaaagcaacaggagctatggcagcccttttaaaggatgctataaagcctaatatgatacagacactcgaaggtacaccagtgcttgtacatggaggaccatttgctaacatagcccatggctgtaactcagtaagagcaactaagcttgctatgaagcttgcagatgtggcagttacagaggctggtttcggagctgatcttggagctgagaagttctttgatataaagtgtagaaaagcaggacttaaaccagcggcaacagttattgtagcaacagttaaggcattaaaatacaatggtggtgttcctaaggctgaacttggaaaagaaaatatggaagccttaaagaagggtatagttaaccttgataagcatatcgagaatgtgcataagtatggagtacctgttattgtaacattgaactcatttattacagatacacaggaagaatatgaattcattaaaaaacactgtgaagatttaggatgtgagttcgcgctctcaaatgtatgggctaaaggcggagaaggcggacaggagcttgctgataaggtgcttaagactttagaaaacaagaagagtgattttaaaccattatatgaggatgaacttccacttgaagataaaatattaaagattgcaaaagaaatatatggtgctgatggtgtaacatatgatgccaaggctaaaaaagagcttgatcatattacacagatgggatttggcagcttcccagtatgtatggctaagacacagtattcactttctgatgatgcggctaagcttggaagaccagaaggctttactatcaatataagagaggtatatgttgatgctggtgcaggctttgtggttgcgcttacaggaaaggtgcttactatgccaggtttacctaaggtaccagcagcggaaggtatagactatgatgaaaaagaagaaagaataacaggattattctaattggcagatatgatgttgaatgtttatcgggaggactaattatgcagcttaagaatatattggacatatgtgcggataatgaaatagaaaagtttgaatatacattattaaagggcagtgttgatacagatgttaccggtattgcatcagattcaagaaaagtaacagatggtggaatatttgtatgtattgtaggagcagtgagtgacggacataagtatatagggcagattaaggataaggcagctgtcatagttgtacagaagggctctgattatgaggttccatctggtgatgttacgttaatagaatgtgataacacaagacttgcacttgcacttatgtcagctgcattttatggtaatcctgacaagaagctgttcactataggtattactggaacgaagggtaagacaactacaacttatatgatcaagaatgttttatgtgcatgtggaataaaaacaggtcttataggaactatagaaactgtgataggtgatgaaacgattccttcatgtaatacaacgccagagtctctacagatccatgaaacattccgtaagatggttgatgcaggctgcaaggctgtggttatggaggtctcttcacagggacttaagcttgatagaacagctggtattatgtttgatataggtgtgtttactaatcttgaaccagaccatataggacctgatgagcatgcttcgtttgaagaatatcttgaatgtaaggctaaactttttaagcaatgcaggacaggaatagtgaatgctgatgataagcatacgaaagatatattaaagaattctatatgtatgacagaaagctatggagtgtcagaggcagcagacataagggctgtggatgttaagctgcttcatgaaccgggaaagattggccttacatataagtgtcagggacttatcaatatggacgttgcattatcacttcctggaatgttttcagtatataattcgttatgtgcaatagcagttacaaggtattttaacgtggataaggatatagttgaaaatgtgttaaaggatgtaaaggtaaagggaagaatagaacttgtaaaagtttctgataaattcacacttatgatagattatgcacacaacgccatgtcacttgaaagtattcttaaaacattaaaagaatacaatccacacagacttatctgtctttttggatgcggtggaaaccgttcaagggagagaaggtttgagatgggtgaagtatcaggaaaatatgcagatcttactgtaataacgtcagataatccaagatttgaggagccagaagctattatggaggatatcaagacaggtataagtaaaactgatggtaaacatattgatatagtagatagaaaagaagctataaaatatgttattgagcatggagaaccaggagatattatagtacttgcaggtaagggacatgaagattatcaggaaataaaaggtgttaagtatccaatggatgagagagtgcttatagctgaagtacttgatgaattaaaggagaaaaatgtacgctgatattataattgatatatcacatgaacagcttgataaaacatttcagtatgcaataccccctgaactagaaggcatattagagataggcagtgtggtaagagttccttttggtaaaggaaacaggcaactgacaggttatgttatttcaatgacacaggagccttcttatgatgttaacaggattaaattcatagaaggtatagctgacaaacgtgtcaatgcagcaacagatatgatcaagctggctttctggttaaagactcattatggttgtaccatgaaccaggcattaaagacagttattcctgttaaagataagataaatcagaaggttaagagggcagtgtgtcttaatatagatgaagataaggcaagagagcttcttttgatatataaaaaaaaggcaaaggctaagcacaggcttttagaagcgcttatagaagagcctgttatagatagtgagatagtaagaagtaagcttaatatatcttcatccacggtaaaagctatggaagaggataaggttatcatcgttaaaacagaggaatactaccgaaatcctgtttctgataaaaaagtgtttggcaaggatgtagtgcttaacgaggaacaaagagcagcggtacaaagtatcatagctgattataataacaggatttataaaacttatcttatacatggtgtgactggaagtggtaagactgaggtatacatggatgttatagagcatgttatagccagcggaagacaggttattatgcttatacccgagattgcacttacttttcagactgtacaaagattctatcacagatttggagacaaggtttctattattaattcacgtatgtctaagggtgaaagatatgatcagtttttacgtgcactaaaaggtgaggtaagtataatgataggaccaagatcagcactttttacacagtttcctaatcttggccttattgttatagatgaggaacatgaaggcgcttacagatctgaacagcttccaagatatcatgcggttgaaactgccatacatatagcaaaggaacataatgcatcggttatacttggttcagcgactccatctatagatagcttttacagggctaaaaacggtgagtttaagctgcttacattaaaaaacagggcaggaaaaagtgaattgccgcaggtatatatatcggatatgagaaaagaactgaagtctggtaacagaactatattttctctaaagcttcaggagcttatacgtgaccggctcgataagaaagaacagataatgttgttccttaataaacgtggaacagctggatttgtatcatgcagagcctgtggatatgtctgtaagtgtccacattgtgatgtttccatgactgcacatcgtaacggaaggcttgtatgtcattactgtggctatgaaacaccgcaggttaagatatgtccggaatgtggttcaagatatatatcaggctttaaggcaggaacagaggctgttgaagatgcagtacataagatgtttccggatgcaacagtgctgcgtatggatttggatacgaccaaaggaaaagatggacatgaacatatattgaatgcatttgcaacacagcaggcagacgttcttgtaggaacgcagatgatagtcaagggacatgattttccaaaggttacacttgttggtatagttgcagcagatatgtcactttattcaggcgattacagggcagttgaaagaacattccagcttgtaacccaggcagccggcagggctggaagaggtgtaagaaggggcgaagtggttatacagacgtattcaccagataattatggtataatatgtgcagccagccaggattacacaggcttctatgataaagaaatagcatatagaaaaatgctttcatatccacctgtaagtaacatgattaaaataaatatcagttcagaagatgagaataagcttttgaaagctgcagaaaatataaagcagctgcttgataaaaagacagcagggctttcagataatataaagcttcttggcccatcgaatgcacatatatataaaataagtgatgtatacactaaaataatatatttaagaagtgctgattttagcaggctttcatatcttatggactgcatagataaatacatacaggataatgatatgtttaaaaatataagcattcagtatgatgttaactagtacatcgtttcgaaaacgatgtaccagatatttacaacaattaatgattataaataatgttaaaacggaggaataataatggcgataagaaatataagaactcttggtgatgagatactaagaaaaaaggcaaaagaaataacagaaatgacaccaagaatacaggaacttattgatgatatgtttgagacaatgtatgatgcgaatggtgttggacttgcagcaccacaggttggcataagaaaaagactggttgttattgattgtggcgatgacccaatagtactcattaacccggtagtgcttgaaacaagcggttcacagacaggacaggaaggctgtcttagtgttccaggtaaatcaggtatagttacaagaccatcatatgctaaggtaaaggcacttaatgaagatatggaggagattattgttgaaggtgaagaacttcttgcaagatgtctgctccatgagatagatcatcttgatggaataatgtatgttgataaggttgagggaaagctgcttgatactgaaatggaggatgaagaatagtgaaggttatatttatggggacgcctgactttgcggtcggcacacttaaagcacttgtagaagcaggacatgaggtggcagcagtagtaacacagccagacaaaccaaagggaagaagcaaagagcttgtgttttcacctgttaagcaggaggctgtaaagcttgggatagaagtgctgcagccagaaaaagcaagaaatgaagagtttatagaaaagctaagaacatataatgcagatatatttgtggttgttgcttttggacagctgcttccaaaaagtataatagatatgccacgctttggatgtgtaaatgtacatgcatcattacttccagaatatagaggtgcatctcctatacagtgggcagttatagatggatgtgaatattcaggtgtcacgactatgaagatggatgaaggacttgatacaggtgatattcttcttgttaaaaaagtgaagcttgataagaaagaaacaggtggaagcctttttgacagattaagcatagttggtgcagagctgcttatagaaacattgaaaggacttgaagaggggacaataacgccagtaaaacaggatgattcaaaaagttcatatgtaacgatgttgaagaagtctatgggtgagcttgattttagtaagccagcacatgatatagaatgtcttataagaggacttaatccatggccaagtgcgtatacacattacaatggtaaaatgttaaaaatatgggatgcagatgttgtacataacatatcagatatagctgattcatctaagtttaatgatatagagcaggaaatacaatgtgatgccaacatcgcacctgcaactgtatgctatgtagataaaaaaagacttatagttaaatgcggagttgattatttaagtctcaatgaagtacagcttgaaggcaagaaaaggatgaaaacagatgcatttttacttggctgcagggttgaagcaggaacggtttttggtgcagattagtataggatgtttaatactactatgaaagggcatattttatatggaagttaacttaagggcagtagtgcttgatatacttacggagatagagaaagaaggagaattttcccacataactattaataatgctctctcaaagtatcagtatctggacagagcacaaagagcatttataaacagacttgccttaggtactattgaatgcaggatagagcttgactacataattaatcagttttctaaaacacctgttaataaaatgaaaccagtaataaggcgtattatgagaatggcagtataccagcttgtatatatggagaatataccggcttcagcagcctgtaatgaggcggtaaaacttgcagctaaaagaggctttacaggacttaagggctttgttaacggagtgctgagaaatatatcacgtaacaaagaaaatattgtatatccagatatggtacaggaaccacaaaaatatctgtcggtgaaatattcaatgcctgaatggataataaatatgtggatggaatacatgtcttatgaagatgttaagagtattcttaccggtatgaaaaaagataaaaagacatatatcagatgtaatacattaaagggtggcgttaaacacataaaggatgtgttagagaaagagggagttacagttaatgctgtccctgacataccatatgcatatgaaatatcaggatatgatcatctgacggcacttgaaagctttaatgaaggattgtatcagatacaggatataagttcaatggcagcaggagagtatgttttgccctcaatagacagcctcatagtagatgtgtgtgctgcacctggtggaaagtcggtaaatgcagcactgaaggcagtggaatctgcatatgcgaatataaaagatattcctgatgatggtgttgaagaaaatatcattaaaagcataacaggaagagttatatcaagagatgtatccgattataaagtatcattaatagatgataatatagaaagacttggaatatctaatatagatgtccaggtatataatgcattagataaggatgatagtcttgttggaaaagctgatatagtaatagccgaccttccttgttcaggacttggaatcatgggacgtaagcctgatataagatataatataagtcctgaaaaaatatctgatataatcaggcttcaaagagatatactagaggttgtaagcatgtatgtaaagccaggtggtacacttgtgtatagtacatgtactattaaccggtcagaaaatgaggataatgcagactggatatgcacaagccttggttttaccagggatggagagtatgttcagatgctgccatcacctgataaggataatgatggcttttttgttgcaaggctcataaaaaacaggtaatgcacacagaaatgaggtatatatggaaaaaattgatataaagtctcttaactatgatgaactggcagattatattgtcagcattggtgaaaaaaagttcagggcggcacagttatattcatggatgcatgaaaaacttgcctgtagttatgatgagatgactaatatatcagataagttaaagaaagttctaaaagaaaatactttgtatacatgtcttgaaccagtaagggtacaggagtcccaaatagatggtacaaagaaataccttttcagattatatgatggtaatcttatagaaagtgtatttatgaggtatcatcatggcaattcagtatgtatatcttcacaggtaggatgtaaaatgggatgcagattctgtgcatcaacacttaatggatgtgtaagaaatcttgaaccatcagagatgcttgatcagatatacagaatacagagtcttacaggtgaacgtgtaagtaatatagttattatgggttctggtgagcctatggacaactatgataatgttgtaaagttccttggacttataaacagtgataaaggacttaatataagtcagagaaatatcactgtttcaacatgtggattagtgccaaggataaaacagttagcagaacttaaactgcagataacactggctatatcgcttcatgcaccaaatgatgaactaagaaaaacgatgatgcctatagcttatacatatagtatagaacagattatggatgcatgcagatactatctttcacagacagcaaggagaatatcctttgagtatagccttgttaaaggagtgaatgattcgcctgagtgtgcaaggcagcttataaagcttgttcatggtatgaactgtcatattaatcttattccggttaatcctattaaggaaagagattatgagcagtctgaaaagaattcaatacataattttaaagaaatactagaaaaggcaggggtgaatgtcactataagacgtgaaatgggacgagatatagatggtgcctgcgggcagctaagacagaatcatatagaaggaatgttatagacatattttaaataattataaaagcggttgaaatatatcgctttttttggatgtttatgataaaatgctactgttcggggtcgtgatttacagattgtgtataaaaggctgctgaactatatgggagattttttcctgtaatgttaaaagtatataggcatatacttattgaaaagagaatggagagagagatgaacgcatttgcaaagacggatgttggaattgaaagagccgtcaatcaggattatgtctatacaaagcttgataatatagggtgtctgccaaacatttttgttgttgctgatggcatgggtggtcacaaggctggagatatggcatcaaaatatacagtagatacacttattgagttattaaagcaatcagcaggtatggatccgcttgatgcggttgatgataatattaagcttgttaatacgctgcttttaaagaaagcaggagagtcagaagagtatgaaggaatgggaacaacccttgtagttgccagtatttttggaagcactttaagagttgctaacgtaggtgacagcagactttatgttataggagaagatataacacagataacaagggatcattcgcttgttgaagagatggtacagcttggccagatagacagaaaagcagcaagaacacatgagaaaaagaactacataaccagggcaatcggtggatgtgagactgtggaggcagaaatgttttcagtggatcttaacgataatgatattattcttatgtgctcagatgggcttactaatatgcttgaagattcagagatatttcacattgtcaaagaaagcgctgatattaaaacagcagctgacagccttgttaaaaaggctaattataatggtggcaaagataatatatcagtagtattgattgaaccataagttggaaaggtaaagaatcatgttaagagaaggaatgtttttagccgacagatatgaaataattgaacagataggtacgggtggaatggctgatgtttataaagccaagtgtcataagcttaacagatatgttgctattaaggttatgaaatctgaattcagccaggataagacatttgtcagcaagttctgggcagaggcacagtcagctgcaggacttgtcaatcctaatgttgtcaatgtatatgatgttggcgttgagaatggaatatattatattgttatggaacttgtagagggcataactcttaagaaatatatagagaagagaggcaggcttccatataaagaagctgtcagcatagcaatacaggttgctaatggtatggatgcagcacataagcacaatattgtccacagagatattaagccacagaatattattatctcaaaagagggcaaagtaaaggttacagattttggaatagctaaggttgcatcatcagctactattaacacatcagcatctatgggttcagtgcattatatttcgcctgagcaggcaagaggtggatattcagatgagagaagtgatatatattcacttggtataactctttttgaaatgctcacaggaacagtgccttttgatggtgattcagcagtatcagtagctgtccagcatatacaggatagtataccactgccttcacagcttgtagaaggtgtacctgtaagtgtagataagattgtgcttaagtgtacgcagaaaaagacagatagaagatatcagtcagcagcagaactgatagttgaccttaaaaagtcacttgttatgccagatgaagattttgtcagaatgggttctgcatatgatagtgtattaaagaaggatgaagaagaatataatccagatggtgatgaacttcttacagaaagtgaaggacatgatttggatgatgataacgatgatacagatgatgagcttcttgagaatgattcagataaggatgaagatatagatgatgagagaaatgataagcttgagcttgtcatgaaatgcataggtatcggtattgcagttattatacttatgataactatatttgtagttatcaagcttgtaggaaatggcaaaaatacagcaaaaaataataaaacctcagtagaagcaacaactgttaatacagctaataacaattcatcagacatggtagaggttccagcagttgttggtatgacaaaggaggatgctatcaaggcacttaacaagcttgggcttggatataaggctgttacacaaagttctgatacggttgcagaggattgtgttataagccagggcaatgtaggcggttcaaaggtagaaaagaattcacagatagtacttactataagtacaggtaaagaaaacaaagaagtgacagtgcctaacgtaaagggaaagtcagagcaggaagctaaggaagctattgaagcagctaatcttgtggcttctgtagattatcagtatagtgattcagttgaagctggtaatgttataaaatatagtccttcaggttcagtagcagaaggttctacagtaactatacatgtaagccgtggaaagaaggtaactaatgtatcagttcctaatgtacttggaatgtcagaaagtcttgcaagccagacacttgattctgctaatcttaaggttacagtcaagtatgaaacatcatctaaggcagaatatggaacagttacatcacagacaccttattcagcaggcgattctgtaccatcaggaacaactattactatatatgtaagccattatcagcagacagcacagcagacaacaacagctgctaataacaaaaacaataatggcaattcaaacaatagttctaattaatggaaacggcataatatgcagggaaagataattaagggaatagcaggcttttactatgtgcatgtagaagcctgcggtatatatgaatgtaaagcaaaaggaatattcagaaacaaaaagataaaacctttagtaggtgataatgttttaatagacgttattgatgaggataataaaaagggaaatataagtgatattcttgaaagaaaaaacgaacttataagaccagcttcggctaatatagatcaggctatggtcatatttgctgtaaaatctccagaacctaactataatcttttagacagattcatacttatgatggattatcaggatgttcctactgttgttgtatttaacaagacagatcttgttgaagaaaaggatatagaagagttaagaaaaatatatgaaaaatgtggctgtaaggttatatttataagtgcctacgataacacgggcatagatattctgatagatactcttaaagataagacaactatactggcaggtccgtcaggagttggtaaatcttctcttactaacattattcttccagacaggaaggaagaaggagagataagtaagacaggagatgtcagcagaataggacgagggcgtcatacaacgaggcactctgaaatatttaacgtaacaggaagcacatatatatgtgatactcctgggtttacatcacttaaccttccggagcttgaaaaggaacaggtgaggttttatttcaacgagtttgatgaatatgaaggcacttgccgttttaatggctgtgtgcatataaacgagccggattgtgctgtgaaaatggcagttgaaaagggtgttataagccgccgccgatatacaagctatgtagagctatatgaagagattaagaatcagaagaagtattagtgaggaaatatattatgatgttattatcgccatcgttactggcagcagatttcaagaatcttgaaaaggatataaaaactgtggataaagcaggagctgattatattcatcttgatgttatggatggaagttttgttccaagcttttcattcggaaatccagtcattaaatcaataagagaatgtacagataaggtgtttgatgtacatcttatgattgatgagcctataagatatatagaggagttcgtgaagtgtggagctgatataattacagttcatgttgaagcgtgtcaggatgtagcagcaacgcttaaaaagattaaggaatataatgtaaaaccagctattacacttaatccagaaacacctgtaaaggctatagagccttatctttcaatggttgatatggtgcttgttatgagtgtacatcctggttttggaggtcagaagttcatcccagagtctatacagaaggtaaaggaagtaaagaagcttcttatagataagggacttgataatgttgatatagaaatcgatggcggtatcaatgcagagaatcttgcatcagtacttgaggctggtgttaatgttgttgttgccggttcagcggtttttaagaatgatgcatcagagaatgtaaaaaagtttaaggaaattatgtcgttatattaagcaggtatcccagatggatgagttgttctgacagatgtaatagcatttacatatgttatataacttttctgtctgggatttgattaatgtaatgatgtgatacaggaaaggatactgaagctatgttagaagaattaaaacaaaaagtgtatgaagcgaatatgcagcttccaaagtacggacttgttacttttacatggggaaatgtaagtcagatagacagaactactgggtattttgccataaaaccaagtggagttgattatgaactgttaactcctgatgatatggttattatggatcttgaaggaaacaggatagaggggagatataatccgtcttcagatacacagacacatatagaactatataaagcgttcgataagataggtggaatagtgcatacacattcatcgtatgctacaagctgggcacaggcaggcagaagcataccttgttatggaactacacatgcggattatatatatggtgaggttccatgccttagatgtcttactaaggaggagatagatgaggcatatgaaaaaaatactggaaagcttatagttgatgagtttaaaaggatggggaaagatgtttctgctgttccagctgtactatgcaagaatcatggaccttttacgtggggaaaggatgcaaaagaggctgttcataatgcggttgtgcttgaagagtgtgcaaagatggcatataggacagaaagcataaatccacaggtaaaacaagcaccacaggagcttatggataaacattatttaagaaaacatggaaaaaatgcatattacggacagaaaaatgccaagtaaaattaaactttcatggaaaccagtggaattaaaggcagtgaaaataatctttcagggcttttaaaaatacattttttatgatatagtaatcagatgatgtaaagtccaaaaatcaaaaagccgtttatgtttgtaaaagctaagaagttatggaagctatggctatcatgattgggctgcagtaaatatagcggattgtttaaatgaaataaagagaaaggtgaaagtcctgaaacagaggattttcaaagaggtatatacattatgaaactcggtatcgtaggtctaccaaatgtaggtaaaagtacattatttaattcacttacaaaggcaggagcggagtcagcaaactatccattctgtacaattgatcctaatgttggtattgttacagtgccggatgagagacttgataagcttgcagcactttataattctgcaaagataacaccagcggttatagagtttgttgatatagcggggcttgtaaagggagcaagtaagggagaaggtcttggtaaccagttccttgctaatatacgagaagtagatgcgatcgttcacgtagtaagatgttttgagaattctaacatcgtacatgtagatggttctattgatcctgtacgtgatattgaaacaatcaatcttgaacttatattctcagatatggaagtgcttgagagaagactggcaaagcagaagagagcttcttataataacaaggatatagctaaggaatgtgaacttatagaaagacttcttgcatttcttgaggcaggtaatcttgccaagaactttgaatgtgaggatgaggatgaagaagcattcatgaaggaatataatctgcttacagctaagccggttatatttgctgctaatgtgtcagaagatgatcttgctaatgatggtgctggcaatgaatatgtagcacaggtaagagaatatgcaaagaaggataactgtgaagtattcgttatatgtgcacagatagaagaagaaatctctgaacttgatgatgaagagaagaagatgttccttgatgatcttggaataagctcatcaggacttgataagcttatagcagcaagttacaggatacttggacttatcagctacttaacagctggtgaaacagagacaagagcatggactataacaaaaggaactaaggctcctggtgcggcaggaaagattcatagtgactttgaaagaggctttatcaaggcagaagttgttaattatcaggatcttttagattgtggtacttatgcaaaggcaaaagaaaaaggtcttgtgcgtatggaaggtaaagaatatgtagttaaggatggagatgtaattcttttccgttttaacgtataaaataaaatgtgataaaggtttataaaaggaccagacagctgtcataagacagattgtctggtccttttgtactatattttttaaaaagtccgcaagtggttgatattaatctgcctgatgttgatggaaaattttagaaaatgccaaaaaactataggaaaatgcttgtgttttttattaaaaaagtataaaattgactctaaagtggagcaaagtggtagtgagtggaagaaagtggtagaaaggaggaacgattgctatgtttatgggcgaatatagccatactatagatgccaagggcagaataatcgttccagtgaagttccgcgaaagtcttggtgataactttgttgttaccaaaggacttgataactgcctttttgtatataccaaagaagactggcagaagtttgaagagaagttaaggacacttcctcttacgaataaagatgccagaaagtttacaagattctttcttgcgggagcagcagaaatggaggttgacaagcaggggagaatacttattccatctgtattacgtgagtttgcagcacttgagaaggatgttgtattcgtaggggttggaagccgtatagagatatggaacagagcaggatgggatgaaagcataagcggttatgatgatgatatggatgaagtcgcagaaaatatggacagtctgggatttactatataagaacgaatcagcttttaaacagaaacactaaagactgatctttaaagtataaacagggagagagtggtatggaattcaagcacaagtcagtattattatacgagacggttgatcaacttaatatcaagcctgatggtatatatgtagatggcacgcttggaggtggaggccattcatatgagattgcaagcaggctttctgacaaaggaagacttataggtattgatcaggatgaggatgctataaaggcagctagtgaaagattgaaaccttttatggacagagtcactattgtaaggaacaattattgcaacatggataaagtgttagacgaactttccattgataaagtagatggcataatgttagacttaggagtttcttcatatcagcttgatacagctgagagaggatttacatacaatgtagatgccaagcttgatatgcgaatggatcagagacaggaagttacagcaagagatatagttaatgattatagtgaatatgatctttacagaatcataagagactatggagaggacagatttgcaaaaaatattgcaaaacatatagttgctgccagacaaaaaaagcctatagagacaacatttgagctaaatgaaataataaaggcagccatacctatgaaggtaagggcaacaggtggacatccatcaaaaagaacatatcaggctataagaatagagttgaacagagaacttgaggttcttgagaattcgatagatatgatgatagacaggcttaataaaggtggacgcctgtgtataataacttttcattcacttgaagacagaatagtgaaggtcagatacaagaataatgagaatccttgtacttgtcctccaagttttccaacatgtgtttgtggcaaaaagtctaaaggaaaagttataacaagaaaacctattattccatctgaagaggaattagaggagaacagcagatcaaaaagctctaagcttagagtgtttgaaagagcataaggggaggtaagagtgaagatgagtaattcaaagaaccgtgtaagcgtttctggtaagatgtatggtaaggcatatgaatatggaagtgtagcaagacagcttaatatgaatgcacagcctcttagacgtaacgaagaatcggaagagtcaagagaacaaagacgtgcaaaacagaaacagatcagacacaacaataagattaatcttatgtatacagttgttgttgcaacagttgcatcagttgtattttttatatgctatcagtatcttaatgtccaggcagcagctaaggttaattcagataagataatagagttaaaaagtactttgaattcacttaaagacaacaatgatgctcttgaagctgatatcaatgcaagtatagattatgatgccatatatgatacagctgtcaatgatcttggaatgatatatccaggtaaaggacaggttattacatatgactcaaaggaaagcgaatatgtaaaacagttcaaggatgttccagaagctggtaaataactgatttacagttatatagtaatgatgaatataaatatcagaatattaagaggtacttatggcagatagtgaacagttaagaagaaataagtacagaagaaaaagagtgatgttaaaaagagtccatgtcaggggcaaggttgcgcttggcatggttgttgttatattgatagttcttggtggacatgtgtttaagataaactatacacatggtgatgtgtatgcaaaagcggtattagaccatcagacatatacttcaactgagcttgcatataaaagaggacagatacttacaagcgatggtactgtgcttgcgtatagcgaaaaggtttataatcttatattagatgttaaacagctgctttcagatgaagaatataaagaaccgacacttagtgcacttacaagatgcttttcgcttgacagaagtgagcttgaaactatagttgcagccaatcctaacagccgttatcagaagcttttaagaaatcttaccatggatgagatagaagagtttaagaatcttatgaatgataagacagaaggaaaaaacattaagggtgtatggtttgaggacagctatttaagaaaatatccattaggcacatttgcaagtgatacgataggctttgcaagtgccagcaatggtggtgaacttggaatagaaagccagtatgatgatgaattgacaggaactaatggaacaacatacagctatgttgatgatggactagaggttacagaaacacagaaggctgctgtagatggaaataacattgtaacaacgatagattataatgttcagtctattatagaaaaatgtattaaagaatataacgctgaaaaaccatcaaagaatacagcagtagtagttgcagatccatctaacggggatattcttggaatggcaagttatccaacttttgaccttaacagtccaagagacttaagtggtgtgtatactcaggaacagatagataagatgtcggatgatgattataagaatgcattatattcattatggacgaactattgtgtatcggaaagttacgaaccaggttcaacctttaagccggttacagtggcatcggctttagaagaaggcgttgtaaaggatggagatacttatacatgtaatggatatgaaatgataggacctgacaggcttaagtgccatgtgtattcatcaggtggacatggaacgattacagtagagcaggctgttatgaattcatgtaatccatatatgatccatcttgccttagaacttggtaacgaaaagttttcagcatatcagtcactttttggtttcggtaaaacaacaggtatagatcttcctggtgaaacaatgggtattgtatatggaaataagatgacaactatagatgctgcatgtaactcatttgggcagactattaatgttaatatgatgcagatgatgtcagcctactgttctattataaatggtggaatgttatatcagccacatatagttaaaagaatagaatcagctaacggcgaggttgtaaaagaaaacaaagctacgcttgtgagacagacagttactatgtcaacatcaaagctgttaagaagatatcttaagagcacagttgaaacaggaacagctaagaaggtagctgttacggggtattcagtggctggaaagacaggaacagcgcagaaatcaccaagaagtgagaataagtggcttatatcatttataggacatgcgccagctgataatccaaagtttgctatatatgtaataattgatgaaccagatggaacgacaggaacatccggaagctcagcagatgttcttacactttcacatgatatactagaaaagcttcttccttatatgagtgtttacaaggattcattagaaccagaaacagatacaggcactgcggaagatgaatatacagtggatggtgtaccagagggttctatacagaacacagcaactgaaaacttacagaacatgccatcagttaactagtaataataagtataagaataaccctgagtgaacttacatatgaataaagtaagtttacacagggttattgtattatatgaaatcaagaatagagttaaatgaagatgaaagatattctttgtatgtaagaacgaggcacagaaaaaagctgctgaccataataataagtcttattataatcatgtcacttcttacagtccgtataggatgtattatgacggttgaggctggctattatagcagaaaggcaacagaattgcacgaaagagagcgtgcgataaaggcaatgagaggccgtatacttgatgctaatggaacagtgcttgcagataacaggacagtgtgtactgtgtcagttatacataaccagataaaagaaccacaaaaggttattgagatgttgtgcagtgagctgtcagaagaagaggagatgataactaaaaaggtaaataaaatatcatcaatagagattatcaggacaaatgttgataaagaaacaggagacaggataagggagtatgattatgaaggggtgaaggttgatgaggattataaaagatattatccatatgacactctggcatctaaggttatagggtttacaggaagagataatcaggggattgttggtcttgaagcaaagtatgatgcctgcctgtcaggagatggtggaaagatactgacacttacagatgcgtggggaagtgagcttgagggtaaaaaagaaggaaggcttgaacccaaggcagggtgtgacctttatacaagcatagatataaatatccagatgtatgcacagcagcttgcagaaaagacacttgttaaaaagggtgcaaaaagggtatcgataatagtcatgaatccacgtaatggtgagttatatgcaatggtaaatgctccggagtataacctgaatgatccatatacattgaattatgatgatgaagacacaactggaaataagatggataaactaaataatatgtggagaaatttctgtataaatgatacatatgaacctggctcggtttttaagatggtaacagcaacagctgcgcttgaacttggtgttgtgagcctgtcagatatgtatacatgtggtggttcaacaacagttgctgatagaagaataagatgtcataaaacaacaggacatggaacgcagacctttacccagacagtaatgaactcctgtaatccggcattcatagaatgggggaggcgtgtcggtgtagataatttctatacatatattgataagcttggattaacctcaaagacaggaattgatatagcaggtgaagcaggtactatcatacataagaaggaaaacgtaggagaggtggagctggcaaccatgtcgtttggacagtcgtttcagataactccaatgcagatgctaagggcagctgcagcaattgtaaatggtggtaatctggtaacaccacattttgcaatcagaacatgtgctgctgataaaacaacatacagcgagttttcatattcgactacacaggaagctgtaagtaaggaaacaagtgatacgatgaaggatatattaagacaggttgttgaagaaggtggtggaaaaaaagcatatattgaaggcttttcaataggaggaaaaacagctacttcacagaagcttccaagaggttcaggaaaatatatagcctcttttataggtttttcagatgtgacggatccttctgttatagctatgtgtcttatagatgagcctcagggcgtatactatggaggaacaatagcagctcctgtcataagagagctatatgacaatatattgccgtatatggattaaatgaatactttacatatgtaaatgcttagagtaaaataaaataagctttttaatgaatagttagtctgcattatgtgcaggcagataggatgagtgattatggatttaaaagacaaaaaagtaatggttgtaggtactggaataagtggaacaggtgccatagatctccttaataaagtaggagcagactgtatcatatatgatggcaatgaaaagctttcaacagaagatgtagtaaaaaagcttggtggtaataaagcacagattattataggacagcttccagaaggtataactgataaggtggaacttcttgttataagtccaggcgttcctatagacagtccgatagtcgaactgtttgaaaaggctggtgttcctgtatggggagagatagaacttgcatataattatgataaaggaaaaatagcggccataacaggtactaacggaaaaacaacaacaacagctcttgttggacagataataaaagcatacaatgaaaagacatttgtagtaggcaatataggtaattcatatacaggtgaggttcttaagacaacagaggattcatatacagtagctgagataagcagcttccagcttgaaactgtacatgaattccatccggttgtaagtgctatcttaaatataacaccagatcatcttaacagacatcacactatggaatgttatgcacatacaaaggaaagaatagcaaagaaccagaataagagtgatgtatgtgttcttaatatggaagatgaagaattatacagattcggtaaagaatgcagcgcatcagttgtatggttttcaagcaggagaaaaccatgcaaaggtgcttatcttgatgggaataacataagatatacagatggtgtaactgataagataatgctaaatgtccatgatatgaatctccttggaacacataattatgaaaatgtgtgtgcagctatagccatgacaaaggctgtggggattccggatgatattataatagaacagataaagaactttaaggctgtagaacacagaatagaatatgttgctaccaaaaatggtgtatggtattacaacgattcaaagggaactaatccggaagcttctgttaaggctatagaggctatggtaagacctacgattctgattggcggaggttatgataaaggctcagagtttgatatgtatgtaaaagcctttggtgataaagtcaaaatgcttgtgttacttggacagacagcacataagatagcagaaacatgtgataaatacggctttagcaactatgtgtttgcagattcactaaaagaggttgtttcaatatgtgcaaagaatgccaaggatggtgatgctgtactgttatcacctgcatgtgcaagctggggcatgtttgacaattatgagcagcgtggagatatgttcaaggaatatgttaacagtctttaataaaagaatatgatgatataaaagaggaaaaatatggcaaggaagaagaaaaaaagaaagaatggattctattttgattacagtcttttatttgttcttatattcatagttggctttggacttactatggtatatagtacgagttcttatactgcccagattaattatggtgacccggagtattattttaagaagcagcttttttttgatgtcggcggctttgtgatcatgctttttatagccaggtttttagactatcatgtgcttaaaaggtttgcaccttatttatttattatggctctgatttcggtagtggctgttatattttttggaaccgagagtcatggtgcaaaaagatggatatatattggccctataagtatacagccagcagagattgttaagatagccgttataattatgactgcagcaagaatgtgtgcagcaggaactaaaataaagacattatcaaagaatgcaaagatatttcttggatgtgccctgttacccgcaggaatgatccttgttataacgtctaatctgagtagtgccattattatatgtggaatagtatttataatgtcatttgtagtatatccaaactatagattacatggttctttgaccgcacttatagccataggatatgttggtatacgtgagtggttaaagaaagcagtggaagctggtacgcagatgaaaggaagcttccgtcttacaagattgtttgtatggattaatccagagaagtacatagatgataaaggttatcagactatgcaggggttatatgctataggttctggcggactttttggaaaaggacttggaaagagtatgcagaagcttggcttcatacctgaatcacagaatgatatgattttttcaatcatttgtgaagaattaggcttatttggtgcgatatgcgttatacttttatttataataatgttgtggagaataatatatatttcacagaattcgccagatctttttggctcgcttctggcagttggtgtgtttgcacatatagctatacaggtgattataaacatagcagttgtaaccaatgtatttcctaatacaggtgttacattgccatttataagctatggaggctcggcgaccatattgctgcttgcagaacttggaatagtgtttaatataagcagccagattaacctggaaagatagaagtataaacaggctggaatggaaattaatatggcaagagaaagaaaaaaaggaaaaggttttttgacagcttttattgtaatgtttattcttgttgcagtggggattgcggtatatataggctttcaggcggaaagtataacatatgctggcaattcccattattctgatgaggagatgaccgaaaaaatatttggaaaagacaagcctaatgtattactttataagctgtttggtaataaaaaaaagacaataccatttatacagaagtatgatgtggaaatacaatggccaaagaaaatgtatataacagtatatgaaaagccagttattggttatataagatatatgggatgtaatatgttctttgataaggatggcatagttgttgaaagctccacagaaagttatgataaggtccctgaaataatagggcttaagtttaattcgatagttttaggttcaaagcttgatgttggtgatgatgatatattcaggcagatacttgaccttacacaaagctttgataaatatgatctggatgtatcaaaggtatattttgattcatctgataatttaatactgtatattgaagaggttaaggtgtatcttggaaatagtgatgattatacggacaagctttttgaactgaagcagatggaaactaaattctcaggcttaaagggaacactttatatgcaggattatacgaaagacagcaatgcaataatatttaaaaaagatgagaaatgattcctgaaattctggtattggcatcatactattatagaatgaacaaagattatgaaaattgtgaataaaaatataaaaattagttgatatttgttgtgaaaaattatatgattataaatatgtataagtatagaaggaggcaataaccttgttagagataatagaaaacgaatcaaatttatcagcaaagattattgttattggtgtcggtggtgccggtaataatgctgttaatagaatgatagatgaaagcatatctggtgttgaattcataggaatcaatacagatagccaggcacttcagttatgtaaagcacctacagctatccagatcggtgaaaaacttactaaaggattaggtgcaggagcacagccagagattggtgagaaagcagcagaagagaatgttgaagagcttacacaggctattaaaggtgctgatatggtattcgttacatgtggtatgggaggcggaacaggaacaggtgctgcacctgttgttgccaagattgcaaagcagatgggaatacttacagttggtgttgttactaagcctttcagattcgaggcaagaacacgtatgactaatgcagaagctggcatagaaaagcttaaggaaagtgttgatactcttattgtcattccaaacgataagcttcttgagattgttgacagaagaacaactatgcctgaggcattaaagaaggctgatgaagtgttacagcaggctgttcagggtatcacagatcttattaatgttcctggacttattaatcttgattttgctgatgttaagactgttatggtagacaagggtgttgctcatataggtataggttcagctacaggtgatgataaggccattgaagcggttaagcaggcagttgccagtcctcttcttgaaacaactattgaaggtgcatcacatgttattattaatatatcaggtgatattggtcttgttgaggctaatgatgcagccagctatatacaggagcttgccggtgacaatgctaatattatttttggtgctgtatatgatgaaagcgctacagacagctgtacaattacagttattgctacaggtatagagggtgttaacgttaataatgccatggctaagttttcgccaaaagcacaggcacaggttcagacaccaaagccagctgtaaagccagcatattcttaccagcagccacagtctgtggccggtatgggtatgagttctacaacagctccacttccaggtcttaagcagccaacacctgttacaagcaatgtgaagtctaatggaattacaattcctacatttcttcagaagaacagaaagtaatacataaacagacgcagtagtcttataataacttatatatggcaggatagtgtatgattgatttatatactatcctgtttttttatgtttatacttatgacgacacaatgaaaagcagcagacttttatcttaaattttgtatatggctccttactgcgacaaattttgcacataactttatgtatactcttcttgttcgctgatacaggatgttatacataatcctgtatatattgcgtaaaggaggtgggaatggattgtaatatatatagatatattgtttgggattaattattgcatggatctggttatactgcttattgttaacagaattatgcgttatcatgcatctgctatccggctgctgctttcttccactttaggagcagtatggtcagttgctgcagtgatgattcctgacagatataggctattcgttaatttatgcacatattttattgttacagctcttatgcttgctgtgataaatagtccattaaatatcataaaagcacgacaaagtaacaaggacaggtatgctttaacaaattatttaaaagaactgtttaagggtatgattattatgctgtctgtagcatgtttttcaggcgggattatgcatatgatagtatattatacatatgccggctggataataagacgtatattagttacttacaatcagcttatatatcttatactgatatccgtagttgttataatagtgattgccagagtgtatagaacctataaaaaaaacagtgacatatacaaggttactgttatagttgacaatcataagattatgcttcacggaatagtagataccgggaatcagcttacagataagtatacaggtaagccggtaaatgtgatggataaatcatattttgaaaatgttctttatcagataaatgattacgggagattaaagtatcattttataccatacagaacaataggtaataatgaggggatcatagaagttattacatcagattatatgtacatatcaggaaaagatgaaacgaaggcttataaaggtgcactgataggactttcggataggaaagtatcacaaaacggggaatatcaggcacttataaatggacgtatgatttagcgttaatgcaaagctataagagaggatgagtttttgcattacaggatggaaatatgtcagcggtgcattcgtatttctataaaagtaacagcaccgtagaaaagaggagagaaatggtgattaaagtggcagttgcggatcgtttccggtttaagatggtaccatctataaaaaatctatatatgttaggctcaaaagaggttcattatataggaggggcagaggtgttaccagcaccgcttgatacagatgaggagaaaaatgtattggcgatgttaaaaaccgaggatgacgattatgccaagaaaatgctgatagaacataaccttcgtcttgttgtatatatagcaaaaaaattcgataatacaggtgtgggagtagaggatctgatatctatcggaacaataggacttataaaggctattaattcatatgatcgtgataaaaatataaagcttgctacatatgcatcaagatgtatagagaatgagattcttatgcatcttagaagaaacagtaaaatcagggcagaagtatctatagatgagcctttaaatgtagactgggatggaaatgagcttttattgtcagacattcttggcacagatgatgatgtgtgttataaggatcttgaaaatgaggtggaaatgaaagcacttaaaagtgcacttggcaatctgtcagagagggagagaattatagtcgatttaagatatgggcttagcgacaaagatggagaagaaagaacacaaaaggaagtagcagatatgcttggtatatcacagtcgtatatatcaagacttgaaaaaaagataataaaaagattgaagagggatatggtgagggcgtgttgaaaaaattaacatcagatatataaaaaaatatcaaataatataaaataatataacttttgcttgacattccaggctgtgtccatgaaaatatagaggtatgattagtataaggggaaatttgcccagtataggagagctatcaacattatataaagatatggaaaaaaggtaatatgaaaaataaaggtacaggaatacagtggcatagaatatttggaatagcggctttaatgtctgttatagtttttgcggttatgttatatatggactttggaacttcaataaaatcaatggttggtattggaagtgataaaacaaatgattctatatcagaagaaccaagtgacaataccgaatccggtaatgatacaagtggtaaaaagaaagatatatcaggtaaagcaatcgtatgtatagatgcatctcatggaggttctgatacaggacagtatgatggaaagaattatgagaaaacacaggtgttagagctggctggacttgttgaaaaaaatcttgctgattatggagttaaggttattatgacaaggacaacagatgagaatgtagattatacatcacgtattaaaaaaatcaatacaggaaaagctgtagcaacagtatcactgcacagggatgttgctaagaaggatggaacaggcagaggtgtcagtgcgtggatatatacatcatctccaactgattcaaagagccttgcttcagatattatgaatgtgtttaaagaatctggtgaaacggtaggtggggtgaatacgggtactccaaatgattcatcaaagaattactatattaatcagcacagttcatcagcaagctgtataattgaacttggaaatatgtataacagtgatgacaacaagcttgtaaaaactaataaagagaaaacagctaaagcaatatcagatggaataataaaatacttagaacaggcaggttatattaatggctaaaattaatcagaaaaacataagaaacttttgcataatagcacatattgatcatggtaagtcaactcttgctgacagaatcatagaaaagactggacttcttacaagcagggaaatgcaggagcaggttcttgataatatggatatagaaagagaaagaggcataactatcaagtcccagacagtaagaactgtatataaggcttcagatggcgaagaatatatatttaatcttatagatactccaggacacgttgactttaactatgaggtgtcaagagcacttgcagcctgtgatggtgctgtgcttgtagtagacgcagcacagggaatagaagcgcagacactggccaatgtatatcttgcactggatcatgatcttgaagtatttccagttatcaacaagatagatcttccaagtgctgaaccggacagggttaaagatgaaatagaagatattataggtatagaagcccaggatgctcctcttatatcagctaaaaacggtattaatatagaagaagtattggaacagatagtaacaaaaataccagcaccagaaggggatccttcaaatccgctctcagcacttatatttgattccttatatgatgcatataaaggcgttatcatatttgtaagaatagtcgaaggtactgttaaaaagggtacaaagataaggatgatggcgacaggtgctgtggaagaggttgtagaagttggatattttggagcaggacagttcataccttgtgatgaactatctgctggtatggttggatatattacagcaagtattaagaatgtccaggataccagagttggtgatacagtaactgataatgacagaccagtagcagagccacttccaggctataaaaaggttaatcctatggtttattgtggattatatcctgcagatggtgcaaagtatcaggatttaagagaggcactagaaaagcttcaacttaatgatgcatcactacagtttgaaccagaaacatctatagctcttggatttggtttcagatgtggctttttaggacttctacatcttgagattatacaggaaagacttgaaagggaatataatcttgaccttgttacaacagctcctggtgttatatataaggtccataaaacaaacggagatgtcatagatcttacgaacccatctaacatgccggatccatctgagattgattatatggaagagccaatggtaagtgcagagattatggtaacaacagaatttgtcggacctatcatgaagctttgtcaggaacgccgtggtgtatacaatggtatggaatatatagaacagacaagagcacttcttaagtatgatcttcctcttaacgaaataatatatgatttctttgatgcattgaaatcacgttcaagaggctatgcatcatttgattatgagatgaagggatacgagaggtctaatcttgttaagcttgatattcttatcaacaaggaagaggtggatgcactttcatttatcgtattcgcaggcagtgctgaagaaagaggacgaaaaatgtgcgaaaagctcaagcaggagataccaagacagcagtttgaaatacctatccaggcagctattggaagcagggtaatagcaagagaaactgttaaggcacttcgtaaggatgtacttgctaagtgttatggtggagatatttcgcgtaaaaagaagcttcttgaaaagcagaaggaaggaaagaagagaatgcgtcagattggtaatgtagaaataccacagaaggcattcatgagtgtgttgaagttagatgaagaataaaaacgaactggggatatatatacatatccccttttgtgtacataaatgcatatattgtgactttctttcatcgcctgctgatgaaaagacaagaaaaagatatgttaaagcgcttataagagaaataaatctggcagcagaaggtaaggcaaatagctgtattaataagtgcaataatgaaagtaataaccatggtaaggatatagttacatctatattcataggaggaggaacgccatcagtaatagatgcttctgatataaaagatattattgaggcagtaagacataattataacgtcagtgatgaggcagagataacaatagaatgtaatcctggtactatggatgaaaaaaaggcagctatatatcgtcaggctggcataaacagaataagcttcggattgcagagtaccaataataatgaattaaggatgcttggaaggatccatacctatgaacaatttctggaaagcttaaggatagcagaagaggccggttttgataatatcaatatagatcttatgtctgcacttccaggtcagagtattgaaagctttaagtctgtgcttaacacagcgatatcactagagatgcagcatatatctgtatatagccttatagtagaagatggtacagcactttcagaaaatattgataaatatccacagattccatcagatgaggaagacagggatatgtatcatatgacgaaggaagtacttgcagcagctggatatgaacaatatgaaatatccaattatgcgaagaaaggatatgagtgcagacataatataaagtactgggagaggtgtaactatattggttttggaatcggagcagcttctttatatgacaatataagatatactaatatttctgatataaacagatacatggacatattactaaataacgaaaacaataaagattattgctgttatgaaaaaaataccagacaatcagatgatgtgtggctgttaaggatggatgtggaagagctgtcaaaggaagatgagatgtcagaatatatgtttcttggcttaagaaagactaaaggcatagatattaatgattttaaagagaagtttggctgtgatatatatgatgtatatgacaaacagataaaagataacatagctgctggactgcttgtaaaaaatggcgattacctatatctatcccagagaggaatagatataagcaatacagtcatgtctgattttatataggtttgaactgcataagaaaatgtcgtggagtcagtccggtgaatgacttgaattcccgctggaagtgagcctggtccgaatatcccagtccggatatatatccgctgttattctgcctgcggtctgataacatattgtataacacattctggaaacgtataattttacagtaatctttaggtgacatgccaagtacttcgttaaacattctttgaatatgtctttcagaataaccaaggcttgtggcaagctcagatatgagtatattgccataagctttttttatgatatctgtgagagttatcatattgtcaggaatatagcagcattgtttggcattttcaagaaatgccttaaacatatgtatgtgtttttcaaagctgcagcttgttttaaaatcttctataagcttgtattcatatgagccttctgaaggagaatattcgtatacttcccctgtcatgcctgaagggtaagtgtcagcattgactccttttgcatagtaggaatatgtatcatcaaagcatacgccaaaataatgttcatagttaccaaaatcataagtacattttttaaccacaggtccaatacagtagaatgatgacttgttatctgtatggttatagcctatgatccattctgtatgggtagatggaacaagaacagagtacattgaatttataatatttgctgaagtattactgactgattcatatatatacatattttcatggactttagttgtaccatatttgtttattttagttaatgatttagtctggatatcaatgtccgggttaaataacatgggctggtatatgtgattgttcatatgtaaactccttttgctgcttatgttaaaaatagaatttataaaataataataaagcaaatattaaaaaagtcaataaatatgtctgattttttcaataaatattaaaaaatatatgtataataaacaacataattgaaaaacaaataacacaaaggcgtgtgattactttattaaataaagtggttgcatgtctttttttattttattacgtcgcgggtaattcatgtgttattctgtatttcagttgtcttatgaaaactgatcaacttcattagacttccaagaaaagaattagggaggaaaaggttatggcagtagaacagataactaacttgataagtgagcagacatttggaatctggttccttatcggtgctgcactggtattctggatgcaggcaggatttgcaatggtagaaacaggcttcacaagagctaagaacgcaggtaatattattatgaagaatcttatggatttctgtataggtacagtagtattcatagtgataggttttagtttattacttggtgaagatttagcaggttttattggaaaacctggatttgatatatttacggcttatgagagttttgatttctcaagctttgtatttaacttagtattctgtgcaacaacagcaacaatagtatcaggagctatggcagaaagaacaaagttcctttcatattgtgtatattctggagttatatcagcacttgtatatccaatcgaagcacactggatatggggcggcggctggttagcacagttaggcttccatgattttgctggttcatgctgtatacatatggtaggtggtatttcagctattataggcgcaaagatacttggaccacgtattggtaagtttgtcaaggatgaaaaaggaaaggtagtcaaggtaaatgcgtttcccggacacagcataccgcttggagcgctcggtgtattcatattatggttcggctggtatggcttcaacggcgctgcttgcactacaatcgaagatcttggatcagtatttctcacaacaacaatagcaccagctgtagcaacagtagcatgtatgatatttacatggattaagtataaaaagccagatgtttcaatgtgtcttaatgcatcacttgcaggtcttgttgctataacagcttcttgtgatgtaactgatgcaaagggtgctttcgttattggtattgtagcaggacttcttgtagtatttggtgtatggcttcttgattataagctgcatatagatgatcctgttggtgcagttgctgttcatatgatgaatggtatctggggaacaatcgcagttggtctttttgcaacaagcaaggcacctggatatgcaatagctatggaaaatggtgctatcaaagcagaaggcttattctttggtggtggcttcacacagttaggacttcagttattaggttttgtaacagtagcagcatgggcagtagtatgtatgacaattgtattccttgctattaaggcaactatcggacttagagcttctaaggaagaagaaatcaagggacttgatatatgtgagcatggtcttacaagtgcatatgcaggttttgaattcggtgcagcaggaatgccggatatagatataacatatgatgatgttgtatcagttggttcagaatccgttgaaaatgcagtaccagctatggttaagacatctgatataccggatgataagaagattactaaggttgaaatccttatgaagcaggaaagattcgaggctttaaagaaggctatgaacgatatcggtgtaactggtatgacagtaacacaggtgcttggttgtggagcccagaagggtgcacctgaatactacagaggtgttcagatggagatgcagttacttcctaaggttcaggtagagatggttatctcaaaggtgccagttatggatgttatcaatgcagcaagaaaggtactttacactggtcatatcggagatggtaagatattcgtatatgatgttgaaaatgtagtaaaggttcgtactggagaggttggatatgatgctcttcagggtgaagatgattaaaatattggattagagtttataaggtgtggatgccagagaaatttggtatccacacctttttgcgtcttatatttgtttttgagacaataaaaattatatgttagattaagttggcctatagacgattgcaaaatggataaaaaaattagaaatgcggtttattgaccgctggggggaatagttaattgtatgattatgaagaaggaggagagtatttatcagatacgaaaactacattaacagtgttggtctatgagtatttgaaaatgttggaaatttataaatgattgtataattacttggtatataacaagtagggaaaagatatgagaacggataagataggtattaatatttcaaggttaagaattgaacgtggaattacgcaggaacagcttggaagggatattggactgacagcttctgctatttcaaatatagagtgtggcaggagtgtgccatcagtggatactttgtgcaggttttctgagttgtttggggttaaggtcgacaccatattatctgataaatctgactcagacctgaataagcttgaaatggaagaaaaacttgttactgttgacagatatttatctgaaataaaagagatatcggctaattacagtataggtcatagaaattatgagattagcaggaaaggaggagaaatagtttataaagcatcatcaaaggaatagataaaatgttaaatatgaggaggaaaacagagtgcacagatttattgaatggataacagatttaattgatgattatggggaggcatttatagaagccccattaaagacattatctaaaacagtatcatggatatttagtatagtaataggtgtaatgtcagtggttgcatatattaagttcatagcaggtggcggatatccgcatgcaatagcaacaatcaagaactcagaagagggattttttgctggtgttggagatacatttacaaatggaacagtacatatagtagctaataacggagtgtataaggcacttgggataatatttatagtccagatagtacttgcactgataatgcttttctttgaaagaaagatatggaaatgggtacttgcaataatagattttatattaatagctgtttctggaatatggttccttattaaatacaatcagtataacaaattgtacgctacgcttgagaaattatatgataatgaagaaatagatgaagttggattttcaaatgctgttgataaatggattaacagtataagagataacatcaagatttttgcaataattgctgcagttgctgtggtgctatttattgtggtcatgatgataagtgagggtagatgtgcaatattttcatttgcaaagagtgccgcaattacatgtgcagccatgcctcttgcaattctgatattggaaaatataattggattggcaattggacttgcgacaattattgtaataggaataattcttctcataatatgttcatttgctgacggtggttcagattcatcagtagctactgaagcatttgacagagcgggaaactttattggctggtttcatagaaaataatgcataaaacataaggagatacattgtgaagaaaaaaataataattggagtatcagcaacggtaatagttattgcagcaatagctgcaggcgttataacgggtgtttcatcaaagaagaaaagcagtaatgatataaatgtttcgtgtaaggcagtggtgactaaaaatgatgatataacatgctatgactggcttaagaagttatgcaacaagatgggtgttgaagcagagaattacagaaaagcggctaaggaaaatggttatattacagatagtgatgaatttagtgatgacgacatagcttctggtggatttatggcacttacttcaatgcgtgcaatgggcgaaggcaaaatgcagatatatcttggaactgatgatgaaatatcagataataccaatatagagcttgcaattaataataacctgatagcagaagattcgcttgatagaggattttgcgaccaggaggctgatggtattcttgataaatttgatgatttatattatggagaattctggcctgaagatattgaaaatgtttcttataaagaaaatatttctcagcttcagttttttgatattaaagattataaagaagatgaaaatattatatatatagatgaaagtgcagctaaaaatctgaaaaaaggtgacacatttgtatttgattatatgggcgagaaaattgcaaagaaaatcgttgaggatatgggaaatggtacattttcattggaagaccctgagatagacgaggtatttaatactcttatagtttcagattcggcaagcataggaattgacgatattattagttactatggacttgataatgtgaaggtgtcggctggaaagcctgtaactatgctgacagcagatgtgtctggtaatatccattccaagggattctcaatagaggcagcggtaaatgatgataatgaacttgaagttacattgacagataatgatacggaggcagaatacgagcttcctattaaacagaagcttaataaaaaatgtgagaatttctctataaaatgggatgttaataatataaatgtaggagcacaggttaaatatactcttaagagtgggttaaaatatgcatctgtaggtgttgatattgattcagagatttcaggagaaatcggagttgaaggtgatttttcagatggaatccttttatgtcagacacctgcacttattggtagtaatcttgttgcagtaaatgtagcgttatatattgttccagcagtagatggttcagttaatcttaaagtagaagtgccatattatgcaggagtatcatatgaaaaaggaaaaggcgtgaatggaacaatggggcttcgttcatctatgcagacatcaattgaggcagaaggaacaatgggattgtatttcaggacagcaccaatgcttgtaacaatgaaatccattccgttgttagatgcagaacttgatataggtgcagaagcagaagcaacacgaactggcagaccaaatgggcagatatgttctgatgttaatgttaagtgtcctgtttttataattggagttggtgatgaaagtgttaaatataagaataagaaatcacttctttgtacaatggatataagtaagagttgtgaatttacatcatttgcaagaagcaaatcacttcattatgaaagacttgctgatggcacgaagcagtttgtgaaggaatgtacatataatgagcagccagaagatgataagccaaaggaaagtgagacaagtacagaagcaacaacacaggagcaggtaacacaaggaacagatgtaaaagaatcagggccgcttcatacatataagacgagaatggcagaatatttcccggagcagacgacattttattttgactatccggataattggacagttattacggaaagggtcggcaatgatggggagtacattgtattacagaatgaaaatggggcaaaagtgtgttacgatgcaagaccatatatagttgataaatctatgtataattttggacaacagtacacaagtgcagctatgagcagaatagctaagtcaagatataatccgggaaatgatttctggattgtgaagattaagaatacaagtaattttgatgcactaacaggtcagacaattacatatgaagatggtgcagagatgtatgcggtaacatctgctgaaaaatcagttggagataaatttgattatataagtgctggatattctatggcgtttatgtttgaatgccctaattcagcaggatttagatcagagccaagtgctaaacttacagataaagacagagaggaaataattgcaatactacagtcgtttagagatactccttagagacaatttgtgatataatcaacctaaattatcaggtcgtgaaaactaaagataaagacttgagggaagggggattatgaacgaatttaatgacaacagacaggtgtattctgattcgataaggggaacatatgtaatatttcccttaaagtatgaaagtagtcttaacctaacagagcttactattgatggggcagaaaatgcggatttttcatcatatgatatgtcagatattcttgcaagaagatgtaggaaagaaaatggttttgtcagaagatacattttaaattcatgcattgatgatgtacatttttcagatggtaaaatattggcagttaatgagagccagttatatgtatttaacaacaaaatagcatttttcacagtgcttgttacatatgacaatgctgacgcgggttacattgataagctgattaatccgggttatgtacagaattacaatcgcagttttgaagaaaatgtaattaaaactgtaagtaatatttcaataggtggggtcagtaatatattcagattgtatgttgatgatatgaaactggcggtgaaagagacatatctttttaatgtggcacttgtaagcaggcgttttaatgagttggaaactattgaaagaattacatttaacgaacataaattaatagacatttcgcgtgatttttcggatccttcagaaaaggatgtagcatatacatacggcgcgaaggatactaatatgtgttcatacagatggggagcctgtattacatcacagtcaatatcatatgtgtatgcaacagatgttatgacagtggcaaatgttgcagagcagtcaagagatgatgtatttcttacaatgctggttttacaccagaaaagtacatgcatgctggttaatgaaggaattcagaatactctgattgacaataaacgtcagagtcttaagtatttcagaaaagtgaaaatgcttaaaaaagaagcgttggaatttcgtgcttcaggtacgcttgcatcatcgcaggtatcacgctggaataatgtctgcgaaacatacagatgtctgttagtcgttaatggaattgatgaagcacttgaagaaatcgagcagaaggttgaactcataagagacgaacaggagaggaaatcttctgacatgcagaattatgtggcaactgtcatagcagtatttggcttaatttcaattgttgcgtctgtattatcgatagttgatctggtaaatagcggttcaacagacatagtagcagctcttggtgtttcgtgcataggagttgtattgtttgtgttctcgtggttgattttgatgttgaagaaataatggaggattattacaatgggtatgacgaatgacattgataagattagagaaattactggatatgagccggggaaagcgtttatttatggttttaatgaagatggtagagtgcgtagagagtgtgttgaaacctatggagtggatactccaggagaaccagtagtttatgacacgagaactaaaaattttcatattttccccaattctatggaaattactgatgaaattttacagagtgaggcagatttaagactaaaagtttataattattttattgaatactgcaataataataaagaaacttttgatgttataaaatatgaaaaaagtagaccttctgaaaatgcaaggtctaaaaaattacgaatatctgaagaaatgcatgataaaatggtgatagataaagtagttgattgtaaaaagggagaaggatgcggtaaaaataaagtaacgagaggcttatataaatatttaccattttattataatgggaaaatatataatatcaattttatgagattttatatagataaagataataaggttaattgcatttttaaacaaatacaatttgatagaacaaataaagaaaatatcaatgaagatggcatttgttatccgaaaacatatcaaaatcatgtaaataaacttgataagcttattcaggataataaaggaaagaacttttgttataatccacctgtagcatatgaagctaaagaagctgaaaaagctgtagaagaaattgtaaaaaaatttgttgaatttgtaaaaaaatgtgaggaatatgatacaaaatagtattgtatgtacatcaaatatatttaagtaaaacaaaataataaatccaaaaggcgaaaaaacccgacctctccgacattataataaataatagacgagaggtcatcttgtctgaacacaaaacaccatataaaagagagaagaacagccagacgaaaggagcttattaatgaaaagaagaaatcaatacataagtcagcttggaataccaagaaaagtgtatggtggtaattttattatagagaaaaagccgtacagaatgtgtcaaagatatcgatatggatttgattatcgcgacatttttaatatggatatgtcatttgcagaatggttatactcacatatgcgaatgtataaggataatagtgttcatgatgatactatggctactgtaacatttaatggcaaagaatacaccatacaagaggcggtggattggattattgaaaatactggggaatttatcaggtatggttattatttggatacacattttgattacataacaagatatcctcttatcggggaaatgatgagtaaatttaatccggctgtcagaatgtatttacaggagtatgaatggcttgaagataatgagtgtcaaataacggataattttattaaggcaggcggactatttattgagataatgcaatattgctggttgtaggaaacaatgtctatagataaggagaatcacaatggcaattaaatttaaagagataagaaaatttctggcaagaaacacaagattatcaatctgctttgaagatggggattatcataattatctgttgatatctgatattccgtctttggaatatgatgagttatatgtttatggagtaggaatgactgatgtggagttttcgctggatatttattcagaaccagatgaaataaatagggaagtaactatatctggtaggggttttacaatgcagccggcgatagagatagtattatctgataagccacgggatattgaaagaaacatttgtgatagtctgacatttaaagatttaaagccttatttacagattggcagatggtttaatattgtcaataagctggactggtcaggtgaatcatatgagtatagaaaaaacatttcagaaaaatatgacagtatgtatgtgtatggcataggaatggagaataaccctgatttagaagaaacatataaagaattaaaatatgacactcatcttaagaaaagaatggtgctggtgctttcagacaaaccaagacggaactaaacatagaaaaaatacatttgaacatagcaggtaaatgtgaaaaagaggtggacatatatttatggatattacaatagatgataatagaaatgtatatgtggtttcggatattcataataatgcagatggatttaaaaggctgttaaagaagatacagtttaatgagaatgatttgctgattattgatggagatatatttgaccgtggagataagccagttgagctgtattttggaatattaaaatatcccaatatacaggttatacagggcaatcatgatgtctgggttgcaaggcagattattgaacaattcggacatagaaaatctggagaatatatttcttataatacggtgtctattatggagaagcggctgacacctgttgatatgctaagacttgctgaatggatacaggaaaagccatattatattaatctgaccattaatggcaggaaatatcagatagcacatgcacagacatttcttacgcctgagcgtatgtttgataaaagaaagatatatatgggagacggacattatgagcagtttatcaggggtatggaggaacatgagcagtttatatcggttgtggggcatactgcaactgataacaggaaaatatgggtatctccttcaggacggactatacgcatagattgtggagctggttataaatgttatggtaaagaggggacactgggagcaataaggttaaatgatatgaaagaattttatattgattaataaattctgataaatggtggaaaaaaccgaccaaaatgttattataatagagaatacaatatattatgattaacacgaggtgatatatggcaaagagaaagattcagaaaccaacccgttttgagcgtatgtataaggtgtgggattatctgagaaagaatacagacagaagacaccctaccagtattgctaaaatgaggaaagatgaaaatataaatgcgtatattggtgataaggagactattaacagacttttaaaagatatggcaaatattatgaatctggaagatggaggaagtgattataagccagaagctgagtggcggctgtattttgatgatttcaaaaagttttatggtgataaggaaagatatgaacgggatgattctgatgaagatgattcttatattgcaaatgtaatgcgcataaagaacctttactataacagaacattttctgagaaggaggttgattcaattattgagggtattatggcaacaaggacactggattccaagtcggcgcaggagcttgtcaggaaggttgaggacaatatgactacggcattttataagagaacgccgagacatatatgtaaggttcaggagccggagcttgcagatagggagctgctgaaagacaatcttgccattatacagaaagcaattgatgataatgtgagaatacaattcagattcaatggttattcttatgagaaaaagctggagccggtcagggcggagatggacgagcttagtccttactatattgttgcgagtggtggaaaatactatctgctggcggctaaagagtatgaaggttacaagcccaatatgtctatatggcggattgaccttatgacggatatagagattccgggaaggaatgacaggcttcatattaagggaataccacgtattccaaagaaaaatgtttcaaatcttccagaaaaatggtcagaagattttcagttgaaacatcttaatatgtcttttgataagccggtttttgtaacgctaagaattaagagtgaaaaatgtgaagacaatccgaaaaagagagtccgtcccggatatacatttttgcatgactggttcggagattcattcacatacataagaacagaaacgaagccgccttatgacgatatcgtcagggtggagtgttcaccttatggcatggcacactgggcattgcaatatagtgaactggtggaagttcttgagccggaaagtctgcgggaagatattaaaagtaagataaaggcgttgaatgaaaagtattcattgtaaggggaggagccattgtgatgaatttgcttgaatttttagagaattgggatgataatacacaagttttggtcgaaaaaaatacagaaaaaatattttctggaaaaattgcggatatgtctgagaatgtagcatgcagatattggattcaaaaagctggtgtaaaatactataatgaaataatgcatatagctgtagagaatatgaaggtaaaataaaaataattgattttagtgagcaaacaaggagaaatatagatgattgatataactatgtcagatgactacagggcgtttttagaagaacaaaattataacttcacagattttcagacagcaactcttgtctggaatgaccccatggaaagcagacggcagaagctggaggcattggctttattaagagacactactaaagatattgtacttaagaagcagctcattgaaagaatagagtatgaaaataaattgtcaaaaggtgaagtagacatagtaaatccgttcagaccggaaagatttgaagatgcattttttgaaatcccattttgtta

SEQ ID NO: 353 - DNA, 28443 bp, Unknown
  gut microbiota DNA sequence
gctggctcttcagtaaggttacctgctgcgctcttgcttacagatacctgtaccttgcttcctgactgagaaccatcaagtaacttcattgtgttgaactctgttgtatcagagattcttgttaactcactctgaagctgttcgatttcgttctgtactgcttctctatcgtcatctgtctctgtaccgttagctgcctgtactgaaagctctctcattctctgaaggattgagtgtgattcatttaaagcaccttctgctgtctggataagtgagataccatcctgagcattagttgaagcctgattaagacctctgatctgtcctctcatcttctctgagatagaaagtcctgctgcatcatctgctgcacgattgattctgtaacctgaggataacttttctgttgactttgactgagctgatgaaacaccgcttaacattctgttagcgttcatagctgacatattgtgttgtactaccatagtatgtacctccgtgtaaatataataattttttctggggaatccgttccctcaaatgcttcatatacatttgcttaccattttcttgaatataagcaattcacataaagcaaatcctttataataagcagaacttccatgctaattctgcgtattatctttgtttgccatcttgtcttctttaatcagacggcgtatcttggtaagtgtgtctggtgaaagcttggattctgcataataaggagaaatgaagcgtgatgcttctttgccttccttctctttgtttcttgcaagcaccttgcttcttacaatattcagttccctaggggcatctatcagaaggtgaatatttccctctgaacctcccgaataaacaacccttatatcctcacctatgttgataaattcaccaggcttaatcgtaagctttaacatataacctccttgttaacctgttatctgcaacaatttatcttaaaatgttgcatccttttgaattaaatggaggatttgatatgggaacatcacaaccaatacgtaacgatgaagaattagaagcatttagaaactactatctggagcagaaaacgaactaccgcaactatgccttaatatgtcttggcgttaattcagcattaagaataagtgatatactgaagctgaaatggaacgatgtttatgattccaggaaaaaatgtttcaaaaaacatataatagtgacagagaaaaagactggaaaagaaaaccgaatagctattaacgcaagtacaagaaccggattgcagacatatcttaacagtctgcactattttgacgtaaatgaatatatatttatggggcagaaagaacacacacatctatgccgttcacaggcattccggataataaagcaggcagcctcttcccttaatatggagaatggaataagctgccactctatgagaaaaacattcggatattatgcatggaagtatggaacaccaccagcagttcttatggatatatataatcattcatcatacgaaataactaaaagatatcttgggataaagcaggatgataaagattcggtattcttaagtgtgaatttataaggtgaattcataacttgaaaaagtcgtgaaagaatataaaaataataagaaaataaaaatataagatactaaaaaacaagatagtaaaaaataagataataaaaataagataacaaaaataaaataataacatttttaacccaaactatttttataattttattagtaatcgcagttaagtattattattatatgacgatatagaatatgtaattgagtagaacaaacattcaaaggatgcaacattttaagataaattgttgcatccttttttattaattatatgaattctaaaagattttattcaatatgtttatccattacatctactgatataacgcatgatacagctttaagaacttttcatctctttttgctattgtttcttcatccttaccatcagaataatcatagaaacctttcttgctcttaacaccatattctttcgcatcgtaatgttccttaagaagttctggtcctttataaacatatgtcaccatgcacacatcaaaggcggaccgacaccttagaccttagtatcgctccgcctttaacagcattatattataacactatacatcattatatttctagaaatctacttctgtatcatagtagcagcacttaagaagcttctccatctcttcctggcttggctgacgtgggttagagcctgtacatgcatccttgatagcattagctgcaacatctggaagcttagcaaggaattcatcttctggaacgattccctgttctgctggaagtccaccctcaccatagttcttaatgcactgtggtatgttaagctcgtcattcatcttacgaagcatagcgattaagttatcaatcttggcttcagttgtatctccacctaaacctaagaaatcagctatgtatgcataacgcttagctgctgtctcgtccttagagttaaacttgataaccttaggaagatacatagcattagctgcaccatggataatatgtccaccttcaaatgctgcacctgtcttatgtgccatagagtgtacaataccaagtaatgcgttagagaatgccatacctgcaagacactgtgcgttgtgcattgcatctctcttctccatatcttcgttatatgaaccaacaagatcatccttaatcatcttcatagcatgaagagcaagtgcatctgtataatcacagttagctgttgatacataagcttcaatagcatgtgtcatagcatccatacctgtatgtgctacgagcttcttaggcatagtctctgcaagctctgggtcaacaatagcaacatcaggagtaatctcaaagtctgctaaaggatacttaatacctttctcataatctgtaataactgagaatgctgtaacctctgtagctgtacctgatgtagatgaaacagcacagaaatgagctttagtacgaagctttggtaaaccgaataccttacacatatcttcaaatgttgtttctggatattcgtacttaatccacatagcctttgctgcatcgataggagaaccaccaccaatagctactatccagtctggctgatattcttccataaccttagcacccttcataactgtatcaactgaaggatctgattcgataccctcgaataacttaacttccattcctgcttccttaagataatcctcagctctctgaaggaatccgaaacgcttcatagaaccaccaccaacacagatgatagccttctttcctttaagagttttaagtgcttcaagagctcccttaccatgatataaatctcttggtaatgtaaaacgtaccataatcctgtacctcctaaaaatagaattaaataataagtgattaatatggattaatgtaataatccaccggttgcaccccacaatgcaatcattcatttgtttgattagattgttaatactctaacaatctttatatcaatagtatatacccctttttttgttatttcaagtaattatatgttaatttattgtattttatatgtattttatttgtatttattacatatagcttttcaggcataagaattatcttacaaataaaagctcctaatatgctaaaagccctgattcagccagcagcacaatgcgatatatacaatattgcagtactgctggtcaaaccagagccttattattatctatttgattgttgtttgattgttgtttaattgttatctgttttattatttcataagattaatccagatagagatttatccagatatttatcctataacttcctttactgtcttaacaacattatcaactgtgaagccaaagtgctcgaacaatgtagctgctggaccagaagcaccaaagccctccatagcaataaccctgccatcaagtcctacatacttataccagccaaagtctgaaagtgcctcaactgcaactctctttcttactgcattaggaagcacgctttccttatattctgctgactgcttatcgaacagctccatgcttggcatacttacaactcttacatctatgccatccttcttaagttcttcctttgcatttactgcaaggcttacttctgaaccgctggcgattataatagcatctggaacttccttctgtgagtcagctataacatagccacccttaagtgcatccttagatgaaccctccatctgtggaagattctgtcttgtaagtacaagtcctgttggtccgcactcgttctcaactgcatacatccatgctgctgctgtttctgttctgtcgcaaggtctgaatactgtgaagcctggaagtgaacggaatgctgcaagctgctcaataggttcatgtgttggtccatcctcacctacacctatgctgtcatgagtgaatacatatgttaatggaagctgcataagtgctgtaagtcttgccattggcttaacataatcactaaacacaaagaatgtcgcaacaaacgctttaagtccaccgtgaagcataagtccgtttcctattgctgccatagcctgctctcttacaccaaagtgaagattgcttcctgcataattatccttagaaaaatctcctgcatccttcatattagtcttgttagatggtgcaagatctgctgaaccacctataagattaggcatagccttctttatcatattaaggatagttccacttgtatttcttgtggcttcagctttatctccctttgcccaatattcatcagaattgaataaatcagacatatcatatccatcaaagtagttatcccataattctttcatttcaggatatttctctacataagaagcgaaaagttcattccacttatcctctgcctttgccatattagctgaaagctctttataatgatcatatacttcctgtggaacctcgaagtcacccttacatggccatccgatattttccttaagtgcggcaacattatcaacaccaagtggttcaccgtgtgcactagccttaccctgcttagcaggacagccgtatccaataagagtattaaccttgataagtgatggtcttgtcttatcagccttagcttcttctatagcctttcctattgcacaaagatcgttgccatcctctacttctattgtctggaaaccaaatgccttgaatcttgtcacaacatcctctgtgaatgctatatctgtgcttccttcaatagatatattgttagaatcgtaaaatacaatcagctttgaaagtcctaatgttcctgcgagtgagaagcattcagatgaaataccttccatcatgcagccatctccacctaaaacatatgtatagtggtcaactacaggatatccttccttgttgaataccgatgcaagatgtgcttctgccatagccatacctactgccatagccataccctgtccaagtggacctgttgtagcctcaacacctactgtatgtccatactctggatgtcctggtgttaaagaaccaaactgtctgaagttcttaacctcatcaagtgagagattacctattccaaaaaggtggaataatgagtaaagtaacatagaaccatgtccaccggaaagaacgaatctgtccctgttgatccattcaggattctgtggattatagttcatatgctttgagaataactcataagctataggtgctgttccaagtggcagaccaggatgtcctgaattagccttctggatagcttcagcggataacaccctgatcgcgtttactgacatttcttcaatattcatattaatcctccatttctgtgatgtatttccacatcttatgtttactctttttttcaatccttaaagtctgcctctgtaaggaatatcacatcaccagtatcactgcgcttcttcttaagaccaccaaagaactttcttgatgctctcctttcagagtttgcgattgctttattaacaacttctttaatatcatcaagcttgatattatcatttatgttatgaagcttatctatcttaagataaagctcaagaagtgcatcatcacctacttcatactgtctctttcttgcaaatcttttagccatttccacaagctcattaacattatactgcttaagagttatcttatggttaaatgttttagtaagctctgggttaaagttaagaagcacattcatttctgcatctgaatcttcaaatataactatcattctatctgtctcttcatgcatacatgaaactatctcatttatcctcttaggctggatagttcctgctccttctacgataagtgctgttcccttaagcttacccatcgcctttactatacctctctggttgatactttcgccagatgttttggctatcttcttaggcttgtcagggtatacataattaatcgcccttactattgttcttgcaagatctgtcttgtcagagcttgagttaccagatataagaatattaccgcatgctgatgttttcatattcatctctttatcaagtgactcaaacagctcgacgagctgtgcctcaagtcccggcatttctctgtactttctgaatatcttggctaattctccagaaagcttcttctctgactgttcttcatccatatcatccatctgcttaccttccctgctgtcgctatcagaataaacagatgctgtttctgaatatgatgctgctgtttcatttacctgcactgctatgctatcagctgcatatgaagcttcatctaccttatcctgtttctgttcgtattccttaagcatttcgtcagttacaggacttatctttgctgtatcaagtgaaagctcctcatttaaatcatctttgttatctttctccaccagactgtcaaagttcactaccttagagttattctgtggtgtctgtgcagccatatcagatgtattgataacctctttagcagcctcttgttctgcattcttaagttcttttacagtattctgttcaaggataaatgctgctttgcctgttctcatggcaaggtcacgtctggccgaatcaagtgcaacctctgcctctgcaagtcttttcgcctctgcttcatcgaattctgtgcctttgtttaaagcctcttccttcttccttgcgattatacgttcataagcctggctcttctcatccttttcatcaagcatacgttcaagctctgccttagagaactccttcgtatcctgctttccatacttttcttcccttacagattctatccagtctgtgatacttagctgaccttctatctgctcatcctctgtctggtcatcattatatggctgctcactgtctgtatctgctgatgcagtctttgctaaggtattatcaacattctcgttatttctactatcctttctttcaaaaggtggtctgaatgtttcttcctgctcatcttcaaaaagattctttacattctttgcaagctcttcctgaatattatgtgtatcgtatatactgtaattaggaactgaaacttctatattcatggcatcagcctgttcatctatacgcttctgagctacacgtcttgcttcttcttcatcttccctgcttattttctcacagctgttttctatctttttcttagcattttcgataagctctttaagcgataacgaagctttacttacattctctgagaagctgttatccgaactatctgacagactttctgacaaactatccggcagactgccagctggattatcctctgcggctttctgcttttctttattctcagctattgcagctgctgcttctttattcgcttcgttctgtctttcaatagcttttacaatcgattcctttaatgcactgttctggttattctgcacaaggtctattgacagttcatcactatcttctgagctgtcattatcatgttctgaagctatattctctttggcttcggatgcaggctgctcttttacactgtcaggctcagttttcttaagctcatctgcttcaagcacatctccaacctcatcctttttaagccgtgcaagttccttctgttccatgaacattctttccttgttagcctcttcgtcagactttcttgcattgatctctcctagtatccttctttgtgtattagaaagattaactccaagcttttccttaagtttgactgcattctcaacatatacgccatcctggaaccataaaacaaggttatcgcatgtcttaatacagtcttccctgcgtcctgttttataatataggttagcaagctcatacatatacttctcgtctatctctgattccttataatcttccagtatctttacaagctcagtatctggtgctccctgtgcccttcttaaatcataatataaaatatatctgttaacatcatgtgctgatatcttagcatattctttatataattcttctgcattttcaaaatcatttacctttatgaaaaactctgtaagcttgtatataagctttcttccaccaaggttacggttgtaagcaagtatagccatatcccttgcttcctcgtaatctccggctgcctcctgcacattgatgactgttgctagagtagaccagtctttgaccttattccagttcatttctttagctatctgtgcagcctgcttatactctttcttagcggcaagcttcttaatctgttccaactttatattaaactcgtatttatccacgttaaagacctccaatgtgtcaataaattgaccctcatatctaaacactccatataattttatcacagcagagtattgttgtaaaccgccagttaatgtaaaaaaaggcttaaatccggctcgaatccggcttgaaaagcaagctgttataacacatacagactatatgaaatcaaagcttgcctgctcataattcattctggtgtattctaactcctgttgttttacgttgctgtaataatcaacaacaactgtctgctgcctgttatctgccatcttctgtcctaatatgtagttgacatcaaagcgtgctgttatagcaggcgttgcacctcttgccggaactataagctgtatatgattagccttcagaagcttaaatataggctcccatatatatatatcctttgcagcgccaaaaggattatctataaatatagtatttcccacaattccgccatccataactgtattaatattcgatatatagtttatgattgcaataaggaactgtatataaataccctgtgactgtcctgttgagcctacggcttcctcatatcttaagtacctgctctgatcttttatacgttctctcttatacagattaatccttattgaattcatatctgttactataacagagaaaagtcttttccatgtaagtctgtttcgtatatatctgaacctttcctcaggatctttaaagctctctgctgcctctatagtctcatctatatactctgacattctttccttgtatacgctctccttaacatatggaatattaagacctattatagatatatcttctttatccatcttaatatgtgaaagcttaggaagtctttcaagctccgtacgtatattgctgcatgtctgtatacaacggttttcgaagttatcctttattctctccatatcttcgattcccttgtgtactcttgtcttttcaagttcaatataactattcgtctcatcaagagaagcgatcagtgcacttgtctgctgctcatcctttggcatgtttactgacatacttatctgcacagcaagatcctctgcattatagctctttagtgaatctataagcttactcttatattttacaaattcatctgtttttttatactccagcttaagtattgctgaatattcttttgcagtctgctcatattccttattcaggttattataatcctgatactttatgtccgtttttttcaatatttcttcatcaggtatatttattcctgcacctgacatgattctttcaatatcttttctgcatacctggatatctttaagctcattctcaagcttctttcctgctgccgcttccttctttataccatcctcaagctctcttgttatgacagtattattcttaacgtagccatccggatcgtcacactcaaactcttcatatgttccatacctttcttcaatctgtgatatagcatatgaaacacttccctcaagtctgttaagcatagcctcctgcatgccaagttcacggtctgaatcattatactgtttgttaagttcagttaattcatctgatatctcatgaagcttttcctggctgcttaccgatatctttccctgaagatacagctctttaaggttatcaggttcttcacctctgtagatgatagaatcaatacattttttcattgatgcttcaagatggctcttaagcgcttccttatctgtaaggtctgcattcttattcataagaatatctttaagtcctgcgaaacgtcctgtaatctcccttatattttcttcatcatactctgtagtatctggctttttgttttcatctgctggtgtatcatcctgcacataatactttgagaaaatattttcccagttgtatacaagttctgtgtatttcttatcaacattatccttgtattcgttaatcctaagatactcttcccttgacttgtcaagctgtgctgcatacccgattatcgcacgttctgccttggcaagcttgtcattgtatgctttcaggctgttcctctcttctgatatttccgcatacaggtctgatatcttctttaacccttctgcctgacctagtgcactgtcaagctgtttttttagattctcaagtttattggcatcctctgcctttttttctttgtatatgtctatgcttccatctacctgtgaaagctgttctataacctggtcaagctcctgccttgcattttcaactgctttagtatgggtatttcctgaaatagcttcgtattttacaacaaatgtataatcctcccatactatctgctttctgccttcaagcttctgcatatcttcattcaggttgtcgagttcttcctgcgctgtcttaatctcaagtctgcgtttcgtatcatcccttaaaaagctcatatctttaagtgcgaataccatcatatccttatctatggcagcctgctggctatcaagtaccttctcacttatgactggatatatatgtgtacctcttccaaatgtatttaaaacattattattcttaactctgtcaaaatcattttttattataaagctgtattcaacaaacggaattctttttaagacattttctctttggacatcatcaagctgtgaaacccatacatgaccttctataacatctgtgccatacgtattgcaaagataatccttaaacgcccttctatccggactatccatataatatgagccggaattgagtgcttctatatactggttaagcttatcatactccctggatttttcattgtactctgtattcatctttgtatatgctttaagtacagcctcatcaagatcatcggataatcttacaccatataccttctctatatctgcaagtctgtcggcattatcccttaacagctgtgactgttcatccattctgctgatattttcctgcagcataacctttttggtctttaacagattaatctgctcctgtaccttatatatctgctttgtgtcctcttcaagcccgctctttacactatgtatatcaccgcttatatctgatatatggttattgcatttttcaagctcagacaaagctgtatctgcaacaagcactccgtactgtctgcaaagctcctgctgccttatctcgtccctgcttattttttcctgcatgttatcccttaagccaagaacaactgcacagtctttttctgcatttctatgattatcctttgcctctgcaagtatgtcatatgcctgtttttcatcctctgctgcggcatgtgtcatatcctcaagttcacctacatgcttttcatagtatatcctgtacacgcctgcaagcctttcaagctcagaggttatgtcttcatcttccctcattctgttatcaagtgctgtatcaacctttaacagttctttctcatattctatataatcataataatcattggctgattccataagcataaggcgcttctttacagcggctattctgctttgcttctgtgaaagaagttcttttgacttctttacaagcccctcaacatccttaagtgacttcttttctgataatactttggcaacagcaatactcttctttttatcttcaagcctgtttacaaggtcagtattcctttcgtcatgtgcttcaagctctgactgcttgtctgctgccatatgtactgccgatgcaagcattgaatataaagcttcttctttatttttcttattcttgtagaattctgtatatgtatctgcatactccttgaaccgttccagcacttccatctggttatcataactgcttatctggctgttctttcttgaaagctctataagcttatcctttatatcaagaagtgtcttagccatcatggagtcatcattttcaacagacagcctgttattgtaagatttctgtatgatttcttctataagaagatcctcaacgaccttgcggcttgttctatagttggtttcaaaatatgttcttacatggccctcagttttgttaatacctcttactatttcccatgcactttcatatatgccatactttgatatgaagctctgatagtcgcctttcctgtcaaatatatgaacctctatgtccttatcttctttagttacatctctcagatatgcctttaatccattataagttactctttcaccattgtgcaccagcggaaggttctttatatcatcaggtccgaacttcttatagaatatgcagtagttaaaatactctatacttgtattatctgaagctgtactactgctggctgtcatgcttcctgtatttaaagctgcttccatgtaagcttctttgtcttgtgcatcttctctttcttctgcactccttgcccttcttgcacagaagcctgtcgtcatatatctgtaaccatccctctggcaatgtgaatcaagcttccactccacaagcgaatgtatgcatgtgttgccactgcctttcctgaacagcttttctaccggctgtttttcatcaagtgtgcagtttggtatcatattctgcataagaagaagcataagaagactcttgccaccaccattggcaagatcatatatggtattcctgcagttaaaacgcatcataaaatcatcataaaactgagtaccaaaattatattttacattattaaccctaactctgttaatctgtggcatatatacctccttgtttttacgaagtaaatttacgactgttcctgcataagttctgccatgcgtcccttatagccgtcaaaatagttctctataagtgccttgaacctgtcagttggatagaatctgttctgtgcttccataagaagctcctgtgatacacagaaattcagtgctatctttacaaagcctgttttagaattcttagctgcccttacatctgccgtatcagctactgttattactggaagagcatcccagcttagtgctatctgcttgaagctgttttcttcaacatcatctataatcatgcccagcttcttatctattatggcagatacggatgagtctacattttttactatatcctcaactctcacaaactctgcgtatgttgtgcttgccgaatcagtatagaattctgtaattatgttatatattataaaatatacaagatataactccctgttcacccttaatccaagcttatttctcaactcttcgttagtgtagccaaacaccttgttattatcccctgcactgacatataagctgttgttatattcatatatattaagattgaacttcttaagcgacatatgaactatgtcatacacctcggcgttagtattgtattcctgataaagctggctgttatctttactttcgcttatctgttcacccattataagctttgatactatatccagtgccttgtccagattcctgttttccatatatcctccatgttatcctgtctgaattcttacagcatcgtttcatcgtactatgttcatcatactatgttcattttactgtgttcaccatactatgttcattttactgtgttcaccatgccagctatgacaaagcatcatcataagccttcataaatgctacattagtaacctgcatgtattcactgacagcctgttcactctctgataaagtcccaccttttattatcttaaaatgtctgacctctttaccaccaaagccctcttcaagtatgccatcaagaaatgtttcgctgtgcatgtcatctccacctataacatactcatctctctgacacagattaacaaaaaatgcataatagtctgcatttttaagtatagtatcaccataagccctgctcatgtattctccgaattcatcaagtgttaatatgtccgattttttcaaacacaccttatctatacacgtaagaagattcgtcattatgaatatatagttgtgacggattctttcatcctctacttcatcctcatagactatcttctctggttctttatcattaacatattctttcttctcatatttctcaggctttaccataagtgcttcatctatcgtcctaagatctatagtctttttaatattcagcttaaatagaggatctatcagatacttaagtgcttccgcattatccttctttatcatatccgacagtgctgttgaaaaatccatatgcaggcgcagccttgacagcttggctcttcttactgcctcatccgttgtattctgcatctgcgtgcagtcacgaagcagttccgcatgcctgttcatggctatctttagctgatcttcaagataatgtatctccttcatcgttctgtaatagctgtctgtccccgatgaaaagccttcaagtcttgatattgccttatctataagctccttgttcttcttaaaaagcttctcctcatcattaaaccacttcatgccagtgcttacgaaatcctcatatgcatctatacctgcattcacatcctgcgaaaggacttccataacctctgccttgcgaagctttaagcgtcctacctcttcgttgattctttcaacaacctctactccgcctttaaagttattcgaattaatcatcttttcaagcagaagctgtgaaacacttatcctgctttcatcttttatctccttagtatcaagatagaattccacagcatcagagcttatcgaataccacacactgttatctcttattgtactttcaataagcttcattcttgacacccttttcttatgttcaaccggatcataataccgaaactcaaaaggcctgccttcattttttatcttatcgaacacataatccgccgcttccctgcattcttcttccgaaagttcaagaccaaaatcccttttaacaagcagcttaaagaaatcaagatattcattatatgtaatatccttttccttaaagttattctcctcaataaaaaaacgcagaacagccataagaatataacccatatcaagcgcacagtactttccatccttatactggtcaaatgaagcgtccatgagcctgaaaaatggataatacttcttaagattaagcattctttccctatgatctgtgattatctctcctatcatacttcctgccataacacacctcattctttaagtatctgttttgatgattctatattctttataacaattctgctttatatacatgatatgattctgtggattgtaaagcaatgctgcaacccggctgcaccagccagattcaaagacacactataactcagttcttccatccaacgccctaagaagtgtaacctcatctatatattcaaggtctccgcctaccggcacaccacttgctattcgtgtaaccctgattccagcctgttttatcatcttgcttatatacatagctgttgtctcaccctccaggttggaattcgttgctataataacctcatcaacatccttctgaagtcttttcatgagttctgcaagcttgatatctgatggtcctattccaagcataggacttatcgcaccatgaaggacatgatatacaccctcatacttacctgtcttttcatatgctgccatatcccttgtatgctcaacaaccataatctgcttatgatttctcttaggatccttgcatatagggcataactcatcatcagtaagtgtaaaacattccttacagtagtgtacattctcctttgcacttaccatagcatccgctattgactgcacatcctccttaggcatgtttataatgtgaaatgccaggcgttgggcgctcttagccccaacccctggtaatcttgacaactgttctattaatttattaatatgaccgctgtatatgtccattagaaaaggcctccgccaagtcctgaaagactgcctgtaatcttagacatagatgcctgtgactcttcctcgcacttgcgaagtgcttcgttagttgcagcaactattaagtcctctaacatttctacatcatctggatcaactgcctcaggatcgatcttaaccttagtaacttctctcttgcctgttacagttacttcgacaactccaccgcctgctgttgctgtgaattcctttgtttcaagggcagcctgctgctcctccatctgtctttgcattctctgtgcctgcttcataagattgttcatattgccaggcattcctcctggaaatccacctcttttagccattatataaattcctccttatcatctatttctatattcatcccaacaagctcctcaagtgctacataacgcttgttaaaatcttcgtcttcatccatcttggttactacgattctgacagatacccctgtcctttcttctataagctcctctaacatggtaactgtttcttccctgcttatggcattgtaaccactaagtgattttatcataatctcaagactattgccatcctctgttacagtaacatatgcctgttttaagaagttcataagaagtgcatcatctatggatgagattatgacattccactgtgatgctatctgctttatatcatcagtcactgcatcatagtttcttttaataactggcttgttatcgttattattaactccagctgccacgaatccgtcagcaccagctcctgtcatgtcgctgccattcactccacccggcattatagccgcgccctgacttatggcattaagcataccagcagtgataagttcacctgacttaagcttatctataacatgcatggcatcaccaagctgtgtctcaagtgtgttgatacgtcctgcaagctccgtcatatcagctggattctccatagctggtctcatcagctttataaatgtaacctctgcctttactctcttctgtgttgatgtcttcatatcgtttgatagctctgataacactcttatatgtctcatgagtgtatctgcatcagcttctttagcagcttctatcatatcagctatgttatccttagatacctcgattacatcctctatcttatcagtatctttagtagtctttataagtaaaagattcctcagataccatataaaatctgtgacaaactgtgataaatcacgtccctgcatgataatgtcttccataaggctcatacagcgtgccacatcattttcccttatcgtcttatacatattactgaatatagctgtatcgactgcgccaagtacatcaagcacatcatcatacttaagttcttccccaagatgaaaggctatgcactggtcaagaaggcttagtgcatctcgcatagaaccatccgctgctttagccacatacctgacagccttatcttcaaccactatattctctgccttcatcagctctgacagcctgtcagctatcgtttctatagatattctatggaaatcatatcgctggcatcttgacataatagttataggtatctttgccacctctgtcgtagcaagtataaatataacataagccggtggttcctcaagtgttttaagaagtgcattaaacgctcctatggaaagcatatgaacctcatcgattatatatactttatactttccttctgttggggaatactgcacttcatccctgatttcccttatattatcgacaccattgtttgatgccgcatctatctctataacattcatggaagtaccagaagctattgccctgcatgtaggacactccccacatgggctcccatttaccgggtgctcacagttaactgcctttgcaaatatctttgccacacttgtcttaccagtacccctggttccacaaaacaggtaagcgtgtcctattctgtcggcattaatctgattctttaaagttgtaacaatatgttcctgacctttgacatcttcaaagttgtctggtctccactttctgtataatgcctgatatgacataacttaggacttcctttctgtcatgttgttttaaaacgcacgaaaccgtgcgcccggcttcgaatgatcatccacagacgttaccgatacagttagctcgatccaggctgccttccggcacacagaaggtttcacttaatgctgcttcattcctgacctgacatggttcatgaattcctgttgcggaagacccagatgtcatcaccacttatatcgggcggctccataaaatctcgccctctgccgaacatcacccctgctatagcggattgcaggtacaaggtgccgctaactccccggctgcacggttcttttattatatatgttttatactaactctgtcaatcgttttcttatagcaactcatgcagactatcttataaagttagtttttatcttatcctcaccacaaggaagctctacaccctgcttctttgcagcatctatagacttaacaagccatgccatattctttccaagaagcctcatagtctgcatgccttcctcatcccttacaacttcttcaggtgtgtttccatgaactatgttccagtagttagatgatacaacaggcatctggttaatctggaaatacttgttaagatcatcaatagttgacgttgtgccacctctacgtgctgatgccactgctgagcccggcttatacttcatatctgcaccgaaagctccaaagaatctgtcaagaaacatcatgatttctccactggctgatgcgtaatataccggcgaacctactataacaccatctgctgttttcaccttttcaccagcttctttgactacatcatcaacttctcccttaagcactctacttcctacattgataatctctgtttctacaccctcaccttcaatggcctcagctgcctttgaaagtgctgtatatgtacaacctgcatctctcctgcttccgttaattaataaaaccttcattactatacgtcctttctttacttgtctactgtgcagctgactcagctgccatctcttcattgatagtatcttctgaggctgccatagccgcaagagtcattgtaagcagcttttcaagttcccatccaagctgtttcgcacctttttctataacctctcttgaacagcctgctgcaaagcctttgctcttatacttcttctttaaagacttaagctccatgtcctttgtactcttagatggtctcataagtgccgctgcccatataaggcctgtaagcgcatgctggatatgaaaaagagatttgttatacttctttagtaatgtaaatgcttcatctctggatatatgttccatctttattgtgcctccattatgtctgattttttcaattatccttataacatcagaagaaaagtatacttctccttttaagacttacatacctacaagaatactctgttattatacaccaaaaccagcaaatatcaattttttaatattgtattgtaatttatacagttgacacaatctaacagacttttaattttctataaaccatatcactccaaaaaatataaccgcaaacacagtaactatctgcatttgcggtcaaaaacttattcaaaatagtacagatatacatcctcaaggtcaatatcattatcaacctttaccgcctcccctggcagttcatctccaacaagtcttaacacaagcccatcctttctttgtcttatatttcctatatgatacttttcctgaaggctggcaacatcatcaagcgtgcatgtaagttccccgacctttccctgcatttgctcaataagctgtgatggagttcctgttgctataatctcgccattctttaacagaagaaccttgtctgctatacattctatatcacttacaacatgcgtagcgaataatataatcttatccttagatagctcagcaatatagttcctgatagctatcctttccttagggtccagtccggctgtcggttcatcaagtataagtatctttggattgccaagcaatgcctgtgccagaagcactctctgcttcatgcctccagaaaagccacctattttcttatatgcgacggatgtaagattcactattccaagaagctcatctatctgctgtccgacctttttcacagtcaccttgccattatcatccactgattttatggctttcacaccttttatctctgccatgtacttaagaaatgccttcggtgaaaaatcttcatagaatccctgctgctgtggcatatatccaacaatacctcgaaacttggcacctaactttaatatatccagcggctcacctgatattgttttctcattatcatcacagttatattcctgactgtttccacatgtattatagccatcacagtatgttatacttccaccatccttatccctgctcacgttatcagttataaggttaatcattgtgctctttcctgcaccattggctccaagtatgccatacacacctggcgtgaagctatagcttattccctttaatgcttttacgctgccataggttttctttaaatcatcaatcctgagttccatactatccacgctccatttcccgatatattccagtcacacttttttactgtaatcaataatcaatgtccattttttacaattcttctgacgcttatcacccagcatatataacagttgtggcagcacaagtgccagcgatacaacaagcgataacacataaccagacattgttgatataagtactactataccggctattgccataagtaatacaagcttccatattatattacagataagataagccataagtgacattttaattggaacaaatgagaacctgggataattctgtatggctgtctgcatatcatctatcttatatacccttgtaatattcacgatatccggaatgaatatcactactcctatgcatatcgaaactataagtactgcacacagcttcatcatacaccagctaagtcttccccttttggctgtatgtatagatataagcatattctgtttcttttcaccagacacaatcgaaaaaataataaatatcagcactataactgccagcaagccatacacagcttcgtgactatacagcttttcgccaagcatctcttcaacagcaaaaggcattgttacctctccggttatatttttttccttaagatattcaagattgtttatattccggtgtatctcttccaatccttttttatataacgacacctgcattgtggcttcgttcatatcttccctggtgaattccttggtttcattggcaaatgctgtatttatctgcttaagcctgtcgttccagtactcactctcctgctcatatctgtatactatatccgaaagctcatctgataactgcatgtcttttgcttcactataatatttcatagctacagccaaatctgaatcatatgtatatcccttttttataccagtattggaaacaataacaaccgctattgctaacacaactattccttttttaacccataacagcttatacagctccatgacaagtacgggcatatgacttaacactggggctgtcgctttaacgatgaaaatcgttaaggtaccagcctctttttcctataaaaatacgatttttaagttactatttattaaaatgaatggtatgttccaaaaattggcgtactttaataaacctatataggttttaaaaatttttattttgatatttctaaattcaggcactttttaaaggaaataaatgtgttcctgttttcccgttctgaatcttattatgaagtttatttatgtttcttgcaattgctaaaagagtactttcagcgagtacattcgcagtccctttgcttaggtatcttctgaactgcatgtcctgttttaaatctccaaatgagccttcagcctgaatgctccggttcatcagatacaataccccttcatcagatatgattcgttccaaatcctcttttctgtgttttataaatgttttttaatctcaacctcactaatcttcaaaatcaaatattatattcacatttccttcaccatcaaattccttataacttttaacatatgcgccatttgtaccacgatttatcactcttggataatctgcatcatatgccataacactcttgtgtacatcttcatttttatcaggcttctctatattttgtatctctggtttcagaaacaacatcagcataataataataaaaactggtatagatataagcttattactaatagttactttttgttctctcataatattggaaactctttttctaactgccactgctgcacttgcgaaacctaatattcttatttgtgtaacctgcttaacctgtgcagcatttaaaagaatattgacataattcttattccaatccgtttcatttatatgtttatcacaacaatcataatcacatacaagctctatacattcagcatattgcatataaaatatccatattaaaggattataccaatatattaaagacgttaccccagttataatcttgataatatgatgttttctacgaatatgcatactttcatgttcatatagatattcaatatcaacatcattaactctgcttgatatatatattttaggttttatcaaaccatatactaatgcggaattaatataatcattcttatatatctttaccatgcaatttccaattaataacttctgtggaacactagtagataatatatttctaaatctgatatcaactactatattatagaacagcaacagcacaactcctacacaccatatctttaaaaaaaatttagagactatcgtctgactattaaaatctcctgtattaaccatatttgttaatacatatgaagatgtactattcacattaaatttaatagaaaatggtattataatcctaacccataccaacgacatcaataacattctgattcttactgattttacatgtgttatcttacatataagcaaacatgccagtatcgccaatgctattttaatattattttccaatataatttgaatatatcccatcatatgtatcccccaaaaaacacatttattatttatccaaatcaaatccccttattattgcctgttttccctcgtctgttatccatctggcacgtacgaaaagctgccataaactctggcaatcaacaatattactttaaggcagatatacatattccctatagttgcttttcctatatgttttacaaaaaacagcaacaccatgtaactgcttatttaatacatctgcattgtccacatctctgtttttcaaaccattaagtccgtacagaaaatattctgacaacgtcttataactggtattaaactttccataatcagtattatcctctatgtattctaatgccgatttataatcttttttaaatttatccagagcttttctcctatccttgaatattacttttccatacagattatatgcacgctcatacgctgcatcttcttctaacatagtatgtgtaacaggctcgaatttttttaccgggatctgcggaaccacaaacaatgctaatgcagctattactactatacctactaaaaaaatacatatttttttcttcatactacacccctttttataaatacattataccttgtattgtttcaacatttttgactataattttttattacaatttacaccaccatcaaatgaataaaacacacaccctttatacgtcaacataccagtacttccttcctgaacctcatcaaagatttttttatctacatccagttttatattttttccagcaacatcaaaatacaatcggtatgctatattattctttgatgtagcaccaaatccaggtgctggtctattcgatgtcaacgtagtgttataaacctttatttctctatatctttcctgcacttttgatacaagtgttgcttttacacttttctttcttgaaaaaacatgttgataaacaccatatttccataccttatataatatacttaacacaaaaactgcaaatataatttcacatacaatataaagccatgctgggaactgtattctcatataacctctctatccgatataatcattcgtatatatctttacccctatgatttgttatttatctaagtcaaattcctttattattgcctgtttttcctcgtctgttatccctctggcacgtacgaaagctgccacgaactctggcagtgaaccatcgaatcttgtatccaccatattgacactttctatagtctgtgcatcttccttcttaacgagtgatgtaactattgcattttccgactttatgatttctctttcactaagacgttttattactgtgtaggttgttgatttcttccactcaagcttttccttgcacagctttacaagctctgtacttttgactggctcattttcccataatattttacagaaattatactcactttcatatattactggctgcatattaacctcttttctgaatcatctcttggttttagtctaacacgttagaccttgcatgtcaaccagttaaattgcatttagttccattcctctgccaacagttactacataaccacggcgtaacaattccagataaacgatattttctaaaatgagattgatatctcgcatattaccaccaaaaacagcttcacctgattccatgagttcctgcttaatcatcgtttaatcatagttttcatcctcctttttgctttctgctttgcagccacttcctttttctctgcgctcattatagaattccttttttaattatgataatataatagctgcatgaattaatcattatataaaccacatgcttgaggtgtaccaaaagcattgtataaatacaaggactgattataatatgaataacaatgataactgcaatggcatctgtgacaataaccagagcatcaataataatataaatacgaatactacattttccagcgaagacatacactatatgaagcttgccatcaaacaggctaaaaaggccgctttgcttgatgaagttcctataggatgtataatcgtctatgatggaaaaatcataggacgtgggtacaacagaagaaacactgataaaacaacgcttggtcatgctgagattactgctattaaaaaagccagccgttatatgaacgactggagacttgaagactgtactatatacgttactttagagccctgccagatgtgtgcgggtgccatcgtacaggcacgtattccacgagttgtcataggctctatgaattccaaagctggatgtgcaggttctataataaatcttcttaatatgccacaattcaaccatcaggctgaagttgtacgcggagtatgtgatgaagaatgttctactatgttaagcacatttttcaaggaattacgccagaaaaagaaagctgaaaaagccatcataaaaggagctctgaaaactaacgaataatttcattataaagctgatttagatttacacaccaatataattattgaaataatcggacatgataaaacacagccatttaacatagatatatacagaaatgaggattgacatgaaactcgaatacaaccttggcagatactctctcaaagttcttaataaaagtcattctatagatgttcttgacttctactatcgtaaccgaagggactttgataagtatgaatcagataagccggcttccttctacactgaaaactttatcagccgcatgcttgaggctgaaatgaaaggcctgctttctatgacatttgtaagattctttctgatggacagacacgaacctgattatattcttggctctctgtccttctcccatataagcagaggctcatccccttctgccaatatgggatataagatagatgaatatcatcgcaacgaaggactggcttcccttatgatagccacagcccttgaagatatcgttcctgatatcgggcttcaccgtactgaatgttatatccatccggataattctacatcgcttcatctcatggagaaattcggatttatcgatgaaggcatagcccactcatatgtcagactaaatggtgtatggcaggatcacagacgttttgtttatatttcctgataccagtatccaaagtatggattattgtagtcactcctgtggctcttcttaaagttacagaatccaaacatggatgccatatagcgctccctgttgcagtacatacctggaacccctataaaataattcgtattgttctcattatcacacactcttccaaacaaaagatggtggaaattataatacccatgtatcagaaagctgttatttataatctccttatccttaagtggcagctttgataacatctgaggtgtcacttctatacaatcataaaagtaatcatcatcaaatgcatccacataatcagcctttgagtacagctttttatataagtgctcattgctatccgcacatttcttctttgcagaagtattcactactgctgttttatctgcattgtctgtattgtatgtgttgtatgtattatctacattatcagtgttgtatgtattttctgcattatctgtattttctgtgttgtcaatacattccatagcatgtaattcttctatcttttccatactttctcttacgttaacatccgctgcggcctgattatgtctgtttttttcatctttgtatgcagcagctttaattctgccattcttgctttcactatatttgctttccgtatccttatatgcagtatctatgccttcttcactcacacatccagcattttcttcagaggcttttttaacattctccttagtgtcacttatcctgtactttcttacatcacttcccgcgaattctataacgtcaggattaacatcataatcctcccacatagaaaacatcatataatatctgtcacccttgtttgcaacagctattccacatatatctgatgatgcatagccagtattatctatattactggcattaaatattccagcatatgatgccattccattgtttactatacaatcccccactttcataagcctgtatcttccaggaatagatgcatccctgtctataagcatatgtactccaaacatctgcggtgtgtctgtatacacacccctaagattaatattaagcctcatctcacctgccctgacctctacctttgcaaaccctacattcttatcctttacacctcccggataagaataaatgtatgaaacaaaccgctgatagtcagccataaaaaacctcctgacaatataagattgatatgtaatcttatgaccgccaggagctaaatatgtatattaatataatatgataccagggtcaaaagatctttcacccacatgagctcgctcataggtgggtgaaagaccttgggacccgccccaatatgagcataaaagtgggatgataatcccacgatatgcgaatattgggtaggattgtgggagtgcgtagcacggaacaatccgtaggtatcaaagtcgggggcttttgaccccgacatcataatattggtataccacttaattaaattacaccacaaccagacatgacaaagctgtaagcagctgggtatactatgtgaaatgcacttgaagtttgattgtgatagttcttagtctttccctgcacttgccagccagcttcgtacacggatgtacgaagcagcgaagccacgccatggatggcgtgtctgagcggtggcgtcagttaccacaatttattaaggaaagacttagaaatatccaatcaaagcttctggcattgaacacg

SEQ ID NO: 354 - DNA, 10269 bp, Unknown
  gut microbiota DNA sequence
tatattgctatgttcattctgtcaagcgtatatatatatatatatatatatatatatatatatatgcgctaaatttgtgccaaattaaaaaagatatccagacacataatcaaagtctgaatatcttttatataaacgtattgagttatccgattctacaaaatctccaacaattgtgtaagatttttcttaccaaaagtcaccttttcttcgccattcttatctatgacaaggcatggaacactcatcaccttgtacttatcacgaagtgcaggataatgtgatatatcataaacttctgctgtgacattttcgttatctgcggcaatacgctgtgccgctgttaccagctcaggacacatcgtacaagataatgaaaccaaaagcttcatatcaatagaatcctttattcctgcaatctgcgattttgctttgtcatcaataggctgtcccggtccagctgcattgtataatccaagtacaaaacttgtaaactcatgtcctcccggaaccccatgaaatgcaagtcctgtgtactctccgttgttacaaagcactcgtacacatggtaaatcctcagttaacactttagatgctgcttcattatccgaagaaatctgtacagaaagcttgtccgtcatccttgccagctcttccatatattttttaagctcggctgatacaggttgctcattaagatgcagctcaagcataagcggcgattccattcgtgagaatactgtctgcagctgctgtaatacatccgctgcaaaaaagctatttgcatcctcattgggattgcctgacatctgtgcctgctcttttgattctgcctccgttttcaaagtgctttgtgccgcagcctctggtttcttcggcacaagtccagtctttttctgcatggaaacaacatatttttcaagagaggttgctgctactgctccatcaccagtagctgttacgacctgcctgagattcttgacacagatatctcctgccgcatagattccatcagcacttgttttctgattctcatctgtgacaatatatccctgttctgtcagttcaaccatccccctgaccagcgcgcttgcaggctcatatccggcaaatacgaacactccgaaggtatcattttcaggtgcaaaggttgtctcttttccagtccttttattgcgataagtgatactcaaaagactgtcatttccagaaaccttcacaacctctgtctgtggcagaactgtaatcttcggatgctcttttgctgcttttgctacagtttctgcgcaggaaaaatcctcacctctgataaggattgtcacatggcttgcatactttgtgagaaatacactctcctctgcggctgcaaagccccctccaataacaaatacttcttttcctgtaaaaaactcaccatcacatgtggcacagtatgccactccatgtcctttaaactcagcttccccaggaaatccaagcattcttggatgtgcaccggcagctacaagcacaccaaagcaggtgtagtctcctgatgaagtctttacagtttttaaatctccatcgtcgacaatttcagtcacttcagctttcagatattctgcaccgaatccctcaccctgcttacgcatggattctgtaagtgcctttccgcttgtcttaaaaactcccggatagtttacaacttcatccgtaatcgtaatctgtccgccaaatgtgtctttttccactacaagcacacgatatctggcacgtgccagatagattgcggcggtaagtccagccggacctccgcctattacaatcacatcataaaatctcttttcatccattaaagtgcccccacaaggtctaagctaggctttaaggtttctgcaccaggagtccacttagccgggcaaacttcatctccatgctctcttacgaactgcagtgcctgtacctttcttagaagttcgtcagcattacgacctacatttcctgcatttacctcatatgctacgatttctccatctggatttactacaaatgttcctctctctgcaagtccatctgcttcaataagcacatcaaaatccttgcaaagtacatgtgtaggatctgcaagcataggatactgaatcttctggattctctctgatgcatcatgccaagccttgtgtacgaaatgagtgtctgttgaaacagaatagatttcgcagccgactgacttgaattcatcatatttgtttgcaagatcctctaactctgtagggcaaacaaatgtgaaatcagcaggatagaaaaagaacacactccatttacccatgatatcgtcctttgtaactgtcttgaactctccgttctggtaagcctgtactgtaaaatctgaaacctgtttttgaataagtgacatattgaatcctttctgcccattgggacttcataccattatttatagttgtttacaattctaataagattatgcttcgttatgagaccgattagtttttacttgtttaagttagttcacactaacctacgggtaaaaatttaaaatctactatgccaaagcctttttaatcgcttcttctaccgatgcatctccatcagtctcaaatcgtgcaatcacatcacaaccatacttatctgcaagtatatctgctactttgcagaaagtatccggatgacgctggctgtttccgctgactgctgctgcctttaatccacccttgttttcttcaatgaatttctcgactgtaggtggaagaatacctgctccgtccgtatatgtaactagtacataatctccgcttactttctcttctccactttcaatcttaagtgctgaaattcctaatcttgagattaatttctctacattacctgttctgcttgcgtatactaactgcattaattgttcctcctttttaaatttaataataattactattatattatatgtggtgaactatcttttatcaagctaaagattttatgatttccccagccagttatttcgtctgactggggcatacattttttaataataactgcgaatcaaacagttctacaatctgtcaggattatcatatatatttatgtattcggctacagatctgtcaaatgtcttgatatgaccaaacagccaatcaataacattgatttttacctgttccataaacctttcatccggtccctcattttcttccagataatcatagagtaccttaacagtatgtctgaattcctcatgtttctttatatggtcttccaagcctggatagcctacatccttctgcattttctcctcttctttgaaatgaaaatctgtatattcatctagataatcaagcattttaattgcctttactcttgcatcttctgattcacacgcactaacaaactgctgaatacgatcaatcagttccttatgctgctcatctattgtcttattgcctgttattaaattatcatcaaatgtaattactgtcataaaacctccttacaatccacctcacatatgttaaaataaatgttactataatagaaagctggtacttatatgcaaatcaaagacctatctattttccataatctggatgatgctgaatttaagaaaagcctcgtttgcactcagtccgtcattcatgaatacaagaaaaacgattatatattctttcagggtgatgttcccaataagctctacttaattctcgatggtgaagtagaacttggctcaatcaatgttaatggcaaagttcttcgtattaccaacatctccgaaggggaagattttggcgaagtagaactttttcttaataaagaccattatagcggttatgcaaaagcaaaaaccgatgtaaaactacttgagattgcaaaagacttctttggtggcagatgtgaaaaaaactgttctcatcacagcaaagtagtttttaatatgcttgaactctttgccaaaagaactgatgaaaataatctacagcttgaagttcttaccagcggtaatctcaagcagcgcattgccacatacctcttagagcgtgcagataacaacaatcttgtatcattatccatgaatagggaagaactagctctatatctgaatacaaccagaccttccctttcaaggacactcttatcacttcaagaagatggatttattcatcttgcttcaaggaaatcaataaaaattcttgacgctgaggctttactttatatcgaataaaccagtcttccttcctattcgcttagctcttcaaaaacatctttacccaatccacagaccggacatacccagtcatctggaatatcttcaaatggtgttccaggtgcaattcctccatctggatctcctacctctggatcgtacacatagccacatggtccacatacatatttcttcataataaaaatctcctttcagattctgttttatttatcttatgtatgtattatagtatttgggcaaactatattccgtaacatatgttaccaaacagcattaatattttattctttttctgcctcttcactttcattaactacacttttgcttgaaatcatcttatccccagagagtacagagaataacatacatcccattgcaccaaccgcaaaaatcttatgtgctttcatctttcctttgaagccagtacaaaatgtagcaatcatgcatgctaatgcacctactgcccaatatttatgatttttcacaatttcacctccaatcactttaattgtaacgcagacataattgttgctttcctgatttcacactgacgcaattcttctctttccagttcaagtctttcttcctctgctctttcaaacggatcgtcaaacataatggcaagctctttatgaaactgtgaggacatttcatcgtcatatccataaagtttttgttttcattgaaaattacagcctataaaggcttttttgttcaatgaacttttatcctgcaatttgtgcagacggtctgcacaaattactttttcatatgtacttctgctaaactgttgttcatagccaaacctcaacctccttgtgtttagagtatatgaagttttagctttatcttgtagtttgcgaatatccgtgtaaatagaaaagccctttgagaaaaggatttctcctctctcaaagggcaggttggcaaactggaagttgtttattaaacctttttaaccttaaccaacaacatcataggtctacgcatttcattacacattcccggcatacccatcatatctgccggaggcattgcttcctcaatagcctcaatttgaaaaccacattttataagtggattcaatatctgcgttaatgtgtggtgctgtttaattactcgttgaccaagaaaattggtttctctttcgcctgggtaatagtaattgtcgattggccaatatttaggtttcccattttcatcataaatccaatcctcattaacacctgcggtgaaagtcggatgttcaatattgaataggaaatacccacctacttttaatgtgcaatacaccttttgataaacattagctaaattttcgatatagtgcagtaccaggttagaaacaactagatcataagtattttcaggataaatgtattcttcaacaccgcaaactttatacttgattttgtcatcagagttatcagctactgcttttccaatcattttttgactactatcaataccaagaatttcagcagctcccatttgtgcggcatatttgcaatgccaaccgtaaccacatcctaaatccaaaactttttttccctgtaatttagggaataacggttgcaactgatgccactctccagcagctttcagaccatctttgcttcttcccatttccgcatatgcggcaaaaaattcactattatcgtaaatatttctcattgataattacccccacaattccgatttgtatttctgtttgttttaaaaatgggcaactccgattggaattgcccactcatttatcactccaaaatccaacggctttgccgttgccgtgcttcgcactccttgattttgtcgttgtcacatcaagtgaaaacaaatactcgctttgctcgtgcttgttttcctgctgatgttccaaattatgcgattttttcttgcttgcacttaattttgcatcaattgatgtaagtttgatgtaaatcgctgtttttttagttttttatcaaatgaagtacgtcccgtctattcggtaaaacggtacttcttaatagagctttgcacctgctggaatatggttatcaaccataagaaggtgaagttcttcatcctctgaatccttaagattgtttactgctgaaagtaacataccacaagattcaattcccatcatctttctaggtggaaggtttgtgatagctataagtgtctttccaacaagttcttctggctcatagtaagcatggattccgctaaggattgtacggtctgtgcctgttccatcatctaaagtaaactgaagtaacttctttgacttaggaactgcaacacattccttaaccttaacagccctgaaatctgacttagaaaatgtatcaaagtcaacagcttcttcaaataatggctctaccttaacattagaaaaatcaatcttatcattagctgtaaagaaaccattattatcatcttctgatgctgctgcttcttctgtagaagtactcttttcagactttgcagcactcttgtctgaacctaatgacttcatcgttgggaacaaaagtacatccctgatagctggtgaatctgtaagaagcataacaagtctatcgataccatatccgataccacctgttggaggcatacctactgcaagtgcattaaggaagtcttcatctgtgtgctgtgcttcctcatcaccattctctgcattcttatcctgctgtgcaaaacgctctctctgatcgattgggtcgttaagttctgagtaagcattacacatttcccatgtgttaatgaacagctcaaaacgttcaaccttttctggatcagatggcttcttcttagtaagtggagagattgcaagaggatgatccataataaatgtaggctggattaacttctcttcgcagtactcttcaaagaataagttaatgatatcgccctttgtatgacgttcctcgaactcaattcctctttccttagcaagagccttagcttcttcatctgtctttattgtatcaaaatcaacgcctgcatattccttgatagcatcattcatagtaagtcttctgaatggctttccgaggtctatcttagtaccgttgtaagtaatttcagttgttccgcatacagtctttgcaaggtgtctgaacatactctctgtaagctccatcataccctcgtagtctgtatatgcctgataaagctccataagtgtgaactcaggattatgtcttgtgtcaacaccttcatttctgtatacacgtccgatttcatatactctttcaagaccaccaacgataagtctcttaaggtaaagctctaatgatatacgaagcttaacgtcctcatcaagtgcgttgtagtgagtttcaaaaggtcttgcggctgcaccacctgcattagaaacaagtgttggagtttcaacctccataaagtccctgccatcaaggaatcttctgatttcctttataatctgtgatctctttacaaatgtatccttaacctcaggattcattattaaatcaacatatctctgacggtatctcatatcagtatctgtaattccatggaacttctctggaagtacctgtaagctcttagaaagaagtgttatttcttctgcatgaactgatatttcacctgtcttagttctgaatataaagccctttataccatatatatcacctatatcagacttcttaaaatctgcataagcatcatcaccgatagcatctcttgatatatatgcctgcattctgcccttaagatctgcaatattacagaaagatgcctttcccattactctcttgaacatcattcttcctgcaaagcttacctcaataggagatgcatccatgatagctcttctctcattgtaatcagcattaaccgcctctcttgcctgctgctcatccataccatcagtattaacctctggtctgtcaccaagaagctccttctcgtgtgcttcatagatagctctgatttcatctgtatgatgtgtaacatcatactttgttatctgaaatggatccttgccagcttcctgtaatgcagcgagcttgtccattcttaccttaatctgctcattaacatctggctgtgcctgattcttgttatctgccacttttattctccttcttaatccgttactgttagtaaatacaagacactaccttatgtgcctcttaacaattatctcaatctataatctatatataactagtcattcttaacagaaacaatcttatattctactacaccaataggtgcctcaacctttacgatatctccaaccttcttgccaagcatagctgctccaagtggtgattcgttagatatcttgttattaagactatctgcctctgatgaaccaacgattacatattcaatgtcttcatcaaattccacatcatgaagtactactgtgctttccatcttaacagcatctgaatctgtattatcgtcctggattacttctgcattcttaagaatctcttcaagctctgcaatctgtgtttcaatatctctttgttcatctttagctgcatcgtattctgcattttctgaaagatcgccctgttctcttgcttcctttaacttctgagcgacttcctttcttctatcaacctttaagtgctcaagtaaagcaactctttcttcatatcctttttttgtaagtaactgcttctctgccattgttcgtcacctttcccataaatatattcattaaatattcatataatgatgccagggttaaaacgttaaaagtcacttgtgcgaacacataaacctttctatcacagtctatatacttgtgaaattctttcaattctggcactcacatttttaccattatcggataaaatgttcaagatattatatctcacctaaactttaatgtcaatgtaatgaaattcttattcaactcacaaaatctttactctattaaatcctattcttgtcatatcagcttaacgtccgtattctctcaacgaattcgttaaactgttcctgcttagtcacctgattcacctcatgtcttaatgctgcagcatgctttattcctgttgtataccatgcaaaatgctttctcatctcgcgcactgctgtaaattcgccctttgtttcaacaagcatctgacaatgtcttataagcatatcagcaacttcgtctatggatggccctggtgttactattcctttttcaagataatccttaacctgcctgaatatccatggatttccctgagcagctcttcctatcatcactccatcacaacccgtttctttaagcatccgtgctgcatcctcaccacttcgtatatctccgttacctataactggtatgcttaccttttcctttacttttcttataacatcccagtcagcctttccagaataatactggcttcttgttcttccatgtacagcaactgctgccccaccggattcctgtataatatatgctatttcttccgcattaatacagctttcatcaaatcctatacgaatctttaccgtaagtggcttatctattgcatgtgccatcttttcaactatctttcctactaacagcggatccttaagaagtgctgagccctctccattattaaccaccttcggaacagggcagcccatattaatatctattatgtcaaactctctttcacacattctctttgcaatatctgccataatatcaggatccgaaccaaaaagctgcacagcgaccggattctctatcggatctgtttttagcagttcttctgtgttcttgttattatataaaactgctttagcactcaccatctctgtataaagcagtccacatccttgttccttacataaaagacgaaatggcaggtctgttacacctgccattggtcctaaggctatgggagtatttatattaactgaacctatattcatatatactttaaagcctttcttttctataactactaataaaatgaaagatcaaaatatcaaaaacatttatgcctgcataacaaaacttttgttcttaacatcttaataaaatgtaaaacatcaaccatcaagtcctaagaaaaacaccttataaaacattt

SEQ ID NO: 355 - DNA, 42858 bp, Unknown
  gut microbiota DNA sequence
ctctcttttctcatactggttcttcttaacaagcagtccacatgctatctcatcatataaaaggtctccctcatctgctgtagatttaaaaagcaatgttccatcatcatcgaattcaagatcgagtatgccacctacttcttctgtgaataacacacacataatctttaactcattctttatatcctccggaagcttatcaaagtccggattaaagtagtatttcttctcatacgagtttgatgcgcataatactacattttcgttttctttattatacatatccgtacaatcctctcactgaaacctcacctgctcttatagcggtttcacatccatcttctgtttttataataagttcgccatccttattgattccaagagcctcacccacaagttctttgttggcatatatagctttcactgtccttcccttattaatgagaagttcattatatctgtctactatatatgttagatcctgtgtctttaaaaatgcttcataatatttcttaaagctatgtgaaaatgccgctattatattacttctcttaaccttcttcccagttccaagatatattgatgtagccatatcctttatagactcatcgaaatctgttgtattaacattgattccgatgcctatgacaacataatgtatgctatccatctcagcactcatctctgtaagcgttccacttatcttcctgttgttaagaactatatcattaggccatttaacatagcactttgcatcctgtacttcttcattgatagcatcaaccatggcaacagcaagtacaagtgtaagcatagatgcactttccggactaatatctggtcttaaaagaagactcatccatataccgcttcctgctggcgattcccatgtttttcctcttcttccacgtccaccagtctgacattccgccacgaaaagtgtaccttctggtgcattcttttctgctgcaagctttgcctggttattcgttgaatccgtcttgtcaaaatattgaatatgcctgcatattccctgcatatttccgctatcatcaagaagaaggctctctatctctgaagctgttattatatcaggatattctgtgattctgtagcctttattctgaacagaatctatcacatatccttcttcctttaactggttaatcactttccacacagccgttcttgacacaccaaatgtttcacacagctgttgtcctgacacataaccatctgcatgtcttagcagatgcaatatttctgatttcatatattcataccacctgaatccatctcaatcctctgggcagattattaaaacctcatcgcccagacactaacccctacatcatcttataaaacgataagtgctgtaacaacagtcataattgcaagcattaccgcaactacagctactataagaccagataccttattgccattaataaaatgttttacagaggtaagagcattgactattgttccaagaaggaactctataggaaacagtattccacttctgcttcttaagaataagacaataataaatataactgtagccgcaactgtaagaacaatgtttgtataatctataatcatttttgtctttttgtatgaaccacttgttgtataatacatataattcctctccgttacatctttaacatattgctgtaaattatattagtatgctccaagtgtagctgccataacagcctttattgtatgcatacggttttcagcttcatcaaacactactgactgttctgattcaaacacttcatctgtaacttccatctcatcaagaccaaacttatcatgtatctgtttaccaatagttgtcttaagatcatggaaagctggaaggcaatgcataaatatagctttcttatctgcattatccataacctttttgttaatctggtatggaagtaatgccttgattctttcattccatacttcgtctggttctcccatagatacccatacatctgtataaagtacttcagctcccttagttccttcttctacatcctctgtaagtgttactgagccaccgctctgtgctgcccactccttacactggttaacaagtgcttcatcagggaaatattccttagctgtgcaggctgtaaagtgtaaaccaagcttagagcatactatcataagtgaatttcccatattgtatcttgcatcacccatatatacgaacttaacaccctttaatctgccaagcttttcttttattgtaagcatatctgcaagcatctgtgttggatgatattcattagtaagtccattccatactggaactgatgaatactttgcaagatcttctactatttcctgtccgaatcctctgtattcaataccctcaaacatagtgcaaagaactcttgcagtatctgctatactctctttttttcctatctgtgaacccttaggatcaagatatgtaacacccataccaagatcgtgtgcagctacctcgaaagaacatcttgtacgtgtacttgtcttttcaaatataagcgcaacattctttccaagaagtggctgttctacaacaccatcctttttcatcttcttaagcttagctgcaagctctataagatattctatttcctccggtgtataatcctttaatgttaaaaaatccctgcctttaagattcataataatcctccattcttgcgcacacttttaagcataatgaatctgtgtcatatacgccctgacacaaattcagcataaaacatgaaatatattttatctcatttgttttataaatacaagtataaacgtgtacgatcaaatgcaatcaaatgcagtataaacgtgtacgatcaaatgcattgtaaatacatactataaaatacacacattaaaacattctctgatgtatacatatacatatcgcatatatcgcaaaaaaaatacaggctgacttctgtcaacctgtatgattcatgctataagtttaattctattcggtgaaagtgcaagtcatcattcttacactatttgattaaaccttctgccattctagtgaaatacatgattccctataataacatagctggacatagatgatatattcgctgcagatatcattctgaatgatgtatatccaccgatattattatgtcctgataatgcttcaactgcggcatccatacattgctgtgaacgtaacccgctgttgattctgctctggaacttcgctgatggactacctgctccatccgatactccagagaactgggatctctgatatataacaccagatattgaattagggtatgcagagcttcttactctgtttaataccacattagctactgcaagcttaccttcgtatgactcgccgttagcttcccagtcaatgatacatgcaagaagatataattcttcatcactcacgctcatcgtaggattatatgttatatctgatccagatatagtgtttgatataatcgactgtactctggcctcctcagcttttcttgctgcctcagcctcggctgcgattctttcctcttcagctattcttgcagcttcggcttctgcttccatagcctcagcttcttcaagtgtatatcctgtaagaatatcttcctcacttatagaagctgtaatcgcttctgcttcctgaccaaacaggagagctgccgttttagtataaccttcacaattaccagagcttatctttgtccagccttcacttatctgtaacacatctacttctgtgttcttgtaaagtcttccgacaacctctgaatctgaatccataccctgatatacatcaagataaggatctgtaatcgcaagcgctttgtcatgcatctggccttttgtttcttcctgtactgttaatactgtttcttcaacattggctgcgtatgatgcaactctgatctcggtatcagtaattgtactttcgtgttgctcataggtaggtttcgcgtctgtcactttaggaagcactggcatcatcatcactaccagcgtagcacctaaacaacaagcagctttactacttctaagtttcataaagtttttccctttccggcacaagttgttaaatgcgcctacaaaatgttacagaattgttacattttgttacgaaagtataatagcaaagttaagccgttttgtcaaatttgttacaaaaaaccgcagaagtgcatacttctgcggtttaaaggcaacattatccattttataaatataaaatatttattaagttgtcgcccatctatgagcaagctcatgtgggtttagaccttttgaccctggtatcatgttatatagctgtaataattataatctctgtcttacagcctcatatgttaatatcgtacatgctattgctgcatttagcgattctactttcccctgcataggaatccttactagctcatctgctttatctgtaagcttatctgtaagcccatttccttcattgccaatcataaatgaagttggctgtgtatagtcctttacattataattatcagtccccttaagatgtgcagcatataccctgatacctttctgcttacattcttctacagcttcacatatatcatccacatatataaccggcacacggtacaacgaacccatagttgaacgtatagtttttggattatatatatctactgtgttacagctcataataacacctgtaacaccagctccctctgccattcttattattgtgccaagatttccaggatcctgaagattctctagtataagcaataatggctgtattgtattgctgtttatatgcatatctcttccaaacagatcttcaatagtaatctctgacatcttaacaacagccattattccctgtggtgtctgtgtgtctgacatacggataaacacattatctgacacagcctcaagaatatcttttcctaatgcttcataatccatctttttaaggaattcctcattatcggccttaaatgtctcagaaacatataccttaacaagtctgtctctaggtgcttctgacaccatctttattccctcaacaacaaactgtttttcttcttttcttaactttgacttcttctgcagattaactatatgcttaacctgtgaactgcttgtacttgtaatcattctattttaccagccagtaattatatctaattaattaccagctttccctttcttaaattccaatatgtaattccataatactaaactaataacaatccagcaagcaatagttattgtaatttttatctattgcataagcaccctgattattataaatacacaggttattataaatgctgtcacacatcttttaacagaaaatacagcaagtctttgagggttatttttataatatttcaccattactgtttccccttctttagcgtacattgatacctgaatcatattatcagacacaatatttctgccctctgccttatatttaacaactgcccattgtgaatttctgaaatttgttccattcttattaacatatcttgtctttataatcttagcatcagctttctctaccctgccacccataaatataagctggcatccctgtatgagcgaatataaaagcgttattactataatagcatttataaataagacatcatttctcatatatactgcctttctgtccattttcccagcctgtatctattcccagaacagctcatcaagtgtcttatcaagcaccttgcatatagctatgcataggttaatcgtagggttatagtcccccttctctatagcactgatcgtctgtcttgaaacattacacagctttgccaattcatcctgtgataagtccttagctgcccttgcagcctttaatttaagattcttcatagccttttctttcttttatatatttatggataaatactgttaacatcaacaaaaatccaaccagtaatatcagattacagccaccattatcaaacataagctttccgtcactcttaatagttccatcaattatatgaccggctgctgatatggcattcgctattatgattattgcaaccataactacataagccagccccttttcattcacagaaaaaaatgctccattctcaatcgcatgtattgcataaacatccacacttaacatcatcgctgcaaaaagaaaaaagttattatcaaatggtacacttatcctggcttcattaattatacaaagcatacctgtcataacaagcattataaaaaagcctctcttatatccctctgctctaatagcaagctgtctttcatcatactcacaatttcttttactatatgtggttaataacataacagctgcaaatacaataacaaaaatcaataataatataaaaccatccataacaatacctcctgttgtaataaccacagccaatatagctgtgttgttaataatcatccatgcatcagcttagcacactattaatatatgatattaattacatattgtcaagtatattttacattttgcaatatatagcaatcacaattactgttgtaatagttgttatattttcagttataatatcagttatcaaccctattacgaatgacgacaactaataaaagacggatacctgtcacccacagatacccgtccggataaataaaactgattgaataaaaatgcattattaaaactgattaatataaaagctgcataaacacccgacccgcttaaccacttaattagaaagcagagaacttatattaaactcatactcgcttatatcctttgtcatggcaagtgcttcatctatatcataatcaacaaacttgccattcttataagctacaagtctgttactctttcctgcaaccaaaaggtcaactgcatatgaacccataatagatgcatacattctgtccttacatgtaggtgaaccacctctctgcatgtagccaagaatagttgcccttgtttctatacctgttgctgcttcgattcttcttgccatgcctgttgagtgtccgataccctcagcattgataataagatgatgcttcttgcctttctttctgccatcaataatatggttaataatagcctgctcgtctccattatatctttctgggagaagaatatcctctgcaccattcgcaataccacaccaaagtgcaatatagcctgcattacgtcccataacctcgataatgctgcatctttcatgtgatgtagaagtatctcttatcttgtctatagcctgcatagctgtattgactgctgtatcgaatccgatagtataatctgtacatgcaatatcaaggtcaatagttcctggaagtccaatcgtgttaacacctgcatctgcaagcttctgtgcgcctctgaacgaaccatcaccaccgataactaccatgccatcaataccatgcttcttacatacctctgctgccttcttctgtccttcttctgtcatgaactccagacacctggctgtataaagaactgtaccacctctctgtatgatatctgatacactctttttatccatatcaataatctcatcattgataagaccattgtaacccttctgtattccttttaccttaagtcctttgttgatagctgttcttacgacagctcttatcgcaggattcataccaggggcatcgccaccgcttgttaacacaccgattgtcttaatttctttagccatatatatttcccctttcatctaaagtctatgaccttttaccgtaaaagatatattgtccttttaatattttaatatcactgtcattaatagtaccacaaaatcaaaaaataatatattgttttacaaaaaatttatcatattttacgttgtagtcacattcttctcaccatacatcgactgaagcttctgtataagttcagaatccacccttatagtgcgacttgctggaagtgtaagtcttttgttttctttagtacagtatatcaccactgtatcctttccatcagaattatataatattccatataattcatccttcttatcctcataatctgacagactggcaaaccttatccacaattttcttggaatactggcaaaatccacaaccttatcacatataagcttggcattttcatcaacattggcctgtacctttcccgtaacaaaaaccttttcagcatggtctataacaacacggtttgctgtaaagctgttaggaaataccaccacctcaactgttccaacaacatcttctactgtaaggaaagccatcagctgtcctttctttgttgtcttaatagtcttttcagttatcaatccacctatagttgctatagcaccatctcttgcctttgtctcaccaagttcatcatccacttcaaaatcagatgaaacattggttatatatttgttgaccatacctgtatattcatcaagtggatgcccacttacatacacacccagaatctccttttcgtaacctaaaagctcctcctttgtgtactctgcaacatccggaattcttatctcgaaagctttcttatcctcttctgctgcaaaatcaaaaagcgacatctgtcctgtcatggaatccttgttatgctttattgcactgtcaagcatgctttccgagactatcatcatggattttcttgtatgtccaaatgtatcaaatgcacctgccttaacgaaattctctattgcacgcctgttaagtgcctgcgacatccttgtcacgaaatcctgcatagatataaagctgccattttccctacgttcctttaggatagcctgtatagtaggtcttccaagtgacttgatagcagccatcgcaaatcttatcttcccgttttctactgtaaactccatctgtgactcgttgacatccggtggaagaatagctatattcatctgtttgcatgcatatatatatcctgcaacctttgatgtattgtcaataaccgaagtcataagggctgccatgaattcaaccggataatatgtcttaagatatgctgtctggaatgatacaacagcataacatgcagcatgtgacttattgaaggcatacttggcgaagtcaatcatatcatcatatatttttccagccaccttctcatctatgccattgttaacacagcccttaacaccttcatctggattgccgtatataaagttcttacgctcctgctccataacataagcctttttcttagacatggcacgccttaccaggtcacttcgtccccaggaatatccagccagatcacgtactatctgcataacctgttcctgatatacaatacagccatatgttggtttaagtatagcctcaagctgtggacacgcatatgttacactatcctggttgttctttcccttaatgtactgtggaataaagtccataggccccggtctgtacagtgaaatcccggctataagatcttctaacgatcttggttttagttccttcataaacgacttcatgccagcactttcaagctggaatataccatcacatttaccagtactgatggcatcaaaaacgcccttgtcggagtaatcaatatcgtggatagagaagcctttattatgtttttttataagattctctgcatcttttatcacagtaagagttcttaaccctaagaaatccatcttaagaagccccagttcttcaagtgttgtcatgacaaactgtgcaacaactgcaccatctgaacctgttgaaagcggaacataatcctcaactggctttccacagataagaacacccgctgcatgcatagaagcatgtcttggaagaccttcaagccttttactcttatctataaggtcctttaccacttcattgttttcgtattcacttttaagatccggattctctgcaagtgccttatctatagttatgcctatctctcttggcaccatctttgctatgttatcaaccatggcataaggcagatccagtactcttcctacgtcctttataacagctcttgccgccatagtaccaaaggtaactatctgtgaaacacaatccttgccatatttttctacgacataatctatgacctcctgtcttctttcataacagaaatccacatcaatatcgggcatggatactcgctccggattaagaaaacgttcaaaaataagactatatttaataggatcaaggtcagttatctcaagacaatatgatactatacttcctgccgcagagcctcttcctggtcctaccggaatatcatgtcttttggcaaagttgatataatcccacacgataagaaaataatccacatatcccatagaatagataactgacagttcataagcaagtctttggaatatgttattagtatcctccgctatctttataacaacatcttttctgtcttctacgtactcctcctttgcaagccttacaaactcttcaacagatatatccgctgcctgctcaggatatcttttcttaagtccctcataacacagataattaagataagtccatgatgtaaagccttctggcacagcaaatcttggaagctttgtcacaccgaattcaatctcgacgttacatctttttgctatcttttcagtattagccagtgcctgcggtgcatacttaaataattcttccatctcctcaggtgatttaagataatactgtccgcctgtataacgcatcctgttctcatccgtaaccttcttacctgtctgtatacacagcagaatatcatgtgcatcagcatcatctgcatacgtataatgcacatcattagtgcatataagctctatccctgtttcctctgacattctaagaagctgtggattaacataatgctgctctgctataccatgatcctgcagttcaagaaagaaattatcctttccaaatatatcctgataagaaagtgccaccctcttagcttcttcatacatgcctcttgctaagtatctttgcacttcacctgcaagacaggcactagtggctatgattccttcatggaattccctaagaagctctttatcaactcttggcttatagtaaaaaccctccgtgaaacctcttgagactatcttcatcagattctgataaccagtattattctcagcaagcagcacaagatggttatacttatcctcacccgtccctgcttccttatcgaatcttgagccaggggctacatacacctcacatccaagaacaggcttaatacctgcctccttagctgccttataaaaatctatgacaccatacataactccgtgatcagttattgcaagactgtccatgccaagctctgcagcacgcttagttatctctttaattttacttgaaccatctaacagcgaatactccgtatgaacgtgtaaatgtgtaaatgacatattatattttcctccatatatgaccataaaatatctgtcatatcaattaacattgattgttctatatctgtttaatatatagaagaaattctatcatatgtcatagttcttttcaaacatttagactgcaatatacctgacgaaattcaggctgcaatataccctgcagctatgccaagtattgcacttagaacaattattataaccgggtgcaccttcttaaacgacaatatcaatgcaagtgcaagtattcctatagaaacatatgtaccagatgttttaaaaacctctaatgtaaatccctctggaataaatacctgcctgccaactgatataaccgaagttcctataagtccgacaactgcaggcttaagaccactcatacagccctttacaacaccactattcttaaaccttttataacatccggctattatgagtattattataaatgatggcagcacaacgccaagtgttgcacacacagagcctgcaacaccagcaacctcttcacctacataggttgccacattgactgcaaaggaaccaggagtgctttcactaactgctataaagttaataatatcctgttcactcatccagccatgtgccacaacttcgctctctactagaggaagcatcgcataacctcctccgaaggtgaaggcacctatcttaaaaaatgtccacaataatcttatatatatcatacactgcttctttcctgatatttaatcataatcatttcttttttgtatttatataagctgtgatcagaccaaataatgcacagccagctataacaattattacattaacagatgtaaatgcactcaaaataaatgccgcagccataacaatatatgacaccgcacacttctcaacattcttatacataagccataaagcccttattataagtgcaagtacacctgcccttattccactaaatgcatactttactacctgtacatcctgaaagctgtttaacacaaaagaaatcgcaagtattattataaatgatggaagtaccatgccaacagttccagcaactgctcccaaaaaaccacctattcgatatccgacaaaggttgatgcatttatcgctataggacccggcgtactctctgctatagctacaatatcaagtatatcatcatcatcgacccattttcttttaacaacagtttctctttgaataagcggaatcatcgcataaccaccaccaaaagtaaatatgcctattttcataaatgttgtaaatatctgaaaaagctgtgtaagcttctttttattttctttcatacgaaatcctttaataattatttttagtttttctgctgcaatacatatagaatatcacatttaacagaataataaaagtgattgcagcaggtgcaaaacctatagtcaatcctttcaacaagagaataaataggaattactgatataatatgaagttatcatgggtataaactaaacgcaagaatataataaatgtattaattgatgtttctcatatacatggttttgcgtccggctcctgttttaataatagctccttcttctacaagttttttaagtgcagattcaacagaggagctgccaatgctgggacatgaaagtaaggcatactgttttgaaaagcatcaggtactcctttctcccaaatgttgcttctttctcccgattataatatattttgggaaaaaaacaagagaaatgggagtaacattttattattctatatattagccacttaaatataatttattctaatccatatacagaaaacaaacggggtaatgcctaagaaattatccgcattattataattataagtgaatctattatgtaattttaaataaacgatactgtctctgttaatgcttttctgctgttatgattagggagaggagtagttgttttgtcagcaacaccaagattaagaagcattaatatttcctcatcttctggtaaattaaaagcttttgccagttcatcaggattaaagaagttaatccagcagctgtcaacaccttcattgtatgcagctaacataagatgtgttgcaacgatagttgcgtcttctattccagagtttcttttttctcccggataagtgaacacattatttttacatatatatgctgttccttaagattctttgctgtaggagctactcttcctgcttccaagatagcatctaatttatcttttcctatttgttcgctgctaaattttttacatgaatatctgtttttaattacatctgaaaattccataaataaccttcctttcagcgaattttatctacgctaattatatcacttatacaataaaatcccagcactgtaattatgttaagaaatcatcatctatcatttgtttatattctgaaaagtcaccatcattaaaattatatctgtatcttacatcttcatcgtctaccacgcatcgaagtatcattgtatcatcttctatgtacagataattttccggatttgaataattctgtttcaaaattgcttcagacaaacgatatgcaattactgttgaaacttcaaaaatcgccgaatttgctccttctattatacatggaatctgagaatatgcatatagttatgaatataattctatttcatctgtatcgaatgctttatcagcatctctctcctttaaaaaatattcataacaattttttattaaatcgcaaaacatctctttgtcaaactcttcatcacatacaaattctgttttggctaattccaataaatctctaaatctacttatcattcttaatgctgttttatttaccataagtattatcctccttaaatcttttccagccagttattcagccattcttcgttgttattaatatgcatgccaacaataatcacatatccatatttttttgccagattataaaggtactgtatacaatatttatacagctcctgactcatattttcatatgtggactgtctgctttgtaaaaacctgtaatgttcgattaaaataatattgtattctttatgtccgtcgccatctgataaaagttcaacatttctatcatctatagctttaaattgaatattatcatattgtgacttaaataatttattagcctcatcacatatttcattaaaacttttttcatcattttctttattagatgaaaaagcttgctcatacatatgtgtttctattctttgtaatatgttattatgcacctccttagccttatgatttgaacacatatatagcacggacttatttttcattatcaaataatccgcgatcatttcaaatgtatcatatcgtccgtatcctttaatattattggtaacatatatctttcctggttcaataatgtgtcggattttatctaaccatatttgtgctaattgccagttatatgcttccataacattatctattatattaaaatccaattgatcttccttctttctctgatgtttctttaacttccagattattaaaatcctcggcttctaatgttctcagttctttttccgaaggcttgcctgtacttcttgctattcttaatgtctgattcattaatgcctgttcatatatatttcttacaaagcggccatttccaaaatccttatgcttacatgcatgtccgaatatttcaataactttttcatgcacttcatcagataatctgacccctgattttgatgccatagatatcaatatttcatataattcttcttcggcgtaatcatcaaaattaatatgaaatgctatcctgctggtaagccctggattggtatcaagaaattgctgcattttgtccggatatccggcaagaataacaatagtatcctccctgttattctccatctcctgaaccagcgtgttaattgcctcatctccatataagcctcttctgccatctacaagagaataagcttcatctataaacaacacatttcccttagcccttctgaaaagactttttaccttgggagctgtctgtcctacatattccccgacaagatcacttctaccagcctctattaaagctccctccgggagtattttattgtctcttaaaatgtctgcaaataacctcgcaactgttgtctttgcggtacccggattacctgtaaataccatatgtacagcactcaacggtggttcaattccattcgcgcgatatatttttcttgtattataataacttataatcttatctataatgtttttagggttgttaagacctatcatggatttaagttcaagatatgcatttccttctctttccttaatccgttccacatgctttatctcataatctgcatactgtgaatatatatctgtacacagaatatttccaagacatttatgtatttttgcatctaattcatccggataatattctatgtcgtctgctatatctattttatttgcgacagattcatctataccattatcaattaaatccctttttatatattctctggcttgggctcccatatatgtgttctgtcttatttcacaaaaattggtgttgtgggcactatcttttattaattccttaattcgtttattgcctcgtctgacaaatacaaatgtcagcacatttgacgaatactcttctatcatcagcccaattctatctgctgccttgcgcaatctgttattatcgtattcatcatcaacatctttcatatcaggaataacaattcctacacttgatgcctcacaatacgaatatccatacgattcattctggtctgacagcaatcctgatatccatattcggctgcttcttaacctgttttgcttatacaatgctgctattatgactttcgcgatttcatatccgacactgttcctgctacaggttattatatattgcaccggattccccagataattagtagtattcctgttaacaaatattctttccagttctggaagtagtgtttctgaacaattaagttttactgccttgtcatatagctgcttctttaaaatgtttgtatctacatatatttcacgacatttctttcttctttcaccgctcttcataaaatcgcaactgaaaaatctgtctacgacttcataatccagatgaaatagtctgtcttccatcttattaacccggtcatatgtagtctcccgaatattaaaatcatatattttcataccgcatttttcgatatagccatatatgtgctccgttgcattttccttataattattagaaataaccctgaattctactcttccattagatatatccgtatctatataacacacaaatacaacaatcttatactcatgctcacccgaatactctattgcacaatcctcaagatcacaccagattctctcatcctgatcattgatacttcgttcaccattactatttttcaaatatttttctacaattctacaactttgaatcttggcagatgcctcataaaataacataatcccacaccctttcccatagttaataacttacgtatctattattaattatataaaaggcgtgggactatattggtacatgaatgctattgcttagtatttgttttgtgcaatcataatttgtcaaatacattatttattaagtctacatattcctgatttcgttttattgcagcaggatgataaacattaatagccggaacaatcttcccatttatatcaagtttataatacatatctatatcaggctctgatttttttctattttcccattctttcttgcttttaaaataatcatatacatgatcaataatttgccaatatgagccgcaacatataatataatcaggattaattatttctatttctctttttataaattcgttgtatttttcagcatacttattaagttctttgaaatcagtagaagatgaaccacctcttttgttaatattcataaatgctatctgtttttttatttcattgaaatcagaatatgtatattcattttttatgtttccgtctaaccttgcctttataatattctgcattgcaataattctttgaaaaattctcttttttcgagaactttcttcatcctttaaataaaatcttccatcatcaacaaatctttgtcctgttgcgttggcctctcttgcaatatataacactctttttccatctaaaattggagatgtccacatttttacatcaacaaagccatctcttgaaaaagattttatatccactttatcgtttttatattctttttctttagcctgctctgtcgtccatataccaaataaatcctcaagataaaatatattatcaagatttttatacttcattttccctctcgcattctattcatatcgttttagtgcctgcttcaagtcatcaataacctgttcaaccagactatcagggcttacaattgtaatatgtcttgcatattgtgttgcaaaacatctcatagccataagattagcatgaaccgttaccattacctcatcttctgaataatcagcaaatttgatgtctttaccaaaccagtcaagaagctctgatataatgtaacgatatgcacggaaatgaactatcccgctatcacctgaaaacatatatatatgatccgccatatgctttgacagattcagaccattctccaaacctttaactttcttcattggctttctcttagtatcaagaagtacaatatctgttatccagtcaatcctgtaattagcatagttatcatatttgtcataattacatataagataatatcttccgtttgtcgcaaccatctgatatggattaattatatattcccttggtgtaccttcactattacatctgttatgaagcttataatccatgtcataatagttataacgaaattttacctgttttcctttgcttattgcttcatccaatatctctatattgtaaaatagctgtttgttaacaagcggattttcctgcagattacatatatgcttcacgcttgacttaaaataacagtttgacaggctttccaacttctcaataagttcagtacactgtttatagggaattgactttgaaaaaagcagactatctataagaagcctcaactctgaattactaaatgttctttctatgtaccagtctgtatatatagtttcctgctccccattctttttggttcttatctgttctgtatattcaatatcatatccacattccaacagatatgacagatttcttcttacggctttcctgtctacttccataccatattcttttctaagaatatcaataaaatcattttgtttcagtctgtgttcagcatctgaatatttgttaagaatatcaagtatattaataaccagcagtttttttgacattacctcatacatatatcttcccctactcttcaaccgcaatattataatcaagcacctgcttaagcagataattgctcatatttaagactttcatattaaaatcactttcattaaacagcagcgatacagcaaaaagattagcctcacattcaacatttttaaatgcatttttacttgttaccgcaaaattattaatatcatctgaatgaagaagtgcatgtcctaattcatgtgcacacaaagccagctggcttttatgctcatatcttccattaataattataattgttggataattatccgaccttatcgtatatgctttcctgtctatcggaagcattttacttacaactactcttattccgtacttttctgctaattcaaaaggattccttgtattataattctcccttaaatcttctgccagcttctttatatctttagccttcatgttgtcacctacctgtacttatagctcacaagctgtaactgttgtaagatttcatttgcgaatgcaaccattgtttcatcgtccatcttggatggatcatatcctccatatgcagcaactgtcggaagcttaagcaggaattccattgcttccttcggatcttcaaatgttcctggaagcttgttcgtatcatcacttttatcgtgagacatttctggtacattacccatcatctctgctggtgtggttccaagaacattacacattttttcaaatgttgaaacgggaattttaacgatgcttgaatcctcgtatctgtaaactgtggatactgacacacccaattcctttgcaatatattctgcagatattttctgttctttcctttttgcttttaatctctgccctaattccatatctaatcaatctcctgaatactctatttatatgttaattttattctactctttttttgcatttacgcaagttattttttgcatatttgcaattttatattgacatactagcattaatgcattatatttcttttgtaattcgcatttatgcaaatataaggagggtaaaaatacttgaaataatggatacagattatcaatcatcaaatatgccaaacataaaagtaattggcgtcggaggttgcggtaataatgcaattaacagacttgcacaccagactccttatcctattcaattcgttgctattaatacagatcagatggtacttgataaatcagaggctgacacatgcattactattggaaaaaagctgactggcggatttggtgctggtgggaatccagaaattgcctatgcagctgctgaagaaagtgctgatgaaattaaagaaattataaacgatgcaaatatggtaattcttactgccggtatgggaggaggtacaggtactggagcactgccatacattgctaagatgtgcaaggacctaggaattcttacggtagcagtcgttactacacctttcagctttgagaatcctaaccgctctgatgtggcccgtgcaggaatacaggatcttgaaaagtgtgttgataccttgctcgtaatatcaaatgataaactgcttacatctaatgagaaaattgtaactatgtcatctgcatttactcttgcagattctgtattaaagaattcaattgacactattaccaatattgtgtttaactgcggtactgtaaatcttgactttaatgatttaaaaactgttctcggagacaaagggtacggacacttaggaataggatatgctgatgagaatacctctattactgatgctgtcaaacaggctgttaattcacctttacttagcactaatctttcaggtgcaaagtatgttatgataaattcatctggagatgttaatcttatcgaacttaataatgctatccagtatattcaggaaattgtcggaacggaagctaaaatcatgtggggtaccgtttcttctaaagaacaacttgaggataataaaaattcccttataaccattattgcaactgggcttaatgattccagtgacactaataaaactagtcctaccaacctgcctatgaaaaatacttataataccgttaaagcttctgacataaataatcttttagctaagtcagaaaagaaagaaaatgaacttgtcattcctacttttctgcagtcaagaatgaaaaaatagggggttcccctatttttccattctctaacctgctttaattttcaacatttcccagctctgcccgaaacatcagtcttctcgttcccctgatattctcaaactggatttcatatgtctgcgtaaccttatcaaccttaacaatctcgccagttccaaataccttatgtctgactttatctccaacctcgaatacggcctttggcagcatctgctcagtcacacctctgattaatactctgctgttgttgatacagtcaagaagattagtatcaatgtcacttaaaaatgctgatggtcttgcgccaaaacgcccatctttctttctataagtgctgaggtaaagcatattcttagccctcgtcatcgcaacatacaacaatcttctttcctcttcatattcgtcttcattacgaagcctgctacttggaaactgtccttcaacgagtcctggtacaaatactgtatcaaactcaagtccttttgctgtatgaattgtcattacttttacaacattatactctccgtcctcatcttgcgctgaaaataatgcaaaatggcttaacagatcagccagctcaaccttttcctgattatcttcctccaatgccgtaatagtcctgataagctctgacacattatcaagtctggtctggtcgatatcctgctccaatgcctgacgatatcccatatcaagacatttgtttactatatcagtacaggtataagcaacatatgtatcatgcaattcactgattgcattgtaatattctataacatttttctgtgttatatcgccattttcaatctgctttccaagtgccttgaaaagactgcagttgttctgtgctgctgcatttttaagcttctcaacagacttcttaccaaagccccttctcggtctggatatagtatacagcaaatccatgtccgtaaggctgtacaccattctcatgtatgaaagcaccgttcttatctcttcgctttcatagaatttcgcaccgcttagtatcttatatggaacttttctttttataaatgcttcctctaacgaccttgtctgtgaagcagcccgcaccaatatagtatggtcgctgtacttcatattcttagcgacattatcaagaatagtatcagctatccacaaagactcattctcctcggtgccaggtgcattaaataccggcttatggccatctggtctgttagaaatcatctgcttttcaagcctgttctgattagcagatataagtgacttagccacatttacaatctgaggagtactcctgaaattctcagtaagtgaataatcctgcacattttcatgtgttttgtcaaaattaatcatgtattcagggtcagaaccgcgccatgtatatatattctggtcgtcatcacctaccacaaacagattctgatacaatccacttagaatgtgaagcagcatgtcctgtttcatattgacatcctgatactcgtcgcacagtacatactggcacttttcctgccagcgaatccgcacatcttcattcctgtttaaaatatataaagtgaaattaataaggtcttcaaagtccagagcataattgtcacactgtcttttaagataattatagaaaacctttttatccacatttttctcgctggaagcccttcttttaagctctgccttatcaacgcctgccataagctcaacataggacatatcctgcttggttatgtctatatcactcattatcttcttcgcagtattgtctttgagcgatattcccatattctctgccacgtccttaatcatctccagctctgccttcttatcaagaatcgtgaatgtcttaggaaatgtcagcctgtgaatctcctctttaagaaacatgttacaatatccgtgaaatgttcccataaaacagttggcgttatcaccaacaatattccttaatctgtgcttcatctgcgaagccgccttgtttgtaaatgtaagcgccacaatagatgatggctcaacaaacagttctgttatgagatatgctattctatatgtaagtacaaatgtttttcccgaacctggaactgacgcaacccttatgttgccttctgtctgtgttattgcctctgtctgttccttcgttgccttttctggtattttcataattatctttacctgtattgtgctactttcttgtatttattgtgatataatgttgcattattatattataaaccaatgcgatatcgaacatctattcgcttattatacactatttttatgtatatacaaacctcaattaaaataatatatcatttatatgtacccaaagtaggacataaaaaaatatttagtgtaatttgaaaaaaacgttaccatcgccatagataccattgcataaaccgttgtagtttgcctgacagttaacaagtgtgacagcaccttattgttttttttaattttgtcaaatactgcttctaatcttttctagctttttgacataacatcatatcatattgctatagcttttatatcaattatatcttttacttatttctgattaaatagtataatctagccgaagtaataaaaggaggatgctgttatggatgaaaatactctatttccaagagaagaaaaaactgatgttttatttaataaaattctaaatgatccatgggcttacaataagctttttcagacattttgcgataatctgttttgtaatgatgcttctgttacaacactttcaccactgcaattcaccaaatcattattcaactgctattccaataaagatttatctgcatttcttatggctataacacagaataccctgtttgatttacttaggaattcttttcttattccataccgctttaatgctgatggaaaccagaatcctgtcattatgacagatgataaaggtctattgttaccagaatatgcagatatttcccatgaaaaagattatcagcatttttataatatttacaaagagcttgataataataaaaatatgtatcttgctaaagcttacagatacagccatatatataataatgatcagtctgtagtagaacaacaggttcttgagaaaagcactggtatactgcttatccgcgaacttcctgatactgttaaaatgaaagaaaccgaagcagaggcttacagtgcagtatgggagcttatgcttaagcttgaaaaggagcttccaatggcatatatattctatggtcaggactcatttattgaacataacgaacgttttgatgagcttggaatcttccttcctaattcagtattcctacacaaccttgaacatcatgtcaagaaagctgaggcgattatatatgccaagaactaattatattgacatcatggaaaaaaatcatatggaaataccatggcatgactatactaacgctgatagtaatgctcttattgccaatgctgaccttatcgaaaaagcttctgttattggtcgtgtagggctgattatgctctcgtgtggaacaggtgcatggcgtgtacgtacatctatgaataagctttctaaagagcttggtgtaacatgtactgtagatgtcggtcttatgtctattgaatttaactgttttgatggcaatgactgtgtatcacaatcgcttagtattgctaatactggtgtcaacacctctaagctttacagaatggagcagtttgttgataattttcctaatgaagaagcatatcttactggtgaaatgattcacaaacgtcttgatgacattgaacagatacatacactatattctcctattatccttggtctgtctgctgccctcgcatgctgtggattcacatttcttcttggtggtggaccaatagagatgctttttgctttcattgctgctggagccggtaatttaataaggacaaagcttatcaagcatcactataccctgtttatgaatatagctatttctatttcagcttcatgccttatatatgcaatactgcttaagctggctattcttatgtttaatataccttctgtacatgaagctggttacatatgttctatgctgtttataatacctggatttccttttatcacaagcggtattgaccttgccaagcttgatttacggtccggtcttgaacggttgacatattcaataattattgtactggtagctactgtatttgcatggattatggcattattattacatttacaacctgaagaattcacaaccttacacctaggcaatatgcagcatcttatattaaggcttattgcaagcttctgtggagtgtttggattctctattatgtttaacagctctgtttccatggctgcaatgaccgctcttattggctgtattgccaatactctgcgccttgagcttattgactttacatgtatgcctgccgctgctgctgcttttattggtgctgctactgcaggacttctagcttcctttataaaacaatataacggatatccacgaatatcacttactgtaccttccatagttataatggttcctggactttacttgtaccgtgcaatatataattttggcacaatgtctctaacagatgcattctcatggtttacatctgccatcatgataattattgcgcttccactaggacttatatttgccagaatcattactgaccgcacattccgctattgtacataaatattacatttatacatttgttacaaaaattaccatttgttttagagccttaacagcgttaaaacaaatggtaaatcatcatacagcatcttcttatgcgcaatcctcctcaagcttaagtgtctttatgccaaatataaagtacaatacatgaaacagccacactatcccaagaacaatcctgccaacaggcactgcgtgcatcataataaaacctatactcataagaatagtgactgtaagcataattcttacctttgtctttactgtcatgcctttaccctgcacaaagctttcaagattctttttatacagtcttgtggatataaacttataatacggcttattgcaatattgcacatatttaatctaataatgcaaaaaggcacatggttagttatttctaaccatgtgccttaaaatatattataatttgcttatcatttcaaccactttaaccgatttattaatgatattatttttcaatatcaatatgtaagtgtcaaaagaataaaaataaaaaatgcggaaatgctacaaaaagctttataaaaaaatgcggaaaggtagatatgctacatttccaacctctccgaccatatctgcaccagtttttctactgaatatgcagcgtttgcaggacttgttgatggaagtgttactgcttttattccaagctcttcttcctgatatttcttataatatctggctgatgtcgcaccattgcagaacaccttggttatcttagactgctccagtataggctttaaatctgttggcacaacatttcttatgctgctgtcacttgagcctataatatcacagctatatatagtatcccacagggctatatgatatttatgaagcatcgccttcttttcttctattgttgctggaaccactattccgttatactcgctatcaggctggtcctttgttttaatgtcattgtatttacaatacagtacctctgccatgactttccagaatcggttctgtttatgtccataaaaaaacatctgctcccgcgactttactgatggcaggcttccaagaataagtattctggaatccgcatcatataatggcggaaacggatgtgttatgtgttcatatcttgagtctatattatccatgtttttgcactatccctctctatttctatgactattttatacataatcattgtatatgtgacacatgccgatgcacattctatatgacataaagttcccatatatttttattttatatatataatgcattcagtcaaatatgttattcgtatttatcccatttactttttattcttctacagcaagatctccgcacaacctgtctgttacaagttcagcgcacctttgcttgtgtgctacatgaagtggatgattctgaaactgctgtaaggctttctcgtctcttagctctgcatagaataccagatcatagcctccggcaatattagttcctatgcttgcatttataagtccatctatgtgtccattcatagtattaactgaagcctgtaagaatttaagtgtttctttctctttatgttctgactttactttatctgtgtaattccagaataatatatgtcttatcattatattcaccccattgacattttaaagccaccagttgttgcgagttctacgggaaaataatatgagtgaacctagactccaacaataccgcagagcagtacccctcccaggactggtgacatatgtattataatactattctacaaagaagcaagcttttactttaatctggattttatcttatccatgttataatctggtgcttctgctacaactgcatcatatagtgactttacatcttgctcttcttcctctatttctgaagctattgtacttaattctttacccttttttactttcttgataattatttctataatttgttcttgtttgccaccttctaaaaattccttcattgcgctccacatttccacattaaccacctttctttccctttcattattaactattttaatgagttcttttgttcctgtcattttgcctatcatttctatgaaatctatagacaaataattatctgcataattctttgctatatactcaaaattcttttcatatatactatgcataatatcaaacatagcctttacatctttattagtaaagttatacttttctatttttttcttttatctcgttatactcttttatatatcctaatgtatcataaacatctctttaactcgttatacctcataactgacttatgattagccagccagtatattataataagcttatacttgccatttattaaagataatgtataaccaaaatctgtatctaatatattttcccctgtatggcagcaatccgttttggggatacttgctcctgtataacaacaatcaattttctgtgtattttctgacttacagatacagctatgttcattattatcattgttattatgcacgatttgtttttatctcctttaatttctacacatttatcaattatctattttcagttatattttcaattatatatttatgttattatacttacctgaaagcaagtactgcacttttaggtgtgtacttcctttttgtaataatttaatgtatattacatatacgggcaatactaatactgatgccctaaaatgccataaaagcatttttaacttttgtcaaaagtaaaatgaggagttggtgaaatatggttttttctattgaaaaattacgtccaataagagaaggaatgactatttcaagagattcaaaacttggtgatttgactaaggtaacttacttttcacttggaaaagatacttctataagtcaggaaagctatgacagaatgactatgtatataggagcttcaggatggggagaattcattataggtgaagctaaaaagaaagtttcattacatcctgatgaagcaattattatcccaccacatactctatgtggtatgcagacatcagaaggattggtgtatacagaattaatattggaaaaggagaacaatatgaacgcaaatgtaaaaacaaatgaagtattcgcacttaagaatcttatatcttatgaggaaggcagcatcgctaatatggatgttataagtaacccttctatgaaatatgtacttatggctttcgatgaaggtacagggcttacacctcacagagcacctggtaatgctattgtattcgcacttgaaggaaaagctactatcggatatgaaggaaaagactatgagcttaaagagggtgaatgcttccgtttcgaaaagaatggtcttcatagcgtaacagccaatggaaagttcaagatggcacttttacttgtgcttgaataataagtattgtcatttaggtaagttattgattagataagttgtttcttatggaatcgtttaagaagcttattaattatcaaggatttactccattatatataattgcttgtgaaattgacactatttgcttttttacgcgaatagtgtcaaaccttctttcctttttttcttgcgagttttgactcagatttatttttttgctaattgagtcaaacataatttaatgaaagttacttaaataacaatagctctcacacattctctgatacaacaccaccttttactacatttacactatctatatctatagttataccagcacctgctttttcttcattgtaatccttcgcagcagatactgcctgtaaaaacaccactattcctatgcagaataaaactgcaatcattcctacacccttgttaatatctcctgtgagctgtgatactatacttacaactgttgttccaagaaatgaagcaccttttccacatatgtccataagtccgaagtattcaccatttttctcttctggaataatctttgtaaagtaagagcgtgataatgcctgtattccaccctgaaacattccaaccagaattgcaagtatccagaactgtagctggcttcttaagaatatcgcgaatactgctattccaagatatgccactatacagaccaatataagcttttcagtactcaccttatatgacagtctgccaaatattattgcacatggaaatgctactatctgtgtaacaagcaatgcaagtaataatcctgtactatcaagccctaatgctgaaccatacgctgttgccatatctataattgtgtacacaccatctatataaaagaaaaacgcaagcagaaataaaaatatatgtttttctttttttatatttttgcaggtaccatacagtctcttaaagctttctcttatagcatgtggctttctttcaacataattcttctgttcatacttctttatatgtggaagcgacatgccaagccaccatactgctactattacaaatgctatgcccatagccatttccatgcttattccaatatttgatgagccgagcaccagcaacagacatccaacaaatggtatgcagctacctatatagccccacgcaaacccctgtgatgatacataatccattctcttttcatcagttacatcaacaagcattgagtcgtaaaatataagacttgacgaaaaacctatctttgctataacaaacacaataagaaatataagccatttaacacacgccccaagcatcgcacaggcaatactgccaataagtattgatataagaaaaactggttttttgaagcctttagtatctgcaagagttccacacacaggtccaagtagtgcaacaatgattgtgcatattgatgcagcatatccccaataagcaagataattcacagatgaaatccctgctttacccgcaagataattaaagtaaatcggtattatagtcgatacaagaagcgcaaatgctgaattaccaacgtcatacataatccatcttttttcttttccagtaagtttaacattcatatttcagcttcccctctttcacatcacactttatactatccttagcatctgatcccatatctggataaacgacctcctcacacagttttgaaccaaatgtataattatacactttattgtattctatctttccatatgctgatgccctgaattcacctatgagattgaccgcaagaagtctggcattatcatacaactcatataaccgctttgtactatcactgcaaataggattctccttgtagttaacaagaagtccatgcatttccttataattaccagttatgcgaagtagtgcatatataaacattcttttcaatcttgatggcgctacaagaagtttattatacgatatcatcccctctagtgctttaactatgtcatcacttgtcagataatcataaaatctgcatatatatgaagcatttgtattattagccttaatatggccggtaagactatgtgttatcggatcataaccatccttgatcataagacttctatcgaattccacttctatctctgtatggctcacaccatccttagcaatcttttcatctatatatccatgacagctgacatcaagtgcaaagtgacagcaatacccatatatatacgcaagcaatgcctctttatcatcatcatctgcctcacaaaaaagctttcctgctttcttaaaaaaatcaagaccacttttttcgtgcatgtcatatccctgtttattaacagcgcatacagcaagcggctggtaatagaataatatatctggtccgtgcaaaccaatatcatacaattctttatgattattaatagttgttcttgcaagcgctggcagacttttatatacctcctgccccatcctgtaatgtgcatatgttgatggcataaacatcctctccatttctgaatttacattcctaatctttacattattgattttctatatttctaattttctatgttacatatgtcagaagtcgcagaagtacatttatacttcctatctcttataatgctcttacttcgatatcgttcttactctgatatcgttcttactctgatattattcttcccctgacatactttatagtctaaaaaatatttgtaaaatccaataacaacaggacgtaaattatacgtaaattattgttaaactaaatattagttggtgacgaacggatgacaaaagtgagaaatcagactttatgtacattaatactacttctcgtttgttaccttaaatactataaaaccaaaaacataaaaacaatcaatgcaatttatattaaaggtcagtgaccttttgacaccctaatcctatgacataaaaaaacagggattgcgcactaatcctttagtgtgcaatccctagcctgacatatgataaatctaaattctttctgcgagcaaattacccattgccttacatccaactttatttcatttctattgttaaagttcacaaatcaacaaatgtctcctatgttactcatctaagataagtacccgtttcccattcttatatggatactcacgaaccttcaatacatattccaaatttacaatctgcaatccatctttattctcaagcacaactccattgtcgctcacttcttttaccacgccgtccgcatgtccatccaataatttaatatatacatctttttccataaatcgacttaacaattctttcatgattgcaatatcctttcttctttgctctgaattttttctgtattttacatgtctgatagctgcggatttttgtcttctcttacgaagtaggtaaagcaagaatatccacgcaagcactaccaaccatatataccatgtattttgcatatatctgtcctttccttgtatattcatataaggtctcctggctgtaactcatcaaaaatcaaaacaattccggatttttacataatcttattaccagattttgaatatttcagacattccttgcaatatattgatacattaattatccatatcagacatacaataaatgatggaaagaaaccaataccaaacataagtgcactgatagcaagaataattgaaagaatgctgcacacactattagtcacattaaatgctttaaatgcacatttaccaactataatcttctctgcttcatcacaggtatcaagccactttttctgaaacttcatatcatatactgatgctgttttttccggattcatcacctttacacagtctacacttttctgctgtataataaccccctctgccataatagctaaaaatgctacgatagcaacatcaaatcctatcatgttcttagcattttcaaacattgtaataccacctgcgtatgatgctgcaataagaaaatatgaaattataagtgagccactcgtaaaccattggactatagacaacttattttcaatatgatccgatatttcttcatcttctccatcccacaaagcaagctgcttcttagcctttctgtaatatggcactgtcaccgctggaagcataactgcaagtgcaagcataagccatggtgcagttaatactacatacttacttaccactgcttttatatccccggacatagcatcaagtccattcgcagcaactaaatatcccattatacctccgactaaacctcctataacacaaaacaatatgaacttaggaagtgccttttggtttgctttcttaatctgttcattttccatcttttttttcctcctgtaaataaaatacttcttcaacagtgactccgcatacctttgcaatcgttaatgcaagtgttactgatggcgaataatctcctctttctataaggctgattgtctgtcgtgatactccacacagctttcccatctcctgctgattaactccaagcgcagccctgcgttcctttaaacgattcctcagtatcatacatacctcatttctatgcacgtttttcatattagttttgtgtcaagtgcgcgcatacacaaatctcacgtgtgaaatattgatttcacattgtatatccatatgaaaacttattgctcttttgacaatcttcgttatcaaaatgacaaattctcttgtcattttgcattatactcttgtcattatatactgtcaatacgtgaccataaaaatatactattcaatttattttgccaagataattatttaattgcgtaacacatctaaaataattcattatgtattatgttcaattcttataactgtaattattctattatatcgctattttccttatctatctgcaatgctgcatacaatatcatatcgtttatatttctaagatatattaaatacaaataatacaaaacaaaaaggaacatatcagacacaacctgcatctgatacattccctttattacttatttattggtttatctgtaatagacaactacttaattgctatgattatatgcatccgcaattatgcaatcacttattatgcattatccttcgatagcaattctgttgctgctttctatctgttctgctgctttcttaggaactgaaagtcttaagataccatcttcgtacttagcctttacatcctcctgctttatagcatcacctacataaaagcttctgctcatagaaccagcataacgctctttcctgatgtacttgccttccttcttttcttccttatcaagtcccttagctgcacttattgaaagatagccattattaagttctacattaatctcatccttcttaaagccaggtaaatctatatcaacttcgtatcctgcttctgtttcccttacatctgtcttcatttcgtgtcctgcatgcttaccatacaaagctttgtcaacttcagggaatccaaagttcatccaatcatcattaaataagttctctccaaaaatactaggcatcaacataagtcattcctccttgttataaaacacattaattatattgaaattagtttctttggaactgggatgcttcaggaatatcagaccggtacttttaatcatctttgttctgtacctctttttattcccttcctttgttcttgactatgttatagttctttttgttagccaagtcaagtgttgagtgctaattttatttttatttaataattatcgataatcctctgaatcatccccaatcattgcaatcattgcacaatctgaagcttttttacacttccaatacgcgccataaaatccatctgattccacatcaaaatgccttttctttatctacatcagctccttaatatcagctatgtttctccaaaactattattttatttgagatattacgaacagttggaatcttgcctattacacgataaacaggcataagttctttcattccttcaacaagactgacttcctgccaaacataaaattccggtatgattccttgcaactcctttccattctttactccccacgtgaattttgcattgcttccctctatggatttttctttcatatgctttacaacaaatggcgacatggtttcgaccattactgtagctttctgaaatgattttccaataatagcaaacatcttcctgatatctttctcacacaaatacatagtaagtccttcgattattaccagaacattctcaccgtgataatcgatatcatctacataagattcatccatcgcagactttgcaatctgatacactgaacccgtttcggtaaggaactgtctccttattttcattgtttctggcaagtctacattataccaacgcagatattttcccttcatccggtagcatcttgtatccagtccacatgcaatatttataacaactgtatttgcatttttctccaaatattttttaaccatacggtctaatacaattgttcttgctatcacaccatagctcatagccttatctttatctgctttggaaaagtcatagtccagcttttccacaatttctactgcaaactcatccttaaactttgcattttgttttcttgtttcttttgctcttgcatacaaagtctgcaccatcgtttccggaacgcctgtaatattcactttttctttcattatctattgccttctcccatagttttccttacaacgcaatgcattctcatacctttacggatttcaaatttttctaattttaatcctgcttttctacaacattttataaccacctctcttgttgggacatgaacatctccatgtccgcatatgtttgccagtggcatttccaatgtattcatcagccatatcaatactttgttgtcactggtcacatctctcagaatcaatcttccatttggacgaaggcatcgttttacactatcaaaaaatgcctgtggattgggataatgatggaaactcatagaacaaataattgcatcaaatgaatcgttttcaaaaggaaagttctcacagtctcctacaacaaatgtagcattcggaatatttttcttttttgcctgttcaatcatggcaggagtcaaatccagtcctgtataatgccggtctggatatttttctgataataaagaaatcatcggagccggtccgcagcctgcatccaataaatctctaaatgactccttctccaattcttccagaatatccgggtaatccttcttgcacatttcgtaaataccagcatggttgctttcatatcttcctgctgcttttgtaaactctttgattgacaactttttgtattcttcgtttttcatgtattttcctccaatcacacctacactaaaaatcaatattctcatagaaatctggcttctttttcattttcaaataagcggtcaaaacttatgttagtactgtctaacccatatcttctaaaaaaccgtgtgaaaacaaaactgtaattccacacggtttcttttcttatatattcagtatatcacttttatctggtttatcaaccaaattttgctcataaagtttttttgccagatgtatgcacaataatcctcatataaaaaagactaacaatcagcctttctgtcattaatacaaaaacttcctgattattagtctttttaagacattctaatatcctgctgctggtgtaaaggtttcctttacagcgcaatacttatcagcaagacatacaagccatgcttccctgcacataggtggaactactgtaagaggaaacatatgtcttgatattatgtttctttctatatctcccaattcatattccttctcagcattcttaagtgctgtacccggatgtgtaaaaccatggaaatgatgtccctttcttttctcgtgccagtcatataagaaataatcatgtaaaagtgcaccctttacaagcgccttttcattcacctttatgtgaaaaaactctgcaagcttaagacttgctcctgccactccaacactatgttcatatactgttgtcgaaccatgctgtatagccttcttctcgtgtacaagattacctttctgctctaactcagaaagaactacgttaaaaagatgctgtctctcctctgatagcttcaacttactctccattctgacataatactgttctgttataaactattacacatcagcttatatgtcatatatcccacatactacaagttactttttatgaatggtaacagagcattctgttttggttagttagttttctataacccacaaacccattcggcaacattttagcatatgttagtatatattacaatacctaaaatatattttcatatttttatacttagcgttatacttaataactttcttatcaaattattaaattcatatttaatttgctataaatttcaatttatatttatttttattgggaacttgaattagaacttacatttagaattaaaagttcataatattactgctcagaatctacgttaagtatgacatgcatagcttttttcaattctaagcaataatattatgatagatttttatattttgatatttattactaatttcgcctttggggattgtctctcaactgtttctcaattgtcttttaattgccttttgataatcaattgattatcaatctgacctacttgacctgatcagctttattctccagatttatcaactgcatccgcactctgatgatcggcattagaagaatcttccccctgtgaagattcaccaatcgaatagctgtcatccttctcagtattaacatcaccgatacccttccagatatctgtttcactaggaccattaagtgttgatgaatagcttccatcttcgttaaatgttacgctttctgcaaccttttcagaatgagtaaagcctgttgtatctgtaggctcaggaagtcccttgacttctctgaatatcttcataaactccttacctgtgatagtttcatggtcatacagataatgagctatcttatcaagtacatctctgttctctgtaagaagctgcttagcttcttcatagcactccttaagcatattcttaacttcttcatctatctgagctgctgtttcatctgaacagtcaagtcttgcattaccgttaagatatggatcatcaacagtagcaagattcataagaccgaatctgtctgacataccatactgtgttatcatggcctttgctatcttggtagccttctctatatcattggcagcaccagtagtaaccctgccaaaaacaatctcttctgcagcacgaccagctactaaagtaacaagtcttgccataagctcatccttattctgaagatacttctcttcctctggaacctgcataacatatccaagagaacccatagttctaggaacaattgtaatcttctgaactggctcagaatccttcttaagtgctgtaacaagtgcatgaccaacctcgtgataagcaactgtctgcttttcttccttactaagtactctgtccttcttttccttacctgctataactacctctacagcttcgaaaagatccttctgtgatacatactttcttcccgccttaacagctgcaatagcagcttcattaatcatattggcaaggtctgaacctacagcaccacttgttgcaagtccgatttcttcaaagttgacagtatcatccataagaacatccttagaatgtaccttaagtgtttcgatacgtcccttaagatctggcttgtctactataactcttctgtcaagacgtcctggtctaagtaaagccttatcaagaacctctggtctgttagttgctgcaagtataaatataccctttgatgaatcaaaaccatccatctctgcaagaagctgattaagtgtctgctcacgttcgtcattaccgccgccatatcttgaatcacggctcttacctatggcatctatctcatctatgaatataatacaaggagcctgctttgtagcttccttgaaaagatctcttactcgtgaagcacctacacctacaaacatctctacgaaatctgaacctgcaagtgaaaagaatggaacattcgcttcaccggctacagcctttgcaagaagtgtcttacccgttccaggagggcctactaaaagagcaccctttggaagcttggcacctatctttgaatacttatccggattatgaaggaaatcaactatctcagtaagtgactcctttgcctcatcctgtcctgctacatccttaaaggtaacacctgtcttcttctgtacatataccttagctgtattcttgccgacacccatgccgcccatcataccgccgcctttggatattcttctgtatacaaaagcaaatataacatatatgaaaaggaatggaagaacatacgcaacaaggaactctactatagaagaacttgaatctggtatatatcctgtgaattcaattccttttctcttaagaagcgatacaagactgtcatcattaacatatcctgtataatatgtgtaacccagcttattaacaccattattttcctgggcatcatctgtaggtgttataagaattctatcctgctcaagtgcaaccttcttaacctgatcattattcaccatctctatgaactggttataagatatttccttatatgtggcattctttaacatgctgtttagcatagttataccgataaaagttataaccgcagctattataacaaacacaataagattgacattctttggctttttattgttattgttgccgtttctgttgtcacggttattgttgttattaccaccaccgtaattattaccgttgttgtaattatccatcctgtgtctccattcctagtttctttatactctcatagtctgccattaacagacattactcattataaagaaggaatatttataaatcaacctctaatcaaaggttttacactatttattttttattaagaattaaaatatacttaccagccaaaaaccattttaaaatatgtctatccgcctgaactttttaatcaatataatattacttatcatacagacaagacaacttacagctataatatgcaatggatttattattcctcctgaaatataagatatattaacatacataaaagcattgcctatgcacaaagcatttctgatatatgcagataatataacgaccacaactatcatcatatatcctacttccgaattaattataaatgataccattaattgtaagcttcccagtgccaatgaagttatatacgacactaacaacagcttaaaaaacacaaccgatgtatcatagttatacgctaattcaacacctgtaatcctgtatgcaagttctgtattaatagcacagccaatattaccctgtgaatgtattatgcagactaattcaagcgttgtaagcatacacaaatataccattgataaagcacaccatgcccagaccatctttcctgtaatccagcttattctgctctttgttctgattattatatatcttgccatgctgtcataatctttccttgcataatcacctataacaaatgctataattaactgaaataaaagatatacagctgatggcagttccgatattccgttggatacttgtatcagttttcccctgaaacaatatatccatatgtcagctattgtaaaacctgtattatctattttcccttccagtaccaaattattgtatgtatatatgtacataactgcaattaataaggttataacaattataacaatatatttataaaacttccgtaatatcccctctttgatatctaataaaaccatatcattattccttatacataatgtcttttttttgcacaatacacagcgaaattatatatattatcaaacacagaagcgcaggatataaaagacaccttactggtccaataccatattttctaaccatctgtcccggcatcattgtaattctgctaaacaacactttggtcaaatatgtatatctgtcaagacatacccatataattgaagccaacattccaatacttttattactgcttatccaatatacaatctgcgaaataataactgttataaacaatattgaaaatatctgcacacttaaatatacagccatttcatatacagatggacatttttccataatataacctgatacaaatctaaatctgctattctccatatcccagttacatattttaatatgtgcattaaatatttttaatataatacataacccaataatattagtcagaagaatacttgtcatttccatacattttgccattatatttttgcaaatattattccaataatgccttatgcttttatagcggataataactgcacatctatgactgcttcttaaatctgcctgaattataacagacaaaaaaataagcagtatcatttcaaaaccataatattcactatataaaatattatcatatatacatacctctcctttatctggatagctaattccatacactatatatgtataaataaatgcagcaattataagaatttcacataaaatcaatatttcttttcttaatttcatctcatatgctgctgttctaaaaccatttttcttcaataacatatttatattcatctacccactttatatatttaatacaaacataattttttgaggataggtacggtatacaagatgaaattcctcttttgatatatcagcattttccggcacattaagagcatatgccatctttatatctgtactttcccctgactttaatttgaccttattacactcactgcttgctccgttactccatccagatggcatacattccataacaaaattataaattaacgcctcaatatccttatcctcatctgactggttgtatacattaagccttacatatatatatctataatcttttttactttttttcagctttgttattatattctcatctgtgaacttagttattgtctgctctgtattatccataagttcactttcctcaagttcaatattaagcccttcaacttccaaggcatcttcacatgtataaataacttcttgtgcttctggaaatgccgcatttatcttaatataattgactgcccacacaagtaccattacagctatgcaaatacctatagcaatcagcttaatcttgctgtttaatttaaaattcttataaaacttcattatgcatccccctatacatatatacagcaaatgtaatgccacatattattatgtattcaataatcaggttcaatagcgtgttattatatgaatatccaaccgtcattattctgataggattgtatttttctaaattaaaaaatccctgaattatatagcaaaaataattaagaagaaatggaaatatcattgttataaaatacactggaactatctggcttaacataacactaaaagtggtaaataagccagtataaaaaaatataatgatcaattcaataaatatataaatatacggatgtgtatatgctacgcctgataaaagactaaatccccgtggttcataaaatccaactactgcctgcatttttactgaaggcagtatcattgaacaggctatcaaattcatcaacaacggaactacaacaactattcctccagctatatgtgaaactacacatttaactataaggtaatattttttatcaattctggtatatatattttctatatacccactctttatatcagaaactgcactataaccatatgcgaatactgccataagcggcattatcataatatataactgtctaagcggaattgcatttttctgcaatgagaaaaaccacgaattaaacactgtattgatagtatttcctatgcttccatcaaatgtacctattatatctttactgtatcttaacggagctataacaaattctattcct

SEQ ID NO: 356 - DNA, 6127 bp, Unknown
  gut microbiota DNA sequence
acacggatgtctgtggaagtgagatatgggacatggatgtcccgtatcgaacggtagcggaaactaccattacgtatatgaaaagtcttagaaatatccagccataataaactcgcaaagcgtgtttattatggctatcgcggcagtcgccaaggtcatatcaggaatatgactttggctcgttgctcgcgtaaattgaagcttctggcatcgttgatgtatgcacagctgcttttctcatatatgctgtcgtcactacgttaagaatgtgtgttaaacaacaatattcactttattcgtaaatatcaatattccccatattaaccttagccgtaatcattttttcagcacctgtgttatatgagcagtttcttttatagtttgtgccatatagatttacgttgcccatatcagtttcaagattatagccgtatgcatcagagcgtgggagtttaacagaagcgttacccatatcaacgccaagatgcatagtgtcaaaggaacatctgctgatgtctatatttcccatattagtatcaatattatactgaataaagctgcagtctgataatgtaagatttcccatatcaacatgagatgtaatatcagaacccttgataccggttaactcagagttgcccaaattgatatcacagtttacagttgtaagagtaacatctgatggaatagtgatagtcagttcagatttaacattttttaaatgaatatttttaatgattttgttgcctgaatcaggctgtgttatctttaaggtactgctgtttactgaatattcgggacaatatgaggcatttcctttatattcgatactataagaggttccatttaccacatttacatttcctaaagaggtatcaatatcaagattatcaaaggcttcaagattctctgtataagttatatattttttacttttaaaagaatcagatatccatgataatgaaggtatatcccatacatttataataattccaataattatgcatatagctgttatgctgtatatgatgcctaaatatattcgttttcccatattattaatctccgtttctctacgattttggtgatataagtgcattgtagataatatctacacatttactatacatttacttacataaaaaacttttaagtacgttgtagataagagcagcaacaagccatattatccatgttacatgccattcaaaagtcaggaagcttatacacagatataagcatgaaacagtaggccagaatacggacatgacagaggctgctgttggattgatatattcaaaatttttataatctttacttgaatttatacttgtatctgtatttgtatatgtaccagatgttgtagttatgccattaagtgatagaagccttctgtatgaagcggctgcatttgcctgaaagacaatgagcattacgccggcagagcagatggctagaacaagagctccggaaatatcttcaagtatgccaatgttaaagctatccataataataggtggtataacgcatactatacacagcaggacaccaatcgcgagacatatgctatatataggtttcatgcgttctttttcattctggacatattgggatgcttgatagtcaagaacgcatgtatgtttcattatgtaagcgtaatctttaagaaatgtggaagcaaaaataaacatggcaactgcaactgcaatagttacgaacataagagatatcatgatattttctactatcaatatatctatcatgtcgcctattataggaaatattggtgaaattatgcatagcataacaccaagggcaataaggaagcttcttttggagcaggtgcgtatgtaatgtctggtctcatcaagtgtcagtattcttttatctggtgtgtcagttttgctggaatcgtcatgggtgttggcattaagaccaagagtgtcggcaagctcatcaagattaccgaattcagatataactgttccaacagcttcgttttcactttttccttcggatataagttcgttgtacttatcctccatcattccaaaaagctcagacttagccctgatgacttctggagtgtctggcatattggcaaacatggtttcaagatagcttttaatagtttccataaaatcctcctcatatatatgtggtgttattatttacgtataaaatgttctataacctctttagttaaagtccattcgtcacatcgcgctttatagtattcgcgcccagcatcagttatgctgtaatatgtacgctttttccctccattctcgccaacacctggaaaagaggttatatatccgtttttttccatacgtgtaaatgcagaataaagagtagtttctttcataatgtatttttcatctgatagtgctttaatctgcttggatatctcgtaaccataagatggtttgtcaagcagaagatatagaattatagtgtcattgtatcctcttatgatatcgctgctgatgccagccatatatcaagacctccttatattattattctttatgctatagagtagttgtttttaatgatgtgagtgtaaaagtaaattttgcagctcactgataattgtatgcatatactacgcttatcgtactacgacagacatagtatatctgtcgtagtatatataacatatgttatataatatgtcaatatttcaggcgtgtttatggattgaattatttaatgggaaaaatgttataaaatcggatatgttaaaagaaatggatacagatatatcaggaacaatcaaatggaagaagggacagagctcattaaagcgtgtaagggatattgtcaagaaagagtatgatggtgtagaatttaatatattaggaatagaaatacaggataaagtacattatgctatgccacttagaacgatgatatatgatggacttggatatctgaaagagtataatgaacttaaaggcaagaacagatatacatcaggaatgacatcagatgaatttctgtctggcatgaaaaaggatgatagacttcatcctataataacaattgtgctatactattcagagatgccatgggacggtcctgtcagtataaaagatatgatgatacatatgagaccagagatagaaaatatatttacagattataaaatgaatcttgtacaggtgagggattcagacaggtataagtttaagaataaagacgtaaagatggtatttgagattacaaagtccatttatgaggaaaacttcaataatatatatgataaatataatcatagaaatatatcaatagaagtgttaagaatgatcagtgtaatgacagatgcaccatatctgatgaatatagctgataataatagaagggggaaggtaaatatgtgtaatgctttaaagaaattgcaggatgaaagtaaattgcttggtcgtcaggaaggattagaagcaggccgtagcgaggagagaataaaagcaatagtatctatgctggaattagggcttacaaaggatcagataactacaaagtattcagaagatgaatatgaaaaggcggaagaggaatataaaagagcacaagagctgcttcgtgcatcacaagctgctgacaggttatatgagttcataatggattcagaaaatatagtattttttggtggagctggtgtgtcaacagaatcaggaataccagacttcagaagtaaagacggcttgtacaaccagcatgacgttgaattcgataagtatgaaccagagtatcttcttagtgcagaatgccttcatcataaacctaaagtgttctttgaattctacagacagaagatggatgcaagaggaattcagcccaatataacacataaagtactggctgagcttgaaaaaatgggaaaactgaaagctgtgattacgcagaacatagacgggcttcatcagctggctggcagtaaaaatgttatagaacttcatggtgctacaacaagaaactattgtgagaagtgcagaaagaaatatccatcagattatatatatgaaagtaaagaagcagtaccgcactgtacagtatgtggtggaatagtccgtcctgatgtaacattatatggtgagcagctgccagcaggtgcatacgaaagtgcagttaaagctataaaagaggcagatatgtttatagtggcgggaacatcacttaaggtatatccggcggcaggacttgtatgggattttaaaggaaatcatctggttgtacttaacagagaacctcttgactttaagctggatgcacaaaacgatatagaatacactggctccatgggagatgtgtttgcaaagcttgataatatgcttcatatgggatgacagtagatctggaagcaaatgctgacactatatctacaatgatgtatccggatggattaggcggtaaggcagtaaaaaccgaaagaaagatatatcctaacgatccatgtccatgtggttcaggaaagaaatataaaaagtgctgcggaaaaaagtagaaaatatataaatacagtaaagtaatacaataccccataagaaaacgcttgggaggacgttttcttatggggtattgtgcttaaggagaaagtgatacctgttaagtatagggaggtttaacaagtaatcgtttatgaaaaagtattattaaaatacaatcgttgaaagatataggaacatatattagtcagcaaccttatgtcatgtagcagttcttatgtccttcaacaattgttatattagaggaaaaatgtgacagggatatggaaaaagtgtgaggaaaatgtgaagagataaaaaaataaattcccattaacatcatacatgatacataaattaatatatatcatataaaatacacattataataaaacagttcatatatgtatgtacctgtgaatatgtcagcataatatgggcacaatcaggtattaaatgtgtaagtaaatggagtgaaaatggaaaaatgggaaaaaacggaaatcgagaatatttggagaaaagaagcttgaaaaatacagtatttaaaggaacaggaggagcagaaaaaacagaagaaacagaaaagagaataataaatactgaatcaatagaatattttaaaagggtacttataagaaatgaaaaaagtatacagacaatagaaaagtatataagagatataaaaaagctgatgatatatgcacacgggcaaagtataagtaaggaaatgcttcttgaatacaaggaatatcttgaaaaatgtggcaggtacaagatatcaagcataaactcttatcttgctgcagcgaatcatttctgcgaagtgatgggctggatggatataagagtgaagatgataaaagtgcagagagctgttttcataccagaaaataaagaaataaccatgagcgaatacgaaaagcttgtaaagacagcatataaaaaaggagatgacagacttgcacttataatagaaacactgggaagcactgggataaggataagtgaattaagatatataacagtagaatcccttaaatatggcatggcagatattcataacaaaggaaaagcaagaagaatactgtatcctggcgagctgcttaagcttctaaaagagtatgtcagaaaaaaatatattacacatggaagtatattcataacatcaagtggcaatccagtaaacagaagcaatgtatggaggatgatgaaaaacatatgcaggctggcaggtgttagtgctgataaagtatttccacacaacatgcggcatctttttgccagaactttctataagataaaaaatgacatagcaaagcttgcagatgtcttaggtcacagcagtatcgatacaacaagaatatatataaaatcaacaggaagggagcataaaagacaactggataaaatgaatatgataataggcacgagatataaacaaggacagggagatatcggatggtgaatactaaataatgagcaaaaaatgaacaaaataaatagaaggggtgaataacataataaatattatgttgtattatcacagaatcttcacagatgatagcacatcattaatgatatagcaagtaaataatacatatttttcataatcaattacaacaaagaagtactga

SEQ ID NO: 357 - DNA, 234 bp, Unknown
  gut microbiota DNA sequence
ctgttgatggttcttttgctttttctatggatttatcagttgccttcttcttttcttgtatgtcaaatactgcgtagccttcaaatatattgacttgcattgatttctgatgttcttccactggaataccgaattgattcttccattcttcaggataagaaggtgtcctagcagtggttacagttccattgtcttttagtgtacgaggaaatatttcaggtgaagttaaatcga

SEQ ID NO: 358 - DNA, 238 bp, Unknown
  gut microbiota DNA sequence
aagaaaaagactcttttcgttggtgttcctctggaaaaaagcgttcgccaaaacaaatcacctgtcgaattttctttgctaaagtgatatctctcatggattggaatcctaattatcggtacaagattctcggcaaattaattcgttctggcaatgaaatactgttcattttcgatttaacttcacctgaaatatttcctcgtacactaaaagacaatggaactgtaaccactgctag

SEQ ID NO: 359 - DNA, 970 bp, Unknown
  gut microbiota DNA sequence
ctgctcttaaaaacttctctgggaattaccaaagatgcattgattgttccaacactgaccagattcatattgattacctgtccattatttttcatattcaggatacaaaatacttctctgtcatattgggataactccttcgccatcaattctacaacagcctgtggactatccaatatctgctcactataaagagatggttctcttaccagacggatattcacaacttccaattcattctccatccttctgatctccttttggaaattctacaaccagaaggacattactctctgaagattccacatatgatttcaattgtgataatgtcattttcaaatatttaggttgttccaccataatctgctcctttcgtttcttctattgcttctgtttttcctgacaaatagcttatcactttgtttgtcttaatgcttttctgtaactcactgataatacacaaatctgctacattcactcccggcaaagcaagcatctcatccatcgtcatattgacaatctctttttccgttccatacccagcatcaaataaacgctgtaatacttttactgctttctgattttttcccatttcatcatcaaagggcagcttatcgccgccctttgttttactcctcctcttctttcttttcttcaattcctaatctcttaacctgtttctttttattccagatacgaactcccgtgattccggctgctgacaataccagaatggctatccataaagctgcattttccgtatctcctgttttcggagggttactggtctttgtagtagtacccggtgtctctgaggttggtgtttccggtacttctttgatggttacagtctgaccttcatcgttgatgtccttatgctctgttacctttttcggttcttccggatttgtcatatcatacagttcttcaaaggttacaagctgctttcctccaagcgtgctgccgtcga

SEQ ID NO: 360 - DNA, 32236 bp, Unknown
  gut microbiota DNA sequence
ataaggcaaattatacgcatgatatgattcaaagaaccggaaaatttactgtatcagtcttaagtcagaaggcacaatttgaattgttcaaacattttggtttccaatcaggaagagataccaataagtttgaagcatttgagcagtgtgccaggggcacaaatggtatttattatattacagaaggtacaaacgcatacatttctgtgacagttactaaaacagagaacttaggttcacatacgatgtttattggtgagataaccgatatggaagttttaagcaatgttccttcggtaacatatgattattatcagaataatattaagcctaagccacaggaggttggaaaaacagaggacggtcagacaatatggcgttgcagaatctgcggatatgaatatgtaggcgaagaattaccggatgattttatatgtcctttgtgcaagcacccggcatcagattttgaaaaagtagtaaagagggagtaatggatatgaaaatccgagaagtgaatgagaataaaaagcagtttatatcattattgttattagctgatgaacaggagagcatggttgatcgctatcttgaaaaaggaactatgtatgtgcttgaagacaatgacgtaaaagctgcatgtgttgtcacagatgaaggtaacgaaatacttgaaatcaagaatatcgcagtaaatccggaaaatcagggaaatggctatggcaaagcactaattgattttcttgccagcaaatatgcagatgaatattctgttttgcaagttggaacaggtgacagtccattgacgataccattttatgaaaaatgtggatttgtttattctcacaagattccaaatttctttacggataattatgaccacccaatttatgagggtggtgtacaactaatagatatggtatatttgcaaagacatatataacttcattccagtttacccaaatgacaacagacaggaaacttgatatttttacaaaaaagacatcaatatatctcccataatttccataaatttatggaattaaaatttcatgatacttataaaacagttccgattttcttctggatttctcctattagtgagacaataattatttttacacaaaccagcttattcgtggtagaataaaaccacagataagctggttgtttgaattgtgattaattaaaagcagaaatgaagtataacgaaaggtaaaggtatattatagtgaatattacagtatatctgggagctaataaaggtatagattcatcgttgacaatggcggtaaggaagttaggagaatggattgggcagagtggaaatacattgatatatggcggctcaaggacaggtcttatgggtgaaatagcagagagtgtgcttatggctggtggcagagtgattggcgtggaaccacagttttttgttgaggcagaacttcaatatgatgagataacagagcttattgtaactaaagatatgacagaaagaaagactaagatgatagagttaggagatgcatttattgcatttcccggtggaacaggaacacttgaagaaatagcagaggttatgtcaaagatttctttaaaccagcttaatgctccgtgtatattctataaccttaatggatattatgatagcatgaaagaactgctgttacatatgattgatatgggattatcaacaagtgaacgtcagaagggcatatattttgcctctgatttagaagaaatcaaagctatacttgccaagtccatcgtatagatggatgctattaaaaggataagaaatggggtatatatgaaagttacagaaatattaaagcaggataaaccaacaatatcctttgaggtgtttcctccaaaaaaggatacagattttgctgatgttgaggcggcagccactagtatagcagagcttaatccaagctatatgagtgttacatatggtgcaggaggaagcaccaagggcttaacaataaagctcgcagagggtatccagaacaagtatgatgtgccaactatagcacaccttacatgcgtatgcgcggataaggcgggtatcagtcaggcattggaggatatgaaagcagcaggcataaagaatatacttgcattaagaggggatatacctaaggattatgcaggggagatatttacagagtttgcacatgcatcagagcttgtgaagcttataaaggcaagcggggatttttgtgtaggtggtgcctgttatccagaagtacatccggattcaacagataagaaagcagatattgatggtcttagaaaaaaggtagaagcaggctgtgaatatcttacaacacagatgttttttgacaataatatattttataactttatgtacagaatcagagaggctggaataatggttccggttgtgcctggaattatgcctataacaaagagagcacaggttaaaaatgctgttaagctttcaggctgcaatgttccagaaaggtttaagaatatagtagacagattcggtgacacagaagcagcgatgaggcaggcaggagtattatatgcaactgaccagattattgatcttatagctaatggagttaaccatattcatatatattctatgaataagccagaaatagccagagctatatataataatctctctcatataatcatatgatgtcaggtatataaaaatatgacaatatcaggatgaacttaggaggttatgaatatgtattttgatgaagttaggaagaattttggtttcggctgtatgagactgccgatgatagagaatgggaaagctgttgatattgaacagacaaaaaagatggtagatacatttatagagcagggcttcaattattttgatacggcacatgtctatcttgagggaaagagtgagcttgcattaaaggaatgtcttacaagcagacataaaagagaagaatatatacttactgataagcttaccatgacttattttaataagcaggaggatatccgtccattctttgagagccagctggaggcatgtggtgttgaatattttgatttttatcttatgcattcacagtcaaaggatatatttgagcattttaaaaaatgtcgtgcatatgaaacagcattggagttaaagaaggaaggaaaaatacatcattttggaatctcatttcatgataaggcagaggtacttgaggaaatattaaaggaatatccacagattgaagttgtacagatacagtttaattatcttgattacgaagatcctgctgttcagagcagaaagtgttatgaggtatgccgaaggtataacaagccagttatagttatggagccagtaaagggaggtaatcttgtaaatcttccagacgatgcagcaaagatactggataaccttaatggtggaagtgcagcaagctatgcggtacgttttgcagcaagctttgaaggtgtgatgatggttctttctggaatgagtaatatggaacagatggaagataatctaagctatatgaaggaattcaggaaactggacgatatagagcttgcggctgttaaagctgttgcagaggtttttaaatcaaagcatatgattgcctgtacagcctgtcgttattgtgtagaaggatgtccaaagcatatatctataccagatctttttgcctgtatgaatgcaaagactgtattccatgactggaatgcagattattattatagtgatgtacatacagtttataatggcaaggcaagtgattgtatacgctgcggaaaatgtgagaaggtctgtcctcagcatcttccaataagggaattgttagagaaagtcgctaaggaattcgagaagaaggcggaataagcctagattatttgtatgcatttttctgatatggctgcatataatgtgttaagtattgcttccttagacttgaactgtaaagaaaaggcagctatttgctttgctaaaccatattcatataattggtcaaaaatatttacaaatgcattgacaacacacaattcagttgttatgattagtatcattaaaagggagtagctagccagaacgtgttcacttcttcgtcagtacagttattacagctaacaggtgtgataactcggaaagtgattaaatagcgagacttttactgtaatgcagtaggagtctctttttttattgaatttttattaaagaaatcctattgaatcatatgttatttacattatctgaatgtaaagtgattgggacatataagacatactactgcagcacataagaattagcatattaattaaatgtctaagaaagaagaggtagcgtatggttttacatgtatttattttattggtaggatttttgtttttagttaaaggtgcagactggtttgttgaaggtgcagcaggaatcgcaaaaaagcttggaataccacagcttgttataggacttacgatagttgcgatgggaacaagtatgccagaggcggcagtaagcataacagcagcacttaacaataacgctggaataacgattggaaatatcgttggaagcaacattcttaatattcttataattcttggtataacagcagttataaccaatgtagccattcagaaatcaactttattatatgaaattccatttatgataggaataacagcattgctgcttgtatttggattaacaggttcatctataacatttatagaaggggtagtatttctgttattgtttatcgcatttcttgtgtatctttttattatgtcaaaaaaaggagaggttcaggaggaaggagaaatcaaggatattcctgtatggaaatgtcttctttttatggtaataggcggagttatggttgttaagggaagcgattttgcagtaagcggtgcatcctggatagcaagattctttggtatgagtgaaagattcataggacttaccattgtagccttcggaacatcacttcctgagcttgtaacatcagttgctgcagccagaaagggtaacgctggaatagcaataggtaatattgtaggaagtaatatattcaatatattatttgtagttggaataacagcactaatatgcaatgtaccatttgaaagcaagttcttaatagatacagcaattgcgatatttagtggagcgttattatggcttggtacttataagcataaggaattaagaaagccttgtggaatagtaatgttaatctgttatgcagcgtattttgtgtatctgtgtttgctgtaaaaatatctgccttgaagtcaggttataaaagctcagtttatttcagcagattttagcagagcagattacagcagatattagtggatttcactatgtttcagcgggttttagaaggagcttcaccatattttttcttaaagcatctgttaaaataagatatattgtcaaagccgcattcaactgcaatctgtgtaactggaaggtcagtagatgtaagcaggcgtgaggcaatgagcagacggtaatcattaagatagcttataaaggaggttccagtgcattgtttaaagaatttcataaaatgtgattcgctgaaatgacattcctttgcaatatcctgaattgagattgcatgggtatagttattttcaatataagttattattagttttaatttatttcttttgctgtttgagaggctgtcagatacttcattgttagatgcacacaaataatgtgtgttaagtgcaaaaaagaagttgtataggcagcctcttatttttaattcatatcctgctggaaatgtttcgcatactttgtctgcttcatctatacagcttatgatttccttatagtgttgttctgatggcttgattatacaggtcatatcattatcggagttgttaatatgtccgaaatattcaaaagtattcctgtcatattctttaggaagaagcatatttatattaaatattatgttttcatatttcaggacagaattgtcataattggttatagaatgaatccttccgggataaactatcaaaagatcccccttacctacaaaatactggttcaggtcaatgttaacaagaccttttctttctttaatgtatataagctccatttcgttgtgccaatgcagaggaactactgcaaagtcctgtggaatagtgcatgggtatgtattatatgaaaagtcagtattgtagtggctcttggtttcatggagagtttcgtataatgaatcaggcataataatcctccattctttcaattatgatagtattgtacaagaaaacgatataataaatcaagaaaaatatatatattgagatataatcatactagtgtaaaaactaaaaagcagtccataggtatcaaagttaagagcttttgaccccgacatcatatttataacaatatcagaatggagagtggaattatgtcagataaattgaattctataagtaatgaattattgaataagaatcttaaagcctgtagtaatgaggaatgctatgaggttattaaggagtacgttgcaaggcttgaagcgttaagggagagagaggataagtatttacagtcaaagctcggaaagaaattatattatatatcagcagaatttcttataggaaagctgatgtcaaacaatttaattaaccttggagtgtatgatgaggtcagggctgagcttgaggcagcaggaaaggagcttgcgcagattgaagagattgaaagtgaggcttcacttggcaatggtggacttggaagacttgcagcatgctttcttgattcaatagccaatcttggacttaatggcgatggtgttggacttaactatcatcttggactgttcaggcaggtgtttgagaatggcaggcagaaggaagtaccagattactggataggaaaggatagctggctcattccaacagatatatcatataagatagattttgcagattttagtgttacttcaagaatgtatgatattaatgtctatggtgaaaagacaacgaataaattacatttatttgatattgatacagtaaatgaagctattgtaaataaatctggaattgattttgataaagatgatataaaggagaatcttacattatttctttatccggatgatagtgatgagaaaggaagaatgctaagaatttaccagcagtatttcatggtaagcaatggagcaaggcttatattagatgagtgccgtgcaaagtgtgagcagcttaatacagccttaacagatggagaaagaaagtcttatagaaatcttccagagcttgctgttattcagattaatgatacacatccaactatgattataccagagcttataagacttcttacagagaatggtgatattgatggaacagctatatcgatggatgaggctataaagatagtatctgcttcctgcgcatatactaatcatactattcttgcagaagcacttgaaaagtggccggtaagatatcttgaaaaatgtgttccacagcttatgcctgtgataagggaactggataaaagagtacgtgagcgttatgatgatagttcagtatatattattgaagaacgtgatgatgacagcagagggcttgttcatatggcacacattgatattcattatggtatgagtgtaaatggagttgcaaagctgcatacacagattttaaagaatacagagcttaataatttctataagctttatcctgataaattcaataataaaactaacggtataacgtttaggagatggcttatccactgtaaccatgagcttgcagattatataacacagcttataggtgatggatataagcatgatgcagatgggcttaaagcacttatgtcatatgcagaggattcatccgtaatagaacatttgtcagatattaagcagcataataagactgcacttgcaaagtatctttacgataagcatggaattgttattaatgataattcgatatatgatatacaggtaaaaagacttcatgaatataaaagacagcagatgaatgcgctgtatattatatataaatattttgacattaaaaacggaaatattcctaaaacacctgtaacagttatattcggggcaaaggctgcacctgcatatacaatcgctaaggatataattcatcttatactgacactttcaaaggttatcagggaggatgaagacgttaataagtatctcaatgttgtaatggtagagaattataatgtgacacttgcagaaaagctcattcctgcctgtgatatatctgagcagatatcacttgcatctaaggaagcaagcggaaccggaaatatgaagtttatgctgaatggagctgtgacacttggaacaatggatggtgcaaatgttgaaatagctgaacttgtaggaaaggataacatatatacatttggtgcttcaagtgatgaggttatagcacattatgctaacaatgattattgtgcaaaaagattgtatgaggaggacccagtcatcaaacaatgtgttgactttattatatcagatacaatgcttgctgctggtgacaaagatgagcttaaccgtctgtataaagaaatagtaggtaaagactggtttatggcattacttgatttaaaggattatatcaatattaaggaacaggcgttagcagattatgaagaccacatggcatggggcaggaaacagcttataaatattgcaaatgccggtttcttctcatcagacaggacaatagcagaatacaacagggatatattcaagctgtaataaaataacttttcatcattttttcttagtattttataaaatgatttgcctaccggaatataaaagattataataatataatggtggggaggcaggatgaatatgtataatatattaattgtagatgatgaaaagatagagagaaacggaataaagcttctgcttaagcgtatgggcatcaatcttggcattatagaggctgagaatggaaaagaagcttatgattaccttatgtctgatgataataagggtgaagggcatgttgacattcttctgacggatgtcaagatgccttttatggatggaatagaacttataagaaatgtaaaagacggcggcgtcaagcttaaaacaataatattttcaggatataatgagttcgaatatgcaaagcttgctgtaaagcttggtgtcgaggattatatactaaaaccggtagcaccggatgagtttaagaatacgatgctaaaggttataagtgagcttgatgaggaattaaagaaaaatgaagattataataagcaggctaacagtttaagacagttttacctttattcacttattaacggaagcgcagcaaagggaattgttgagaatacagaatttctcaatggttttaacagacttgtgcttattgaatttaattcagattttttcggaaagtatgagtttgattttgataaggttgtacagattattaaagaagagtgggaaagtctgtatcttaaccttaatccgcagcagtcagttatattactgaaaacgcctgatatagaagcatctagggcagatactaattatagaattgagcattttcttagaggtctgcacgaatatatatatgaaaagagcagacagtttatgtatgcggctgtgtctgatgtgtttagtgattatcataagctttcaggtgttatggatgagctcgaagcacttatgaataacaagttttatcagatggaccgatatatatattctgattatgtgaatgaacagacacctgttttggtacagattgatgatgatgcacttatgaagcagatgaaacaggatattaagatgaaggatgttacttttttaagaattcattttgaggcgctatgtaagaagtacagaagtcagactaatttctcacatatatatattaagtttgtattttccaatctgctgaaggacttttatgataacataccgggggctaatcaggatgaattcagccgggagatagacagattgtatacatctgaggacttttcatgcatcatggatattgttaataagaatattgatttgctggaaaagtcatttggcagtgatcctgtttcatctcatagagagatagagatggttaaggattatattcatggacatttcggagaagaaataagcgcacagcagcttgcagatatggtttatcttgcacctagctatcttagttcactattcaagaaagaaacagggcagaacctcagcaagtatatcaagcagtaccgaatggagaaggcaaggcagatgcttgaggatacgaacatgaagatagtatgtatcagtgagaaggtgggatatcctaatgtgtcatatttctgtcagagcttcagggagtattgtggcgtaagtccacagaagttcagggaaaatgctgaataataatcagtaattaaacgtgcgaggtatagtttgcttgagatggataagacagagaattaacaatataaaattgcagaataagcttgccagtatatatatagttactggtcttattccgttgtttgtcctgtttgcatttgcgttcggacagatgcgttctattcttatggacagggatttaaagagcatgcagggttcgttagagcagtctgttgctactgtggacggtcagattgaggtatataataatctttctaactatataacatttaatgaaacgatttcaagtgtgcttgcctatgattacagcagcacatatgaaatgtacagccagattgttacaacctttgatcctatgctgtcttcactaagatatttccataatgatataaataaggtcacagtatatgttgataatggaataaagcatgatacaacgattgcacctattgatgaaattaagaatgaaccttttttcgatatggcatcagattctacagctattaactggtatgtagataaggatagcaaaaagcttatatctgcaagaaaaatgtcaacacttgaacatatgggaatcacaggtattatgtatatagatgtcagttatgatagtgttatgtcgacatacagacagggacttgaacccggatgtggaataatagtggttgacaaagctggtgcagtgattggggagtttaataatattggtgatgacagcagatatgttttgaattattcggacaataatggtatagaaagacaaggtgcaaagcctgctttaaaaaaaatgctgggtgaagtccgctgggatggaaatatatgtagtaatgcaggaggctatgcactggtaagaaaagaatcaccggttacaggctggacaacctatatatatgagccaaggaaaatgatgtttaattcgaccagctcgataactgccatgataatagtagcagttgtggttgcattgcttggactggcagcttctattacagctacatctggatttatcacaaaaagaatcagaaagctgcagactagcatggctaaggttgagcagggagattttgatgcggtcattaggacagaggataaagatgagattggagagctgatccagggctttaatgagatgacaacacagacgaagaaccttataacccaggtgtatgaagggcgaataagctagaaggagtctgagatgaaggcgttaagggcacagattaatccacattttctgtataattcgctgtcacttattaactggaaggctattgaatatgagcaggatgatataagcaggattactctggaattatctaattattacaggacttcacttaacaagggtaagaatacacttatgcttgagcaggaggtaagtaatgtaaggtcatatatagagattcagcaggttatgcatgataattcctttgatgttgatatcgatataagcagcgatattcttaaggctgagtcgttgaatcttatacttcagccgcttgtggagaatgccattgaccatggaatagaccttctgactgacaggcgtggagtgataactattaggggaagccgctgcccatatataaatacggctaatgaaaacatagatatagtctgtttgtctgtagctgataatggtgttggaatggatgaaaatatgtgcaaaagctttcttacagcggagtctaagggctatggtgcacgtaatgtcaatgacagaatcaggctgttttatggggaagaatatcatcttgaggttaaaagcatagttggtgaaggtacaacaatcacgattaaattcccagtcaggatgatggaataatattcattatgtaaatttttatattttttatatttacatcataaaaaaacaacatatttctaaaatactttatattttaattttataaacctcctaatataattaaatcatcaagaaaagttaaagacgtcgaaaaacaaaggatgattgatgattaaattattaaggaggttttttgtatgagattaaaaaaattagcagcagcacttatgctgacaacaatgtgtggatcacttttaacaggctgcggttcgggaaatgattcagcaagcacaggtaaggattcaaaggcagatgaaaagattacagcaaccattaaagtatggggaccagcagaggatcaggccgaggaaaatggtaaatggcttcagacaatgtgtgagaagtttaatgctgagcatccaaactgggatcttacttttgattatggtgtatgtgcagaggcagatgcaggtaagactgtaacacaggatccaagtaattcaggagatgtttacttttttgcaaatgaccagcttcagacacttattgatgccaatgctattgcaaagcttggtggtgaaacagcagattatgttaagaaaactaattcaagtgcaattgtagattcagtttcagttgatggtaatatttatggtgtaccattcacaactaatacatggtttatgtattatgataagagtaaattctcagaaagtgatgttaagagcttagatacaatgctttctaaaaacaaggttgcgtttaatataacagaaggctggtatatgtcaacattctatcttgctaacggatgctcatatttcggcaaggatggtaaggataattcagcaggaattgatatttctggtgataagggaacacaggcaacaaaggctatggtttcatttgttaacaatcctaactttgtaaatgaccttcagggtgtaggtatagcaggcttaagagatggttctgttggtgcatacttctcaggttcatgggattataagagtgttaaggaaattcttggtaaaaactttggtgcagtatcacttccaaccttaaagattggtggaacagataagcagcttaaggcatttgcaggttctaaggcaatcgcagttaaccctaactgcaagtatcagcaggtagctgtagccttagctaagtatcttggtggtaaagaagcacagcagagccactatgaattaagaggtgttattccttgtaatacagagcttcttgcaacagatgctatcaagaacgatgctcttataacagcacagaatgatacatttaacaagacatcagttatccagcctacagtatcaggaatgaatgactactggacaccagcacagaactttgcaaaggctgtagttaatggcgagattactctggataatgcagaagcaaagacacaggatttctacaagcagattaatacatcaattgtaagtaaataaaggcttaagtaattcataatttaagtaattagtaaaaggatggctgtcacattattagtgacagccagcttgtaacaggaggttatggcgatgaaagatggatttattcaggcattcagaaaaggtaatgccattaccagacttagtgccattatacttggacttggtaatcttgcaggaaagcagataatcaaaggcattctttatcttgcaatggaagtaagctttatatgctttatgatattcaaaggaatgaactgtctcgccatgcttccaggccttggaggaagagaacagcaggagatatggaatgagaagctgggtgtatacgagtatgtggcaggtgataattcacttctgatacttttgtatggcgttgcaacaatatttcttatagcagcttatgttgttcttgttatgagttcggtcaagagtgcttataatgttcaatcaaggcttgctttaggaaagcatattaacacatttgtggaggatgttaaatcattattcaatgagaatctccacaagctgcttcttacacttccggttgggggagtacttatatttactattctgccacttatatttatgataagtatggcatttaccaattacagtaaagtagacagccatctggtactgtttgactgggttggattagaaaacttcaagcagctgtttgattcgggaagctctatcggacattccttctggtcagttttgggatggactattatatgggctatatttgcaacaggtctcaattacatattaggtattcttgttgctttgctgattaacaggaagggaacaagatttaagtctttctggcgttttatatttgttctttcgatagctgtaccacagtttgtttcacttcttgtcatgagaagtatgttaaatcaggatggtatcgtaaatgttgtgttaaggaatctgggctggattgataagtcactacctttcttcactaatgcaacatgggcaagaataacagttattgttgtcaatctgtgggtaggtattccatatacgattcttcaggttacaggaatattaaagaacattcctatggagctttatgaggcagcagatgtagatggtgctaatggctttgctaaatttacaaagattacgatgccatatatgttctttgttacaacaccatatctgataactacatttacagctaatgttaataacttcaatattgtatacctccttactaagggtgatccggttctggctggcgaaactgctggtaagacagaccttcttgtaacctggttatacaagatgacagtcgattttcaatattataatctgggtgcggttataggtattatgacattcatattcctggcaattggctcacttcttgtatatagaagaactaagtcttataaggatgaggagggcttccaatgaaaaagaaaaagattactaaaaatatattggcacatataacacttacaatacttgcagttatatgggtaatgccgcttatatggataatcctcacaagcttcagggcacagaagggagcgtatacaagctcgtttttccctaaggcatatacacttgataattatacaaagttgtttacagatactggaatacttaatttcccaagaatgtttgagaatacgcttatagttgcagtgttttcgtgtattatatctacgtttttcgtactttcagttgcttactgtatgtcacgcctcagattcagaatgaggaaggctatgatgaatgtagctatgatacttggtcttttcccagcctttatggcaatggtagctgtatattacattcttaaggctgtcggattatctgagggctcaatgataagggttgcacttgtgcttgtatattcggcatcagccggaatacagttttatatagcaaaaggcttctttgatacgattccaaagagtattgatgaagcagcaattattgatggagcaacgaaatggcaggtatttacaagaattacaatacctttaagtaaaccaattatcgtgtatacagtacttacttctttcatagcaccatgggttgatttcatatttgcaagagttatatgccgtgccaatgccaactattatacagttgcaatcggtttatggcagatgcttgaaaaggaatatgttgatgtgtggtatacaagattcgcagcgggagctgtacttatatctattccaattgcagccttgtttatgataatgcagaggtgctataatgacagtatgtcaggtgcagtaaaaggataatgtcaatagtgctttgtgctttgtaatcctgtatgagttaaaatggggattaaagaagaggtatgtaatgagaaaaagaatattcaggatgtttgcagtattaactgctatgatattattatttcaagccgggtgtaacagcccggctaaaagtgtatatacagctaaagaggattatgatgataagctgtattatgccatgacaacgccttatggtgcgtatccagaaactataagctatacgcttggcaaaatgacaagtgttaataattccaatatgccagagggtgatacatatacagataatgcatatacaagatatataaagaatatgattaatgttcagaatattgatgcatttgaggcacaggatacgcagtataatactaatgtttcaatggctgtttctatgggagcattaccagatataatgatggtttccagtcaggatgatctgcaaagacttgttgaggcagatatgattgaggatctgacagaaagctataataattgcctgagcagcaggataagagctatatataacagttatggaagctcacttaaggatatgattacatttgacggaaggattatggcacttccagagactaatataactgatggtcctaaccttatatggctgcgtaaggactggatggataagcttggattgacagcacccaaaacaatagaggatgttgttgatataataaaggcatttattgaaaaggatcctggtaataatggaacggataacaatggaaggagcaatactgtcggtcttgtaattgatacagaacttacaggggagtgtggttatagcagtgaattcctgcttgatattgtttttgcgtgttttaatgcatatcctaagcagtggataaaggattcagatggaaatgttgtgtatggttctgttgcatcagaggcaaaggatgcactggcatatataaggcagttatatagcgatggaataatagataatgatttcttattaaggacaacaactaatatatgtgagcttattgagaatggaaggtgtggctctttttttggaccatggtgggcacctaataatccacttgccaatgcagtaaacaccaatcctgatgcagactggcagccatacctgatacagacatctgatgatggaagtacaagctatcacagccagaatccctgctataagtatgttgtggtaagaaagggttttgagcatccggagatagcagctaagattataagtgtaatgtttgatagtgcaaggtatgacagcaatgctttgcaggaatttatctattattaccagcagaatgtagaaccgactgcccgtcctatttcaattaatgtggattacaataatgctctgtctatatgctatgaaaagattgacaaagcgcttaaaggagagagtgatcctgataagcttgaattgcttgaaaagtcgtattacgatgcctgcagttcatacattagtaatacaggaaaaaactatatagaatcaagcacacagggtagtgatgatacacttgaaagaaagaatgcaacaagtaccgagtgggcagcctatgtgtcaagaataacagcctgcaggctgttaagtgagggtaatatacgcgttgttgattctatgtattttaagacaacagatacgatgaaaacgcggtggtggcgtttaaaggaaaaggaaaaagaagcgtacctaaagattatatgtggtgctgaggatatatcgtactttgatacctttgtcaatgaatggaatgaacagggcggggaggcaataactaatgaagtacgtgaagaactgatggacatctctggttaggtaaggtctgagtgtagaattgatgttattaatctgatataatgagcgcaaaagaaaagaatgcggctgagaagcagacatattcttttcttgcgccattaacgaacgaacagccatgcgaagcagggcgaaatagcgcgaagcgcgggttcgtgagtatacgggttgagaaagagtataaatattataagggagaggcacgaataatgggaatatatctaaaccctgggaatgatgaattttacaatgcagtagaaaaatctaaaatatatgttgataaaactgaattgttagaattcactaattcagtattatatggtgaacataagaatgtatgtgtaagtcgtccgcgccgttttggaaagtccatggctgccaatatgcttgttgcatattacagcagaggctgcgaatcaaacgaattgttcgataagcttaaaatagcaaaaaaaccagattattatgagcatcttaataaatataatgttattcatattaatatgatagatttcttaagcagggcagattcaatagatgctttaattgattatctgtcaaaaagactgctgtgggatattaagaaagaatattcagacgttgactgctttgactggggggatcttgtagatgtgcttgaaacaatatatagcgaaaaaaaacagccatttattataattattgacgaatgggattgcatattcagaaaatatccggataatgtggaagaacagaagaaatatcttgactttttgagattttttataaagggcaagtcatatgttgcgttagcatatatgacgggtatacttccaattaagaagtatggtgaacattctgccttgaatatgtttgatgaatattctatgactaaccagcgcgaactggcagagtttactggatttacagagctggaggttaaagaattgtgtgtcaggtatgatatgtcatatgaaaaaatgaaacaatggtatgatggctacgagcttaaaggtaatcatatatataatccgaggtcagttgttatgtcccttcttgggcgtgattatgatagttactggactaaaacagaaacctatgaagcattaaaaaagtatgtacagcttgatatgtataatcttaagacattaataacaagattgattgcaggagaaagtgttgatgtcaacccagataaatttcagaatgatatgactacattagagagcgcagatgatgttttgacattatttgtacaccttggttatctgacatatgatttttataaacagaaggttagtatacctaatcaggaggtacagaaggaatttataaactgtattgaagatggtggctgggaaacagttatggctgcaatacgcagctcagatgaactacttatgtatacattaaatggcgatgagagaaaagttgcatcaatgatagaacaagtgcatcaggaaaatacatctatattaaaatataatgatgagaattcattagcatgtgttatatcacttgcttactattctgcaagaaaggattatttaatgtatcgtgaacttgcaggaggaaagggatatgcagatatggtgtttatacctcggagcaatgttaataagccggcgattgttgtggagctaaaatggaataaaacagccagttcagccatagcccagattaagaaaaaagaatacgtgcagggtcttaaaggttattctggtacagttatccttgttggtattaattacactgataaagatgaaccgtttaagaagcatgagtgtagaattgagcagataaatgtaaatatttaatagcgtaaaatcgcagaattgaataattaaacaaaaaataactggataatttcccttgtggagttatccagttattatttacgtagtgagacattttggtatataatcttcgtatatataatctgaaaaatatttagttaagtttacgccccaataactccggcaaatccacatataagaacgattataccaagtacaatacgataccagccgaataccttgaagtcatgctttttgatgtagcccataaggaacttgataactactaaagaaacgatgaaagcaacaatcataccaacaagaagaatcataccttccatagatgtcatagagttatgaataaggaacttcgcacccttaagaaggctcgctccaaacataacaggaacagcaaggaagaatgtatattcggcagccactgttcttgaaataccaagcataagtgcaccaactattgttgcaccagagcgagaggtaccagggaatatagcagctataagctggaaaagtccgatatagaaggcaagcttataagtgatacctgtaaggtggcgaaccttaggtttctttccatgatgcattgtttcaacgataatgaaagctataccgaatataataagcataatagcaactgttgtgtaattatagaacaaggcttcaagctgttcatcaaaaagaataccaacaatagcagcagggacacacgatacaagaatatgaaaccataacttaaatatatcccatttaacataagcaccggcaccgcattgtgctagtggttctttgttgtttttcttaccaaaaggccataactggtgccagaaaagaataacaacagccattatagcaccaagctggataacaacttcaaacatactgtaaaatgcatcggataccttaagcggcataatctcattaagcagaatcatatgaccagtactgcttattggaagccattcagtaataccttctacgataccaaaaattatcgcctttaaaatctctaacattattcctccaatcacttgcggattattctactcttatgtatattccgccatagccacattttattatagaaaaagattattgtctgaaaaaacatgaagaaaacaataatatattactatatgactacacgttattttcgcattgaaatgcaggtgtgtcaacaacagaataatataatttgtatataaatttgttttaacaatgaagtttactttttagtcatataaagttattatatgatactagggtcaaaagccccaacaattataagatgactgggaggaacttatggaaatatatttaaaaccaataatatcagcctgttatatattcccaatacttgcaattatatttacaataccatatatattatatgaatataacaaatatggctcacttcttgttataagaacgggtatagtgtatacatttatattctatatgcttacgtcatattttatgacaatattgccgcttccaccgcttgattcagttactcctgattcggcatgtatgctccttgtaccatttgatgcagtaagaagagttatagataactcaggaatcatattttctgatccggcaacatacatcaatatatttgcttgtccggatttctggcagattgtttttaatattttattattattgccttttggcgtatatcttagatattattttaaaagaccatggtggcaggtgcttatattttctttcctttatagcttgttttttgagtttacacagctgtcaggattatatggaatatataaatatccatacagattttttgaggtagatgatcttatatgcaatactcttggtggaattgctggttatgtgataacaccatttcttgtatttcttcttccagacagaaataaaatagatgaaatagcatataagaagggacagattgtatccgaattcagacgtgggattgcctggtgtatagatatatttattgttatgcttccggtatttatatatgtattatataaccatatggatatagcagcatttatctataattctaagtatatagttataacaggtgcttatatagcggtgatgtttacggcagcagcttcaataagtaagggaagaacgatagggaaagcgcttgttaatataaagcttgtaaaggtatatgataaaaaagatgagcatgatgaaaaatgttataaaagagccggaatattaaggcttgcaataagatatatcatcttatatgtaataagcatgccatctgctgcatatgcatattttatatatcagtttatgatgaattcggacatttccagtggtgagtggagattttatgcgtgtgttgctgggattattgtatgtttgtttattactttttatatggcattcgatcttttgctatgcctgtttagcgatacaagaaacatgttgtatgacagaatcgtaaagcttactcatataagcttgtcaggacgtggacataactacaatacagaaatcacagataagaaagtggaagatggactaatatcaggagaagagcagaaaaatcaatgaaaaaatacacaaaaaaaaagatgtaaaatgtatataaatgtgcaattattgatatttattatcatttagttatgtgttaacataggcactgaaagaaaacatggtgatgctttttagaacaggtgcagaagtgagaatggaatgaattcaggaagcatctgtaagatatacggaggttaaatacatgactattaaggatatgaaaactggtcagactgccacgattcttaaggttggcggtgaagctgcactcagacagcattttcttgatatgggacttattcaaggtgcggaggttacggttataaagtatgcacctatgggtgatcctgtcgaattaagaatacatggatatgaattgacgataagacttgctgatgcagcacagatagaggtaagtactgcacacgataaagaaaagcaggaaaaaacagatatcagatttataaaaacagagcatccaggtcttggtgagggtggacgtttccacgataaggaaacagagaatccgcttcctgatgatgttacactcacatttgcacttgtaggaaaccagaactgtggtaaaacaacactttttaatgttttaacaggttctaaccagcatataggcaatttcccaggtgtgactgtagatagaaaggatggcgtgataaagggacatcctgatacacttattacggatcttccgggtatatattcaatgtcgccttatagcagtgaggagattgtgactaggcagtttcttcttaatgataagccaaagggaattataaatatacttgatgcaactaatatagagcgtaatctttatcttacaatgcagcttatggagcttaatattcctatggttgtagcacttaatatgatggatgagataagagttaatggcggttcaataagaatcaatgagcttgagcgacagttaggtgttccagttattcctatatcagcagctaagggtgagggtataggagaactggtagagcatgctattcacgttgcaaaatatcaggaaaaaccggaaataatggatttctgtcctgatgacagtgcaattcatagatgtatacatggtatcatggcgcttataagcgaccatgcaaaaaaagcagattatccggaaagattcgcagcatcaaaggtggttgagggagatgcaatagtatttaagcatcttgagcttgaacagaatgagaaggagatgatagaacatatcatactccagatggaagatgaatgtggtatggacagatcatctgccatggcagatatgaggtttgaatatatagaaaatgtatgcagaaatacagtagtaaagccaaaagaaagcaaagaaagaataagaagccgtaggatagataaggtattaaccggtaaatatacaggtattccggcttttgttgctattatggcacttgtattttatcttacctttaatgttataggagcatggttatcagatatactagatataggaataactgcccttacacaagtagtagataatgcgcttacagcattgaatgttaattctgtattacatgctttgattattgatggcatattcaacggtgtgggaagtgtgcttagtttcctgcctgttattgttacattattcttctttttatcaatacttgaagatagcggatatatggcaagagtagcatttatcatggataagctgcttcgtaagcttggattgtcaggaagaagtattgtacctatgcttattggttttggctgcagcgttcccggtgttatggcaagccgtacactttcttctgaccgcgatagaaagatgaccatattattgacaccatttatgagttgttcagctaaagtgcctatatatgcattcttttcagcagcctttttcccagagcatgcggcacttgttatgataggcttgtattttgtaggaatagtcattggaattattatggcacttatatttaaaaagacactttttaaaggtgaaccagttccatttgttatggagcttccaaactacagaatgccaggtgccaagaatgttatgcagttactatgggagaaagcaaaagactttttacagaaagctttttctataatatttattgcaacaattcttatatggttcttacagaattttgatataagacttaatgttgttacggattctaaggatagtatacttgctgctattgcaagctggatatcacctatattcagaccgcttggttttggagactggagaatagcgacagcagttcttacaggagttatggcgaaggaaagtgtagtatcaacaatatctattctttttggcagtacagtagagataatcgaagcagtagcaccagcaggtgtacttgcatttcttgtgttctgtctgttatacacaccatgtatagctgcgattgcatcaataaaaagagagctaggtggaaggtatgcagcaggagtagttataatgcaatgttgtatagcatggatagcagcattaatcacacatacaatatttatgtttttgttataagacaatgagtgcataagaaaagtaacatataatgaattgtattaaaataaattgtattaaaataaaaacattgcaagtaatgcttattgatgatattatatcaacaatgtataaaacagtcccctgagggagtaatcggcatataatatgatgtcaggattaaaaggtattttgcatctgacattataatatgcagttatatcgacataatgattaatatttaatcacacggttattgataaacccggtattactttaaatgatgagactcaaggacagtaagagagaatttctcctgctgtccctgagtcttttttacgtaggtaactatgcaaaaatgatattaacgattatgtctgcctgtgagggataaatacaataagaggagtaaagtgtgaaaaatcttatttttcacatgcaggaatggagtatattatgagcattttggaattgtttatcctggccatcggactttcgatggatgcttttgcggtatcaatatgcaaaggtttgtcacttggaaaaataaaagtgaagcatatgcttatagctggattgtggtttggtggtttccaggcacttatgccacttataggttattttcttggcagcttttttgctgacatgataacaaagtattcgcactggattgcttttattttacttttattcatcggcggaaatatgataaaggaatcgtttgatgaagatgaaaatgttaatgcagatatgggtgtaaagaatatgtttttacttgctgttgcaacaagcattgatgcacttgcagttggtgtttcactggcatttcttaaagtgaacataatcccagctgtatcattcataggttgtataacatttgtctgttcagcagctggtgtaaaaataggaagtatatttggtgataaatataggtcaaaagccgggttatgtggtggtataatacttatactaataggtgtaaagattctgcttgatggtatgggtatcatataatatgagttatgaaaggaaagaggttttatgaaagaaatattaatagctttattattgcttgttgcagggtttgtgcttcttataaaaggagcagattttttcgtggatggaagctcatcagttgctaaaaggttaagagtaccatctatgattataggacttacgatagtagccatgggaacaagtctgccagagtgtgccgtaagtgttacagcatcacttagcaacaataacgcacttgcagtaagtaatgttgtaggctctaacatatttaatcttatggttgtgtgtggtgtatgtactttgtttgttccacttgctgtatcagtagatacattgaagaaggaatttccattttcaataatatgcgctgttcttcttgttatattcggaaagcttggaatgattcttggcagggcagatggaataatattccttgttttattcgcagcatatcttggctggatgataaaatcagcattaagtgcaagaaattcagcattaagtaaagaggcagaagaagctgatgaacagataaagatacttccggtatggcagtgcataatctatataataggtggcgctgttgctataaaatttggtggtgattttgttgtagatggagcttctaccatagcttctagtctgggactcagccagaatcttataggacttactattgttgcactaggtacaagccttccagagcttgtaacatcaatagttgcagcaaagaaggatgaagtggatatggcacttggaaatgttataggttctaatatatttaacatacttcttgtgcttggtgtagcaggtgctataagtcctgtaatattcatatcagaaaatattattgatataattatacttattgtcatgagtgtagtagtatgggtatttgcatggtcaaaaaagaagcttgtaagatggcatggagcagcgatgcttgtttcatacgcaatatatcttgtgtatatatgtatgcgttagttatattgatgcggggacaaaagccgccagctttgatacttacggatttttgatataaatattgcataacggctgatttacagcaggtattgcataacatataattaatgttggtaatcctgctttcgtataggtgtattacgaaggagaaataaaagcacatatgggagaatgtaaactgcttattaaagaaaatgagggaattcttgtatgtggaaacagtacaagagtagcaagaataagagtcagggatattaattatattagttgcgataacaggattataactattcataccgatagttttcaggatagtttttatgggaaaattggggaagtatataatgtattgaaagaatacggttttgaatatgttaatgaatcagagatagttaatataatgaaaataagaaaaatgcatacaaattacgtagtgttgcatgaagaaactgaacttatatgtagtaagacctgtaagcacaaagtaagagaacttatgtggaattgagttgatatttatatacattacaataatatcagtgctggtatatggctctgtcatatgtgattaacatatggcagggctttctcctttttatagcgcggtttttattacgttttattaaaagaaagtaaaagatggcatggaatttttgacagcatgataaagaaagtgttagaatattttcatataaaatgtgaaataaataatagagaagtatcattagcaggttctgttaatatactcggaaagaagaggaatataatgcaggcatatactgtatcacagtggtttttattcttttttatatattgttttataggctgggtatgggagagctgttatgtatcagctaagtctggcaaatgggttaatagaggattcttacatggaccagcattgcctatatatggttcaggagctattgtgatacttgtaagcacaataggtgtaagagaatctataccacttatatttttgtttggtatgatatcttcaaccatacttgagtttgttacagggtactgtatggagcgtatgtttggggtcagatactgggattatagtaagaaaccgtttaatcttatgggacatatatgtcttttttcctcaataggatgggggatattttctgtattgcttgtcagaatagtgcacaggcctatagagagcgttgtatgtatgattccagtaacaatagcagatattattgcatttggtgtggctattattatgacagttgatttcacccagtcattcaatgaagctatggatcttaaagcaactattgaaagaatagctagcagtaaccagcagataaaaacaattgcaaaaagaatcgaggttgcaactgcatttgcagaagatgattataacaagatgaaggaaaaacttgcagagggcagggcaacagttatgaataatgtaagtaaagcaaagggaagacttacatttgagagaaatatggatgaaagaaagggcgttaagcttgcaacgctgcagaagatgagtgaaacgatagttgaaggcctgaagaataagcttatggatgaaaagtacgcaaatcagctgttagaaacacttgaaaatgaaaaggttaatcttaagacggataataagaaaagctataagagtgtattcagaatggttaagcgtaatccaggagcagtatcaagaagccattcggctgaactggatgagattaagaagctcataaaatagttaagtgaggaattaggtattcagatggaaaagatagtgatatacaatgttaagcatgttaaggatataataaaatgtgcggctaacatgagaattaaaagtatagtacttagtgatgatatgttatcggatacgcttggtgatatctttgtaagtgccagtgattacaaagcaggtgatgagcttcctgaaaagtcggaagctaagcctggcattgttatattctgcgatgttactgataaacatatggacaagcttctttttgagatgaggacaggcaacagtgaagtggattataaggctgtgaagacaaagactaacagtcagtggacgataacaagaatacttgcgcagatggaaaaagaaagcatggagtatcgtatgaaaagcaaaatataacaaatgaaaatacaacaaataaaaatacaataaatgaaaatataatgaacaatgaagaacaacagataatagtgaataaaacaaatagtaataaagaaaaaaggcagacaggaaaggagagaaatcatgaacaatattatatatgtaacaacagaaagctttgaacaggaggttcttaagtctgacaagccagtgcttgttgacttctttgcagaatggtgcggaccatgtaagatggtaggtccggtgcttgaagaggtggcagcagaacaggatgctgtaaagatatgtaagatagatgtagataaacaaatgagtcttgcattaaaatataatgtggcatcaatacctacaatgctgctgtttaagaatggccaggtatcagcaaccaatattggctatatagataaaaaacagattatggagtttatagcccaataaaacagttgctttaaaatactatccaaaatactaggggtattgtttctaaattaatacgcatttattgtataaaactaaaaacaactaaaaaatgtattgaaattaattgacagggatgttaatatacccttgcgagagatagttaagaaattaacatttcgctttatattttttgagagttttgtatacaatatacaaactattatacaaattaacagttattttattaaggaggaaccaataatggtaaattttgatcagtggaatggtttcaaaggtagactttggaaagaagagatcaatgtaagagatttcgttcagaacaattacaagccatatgatggagatgaaagtttccttgaaggacctacagaagctactaacaagctttggggaagacttcaggagttacagaaggaagaaagagctaagggcggcgtacttgatatggaaacaaaagttgttgctggtcttacagcttatggtcctggatatatagatgaatctatgaaggagcttgaaaaggtagttggtcttcagacagataagccacttaagagagcatttatgccttatggtggtatcaagatggcagaagaatcatgcaagaactatggttatgaaccagatccagaacttcataagattttcacagaatatcataagacacataaccagggtgtattcgatgcttatacaccagagatgagaaaggctcgtcacagccacatcatcacaggtcttccagatacttatggacgtggacgtatcgtaggtgactacagaagagttgctctttacggtatcgatttccttatggaagagaagaagaaggatcatgctaactgtggttgtggaacaatgacagatgacgttatccgtttaagagaagaaatatctgatcagtacaaggcacttgcaggtatgaagaagatggctgaaagctatggttatgatatcagcaagccagctactaacgctaaggaagctgttcagtggttatactttggatatcttgcagctatcaagacacagaatggtgctgctatgtctgtaggtcgtgtatctacattccttgatatctatattcagagagatcttgaagctggtactcttacagagaaggaagctcaggaacttattgatcatttcgttatgaagtgtagaatggttaagttcgcaagaattacatcatacaacgaattattctcaggagatcctacatgggctactcttgaagttggtggtacaggtatcgatggacgttcaatggttacaaagaacgactacagattccttcatacacttgagaacatgggaccttcaccagaaccaaaccttacagtactttactcttcaagacttccagaaagcttcaagaagtatgctgctaagatttctgttgatacatcttcaatccagtatgagaacgatgatgttatgaaggtaacatggggcgatgattattcaatctgctgctgtgtatctgctacacagacaggtaaggaaatgcagttcttcggagctagagcaaaccttgctaagtgcttactttacgctatcaatggcggtgtagatgttaagaacagagaacaggttggtcctgcttacaagccagttacttcagaatatcttgattatgatgaagttgttgataagttcgatgctatgatggattggttagctgatctttatgttaatacacttaaccttatccagtatatgcatgataagtattactatgaagctgctgagatggctcttattgatacagatgttaagagaacatttgctactggtatcgctggattctcacacgttgtagattcactttcagctattaagtatgcaaaggttaagacagtacgtgatgagacaggtatcgttgtagattacgaaatcgaaggcgacttccctaagtatggtaacgatgatgacagagctgatgatatcgctgtatggttacttaagacattccttgagaagattaagaagagacatacttacagaaattcagagccaacaacatctatccttacaattacttctaacgtagtatatggtaagtacacaggtgctatgcctgacggacgtaaggctggtactccactttctcctggtgctaacccaagttatggtgcagagcagaatggtcttcttgcttcacttaactcacttacaaagcttccttacgagtgggcattagatggtatttctaatacacagacaatgaacccagacgctttaggacataacgaagaagaaagaattaacaaccttgttaacgttatggatggatacttcgatcagggcgctcatcacctcaatgttaacgtattcggtaaggataagttacttgatgctatggaacacccagaaaagccagaatatgctaacttcacaatccgtgtatctggttacgctgttaagttcatcgaccttacaaaggaacagcagatggatgttatttcaagaacattccacgacagaatgtaatcatacgaatagtataattgcttgaaaattaaatgggataaaagtggctttaagttgcttgtttactggtgataagttacgttaagttataacaaaaaatgaaaaagccacctgtattcaaaaaatgcagtacaatctgagatgattgtactgcatttttgaatttcattatacatcagaaagtcctgtacgatatttttttatgaaaaagttgtaaagtggtgttatacaggaatgaggcagtaatcgcaaacacaatccacaatacaagatgatattctttttttctggatgtttctgtgatatacttatacgcagtcgtatcagaccggaaaggaaatattatgttacaaaaattatatgtttttttcaggaaagaaaccgttttgtcaattgcagtgatactggcgcttctttctatgttctgggtcagaccggataaggcttattttacttatatcgatttcaggactctcgggctcctcttctgtttgatggcaattgtagctggtttgaaggctgttggtgtttttgatatact

SEQ ID NO: 361 - DNA, 20693 bp, Unknown
  gut microbiota DNA sequence
atggagctgatctgtactaataggtcgagggcttaaccgaaagaggttaaggtttggatagaacaaagagagttattcttgaaggtaagagtacgaaagtacttgacagaatacggatgtataatatagaatatttaatgtgcagttttgaaggagcaatcctttttacttaatagaattatctagtaagtatggcctggtggctcagctggttagagcgccgccctgtcacggcggaggtcgtgggttcgatccccatccgggtcgtttacaattatatattgtaggcatttaatgcgatatgggatcttagctcagctgggagagcatctgccttacaagcagagggtcacaggttcgagccctgtaggtcccatcgatatgccgacatggctcaatggcagagcagctgatttgtaatcagcaggttgttggttcgactccgactgtcggctttttgttaacaataatcttgatagttaagatatcaaggggattgttaatctaattttatatgggtggattcccgagtggccaaaggggacagactgtaaatctgctggcactgccttcgaaggttcgaatccttctccgcccatttgatgaatatatttcatcattttgcatatagtataatattgacgcggggtagagcagctcggaagctcgtcgggctcataacccgaaggtcacaggttcaaatcctgtccccgctactttgcctagatagctcagtcggtagagcagaggactgaaaatcctcgtgtcactggttcgattccggttctaggcactagatgttgtagatattacagtacgtaatatctacttttttttgttataattatatatttaatcttgtggagatagtaaatcaagaggtctgtgaagcaggaagtcaattggctttagacaatgggtagttcatcgtatttatataggcatgttatggaaggaataaataagtatgaaagatattaaagaaaaaataaatgagtggaaaatatacgaagaaaataaacaatataaaaaaaataaacaatataaagaaaatgaattgaaaacgaaacttcataatgaaaatgcttaccaatatgatgatatgcttggaaaattagaagcatatagcaaggaaaacatagttcctatgcatatgccaggtgctaaacgaaacagtgaacttataggcagatatatggatgacatgccagcaccatatgacatagacattactgagatagatggctttgataacatgcataatgcagatggaatgataaagaaagcatttgaaaagacagcggcattatatggagctgatgagagtctgtttttagttaatggaagtacggcaggtaatatggcggcaatatgtggagttacggataaaggggatagtataatagtggcaagaaactgtcacatttccgtctataatgcaattatcctaaatgaactggatgcgaattatgtttatccacaatatgatgacgagtatggatactataaggggataagtttaagagaaataaaggatactgtggaaaagaatgagagtatgggcaaagatattaaggcagtagttataacttctccgacatatgaaggtaacgtttcagacattaaaaatatagcagcatatcttcatgaacataatataccgcttatagttgatgaagctcatggagcacattttaagttttcttgtgaatttccacagactgcagttgagcagggggcagatatagttataaacagtgtacataagacacttccttcgcttacacagacagcagttatgcatataaactatggatatgtaaatgtttctaaggtgaaaagatactggaatatatatcagtcaaccagtccatcatatatacttatgggatcaatagacagatgcatgagcataatagaaaaagatggtaaatatctttttgaaaattatatatcaaagttaaaaatattacgcaataaattaggtcagcttaaaaatataaagcttatagattcagatgatatatctaaaatagttattgggtgtgataatgctaaaaaactatacgatatattattaaagaagtatggaatacagcttgaaatgtcgtcattaaagtatgcaatagccatgacatcaatatttgattctgcagagtattatgacagattttacaatgcattgtgtgaaatagatagaaggtataatgatataatatctgaaagtaacagtgtaaataataatcaaaattatgctgaacgttacaatatatttaataatacttcatcaataaaaaaagcagatataaaagtaaatatagctgattttaaaaatgaagctttaatgagtatagctaaggctttaaatgaaggtgataaaaacggatatgataaaattatgatgaatgatagctctttgtatggtagaataagtgcaaagatggtatatgtgtatccacctggaattccaattctttgtcctggtgagattatatctgaaaatgtcgttaatataataagcaaagcaatagataatggtcttgaagtagttggacttaaagataatttaaaggatagccgcaacgataaaaacacaaaaaataagggatgtaaaggagcatttgtatgcctgaaatagcatttataatgggaaaaagttccagtggaaaggatcatatatttaaggcacttatagaggatgaaacacttgggttaagtacaataaccatgtatacaacacgccctatgagagctggtgaaacaaatggggttgagtattattttgtagatgataacaaagtctgcgagtttgagaaaaataataaaatcattgaaatgagaaaatatcagactgtatacggagagtggaaatatttcacagcagatgatggtcagatagagtctggaagtggaaagcgttacatagttattggaacaatagaggcatataacaaattcgtggagtactttggaaaagagtgtatgcttccgatatatattgaagtagaagatggactaagactgcagagggctattaagagagaacaggagcaggatgttccacattacgaggaaatgtgcagaagatttttagctgacagcgttgatttttcagaggaaaatataagaaatgccggtattgttaaaagattcagtaataacggctcaattgatgaatgtatatataatataaaagaggaaataaagacaagattgttttaatgctgtatttatgataatatgttatatgattggagtttgctatggatattaaagttaatgatattaaagcgtcatctcagatacagagtgtaaaaagcacagcaagttcagatgatagtttcaagtttacattaataagtaatattgaagaaaaagaccttcaggaaaagcttggtaatatgatgcaggagattactgagcagggagaaaagattgctaagcatatggatattaaagatatgcgtaagtacagagaactcgtaaaaggctttttaaatgaggtagttaatcgttcgcataagttttcaagagagaactttcttgacagaagaggccgtcacagagtatatggcatagtcaagcttgttgataagaatcttgatgaacttgcaggtgaacttgttaaagaagaaaagaatcaccttgaaatcgttggaaggatagatgatataagggggcttcttcttgatatcacagcatagtcatataaaaagaagtagaaagatgcaggaataaacaaaatgagtagtttttcagatatttatggatatgaaacaattaaagagcatatgcagagtgccattaagcttggtaaagtatcacacgcatatattataaatggcggacttggttcaggaaaaaagatgttagcaggaatatttgctaagactctgcagtgtgagaatatggaagagacagttaatccatgtaataaatgtcattcctgcatacaggcagattcaggcagccagcctgatattatatgggttaagcatgagaaaccaacaagtattggtgttgatgatgtaagagaccagataatatctgatatgcagattaagccatattcaagcagatataagatatatattatagatgaggctgaaaagctcacagttgcagcacagaatgcacttcttaagactatagaagaaccaccggtctatggtatcgtaatatttcttacaaccaacgcagatatattccttcagacaatattatcaagatgtgtaatgcttgatttaagacctataaaggatagtgttgtagaggaatatcttaaaagcaattatgatatatcagagtatgaatgcaggtttgcagcgaatttcgcacagggaaagataggacgtgcaaaaacgattgtagaaagtacagagtttgcacatcttaagcaggatgtcatgcatgttataaagaatgctaaggagatgtcatcagcagagattatgtctgtagttaaagacataacgaattacaagcttacaatagatgattatcttgatcttatggctatgtggtttagggatgtgttattgtttaagagtacaaatgatacgaattatcttatattcagtgatgaaatatcgcttattaagtcacaggcacagattatgtcatatgagggcattcaggatatacttaattccatagataaggtgagaataagactcaaagctaatgttaactttgatttatgtatagagcttcttattatggctatgaaagaggctatgtaggtataagttaagatgtaatatattggatatgacaatatgagaatgacaacattgaaaatgaaataaaaagtcatggatgtggctttttatggaagtttcaacgcacattaaatgcaaataaactgactaaaggttagaagaatagtgtgaaaaataagatttttcacacgcaagatttgtgcttacgcacaaacttgagatgcgctgagaagcagcgcaagaatggagattaaaatgactaaggttgttggagttagattcagacaggtgggaaagatatatttctttgcacctggcaaatatagtgttgaggttggccagcacgttatagttgaaacagcgcgtggtgttgagtatggttctgttgtacttggagagagagaagttgaagacagtgatgtagtacagccactcaaagcgattataaggatagctactctggaggatgatgaaagagaagcaaagaacagggaaaaagaaaaggaagcctataagatatgtctggaaaagattaagaaacataatcttactatgaagcttatcaaggttgagtatacatttgataataataaagtattgttctactttacagcagatggaagaatagatttcagggagcttgttaaggatcttgcatcagtgtttaagacacgtatagagttaaggcagataggtgtaagggatgaaactaagattctaggtggtataggttcatgtggaagaccactgtgctgtgcaacatatatgccagagttcgtaccagtatctattaagatggcaaaggagcagaatctctcacttaatccatctaaaatatcaggtgtgtgtggacgacttatgtgctgccttaagaatgagcaggaaacttatgaagagcttaacagccatcttccaagtgtaggagattatgtaaccactcctgagaagcttaaaggtgaggtgtcaagtgtcaatgtattaagacagcttgttaaagttatagtaacacttgatggcgatgagaaagaaataagggaatatcctgtttcagagctgcgatttaagcctaaaagaaaaaacgacagaatgaacatagatgataaagagttaaaagagcttgaagagcttgagagaaaggaaggaaaagcccatatcaatgatgactgatgttaagataaatgcagaagcttgtattaatgcagaatataagattaatgctaatgaacgaatagatgatttatgcagggataatcttaagttaatccagaatacagatgtgttctgttttggtatggatgctgttttattgtctacatttgcaaaagcaggaaagaatgataaggtgctggatcttggtacagggaatggtataatacctatacttatgcaggctaagaatcctggtggtatgtatacaggacttgagatacaggatataagcttcaatcttgcagcaagaaatgtcagtttgaataacctttctgatcacgtaaatatggttcagggtgatattaaggaagcttcacgtatatttggtggggcttcttttaatgttgtgacaagtaatccaccatatatgaatgagaatcatggaatagttaatcctgaaagtgcaaaggccatagcaaggcatgagcttttatgtagtcttgaagatgtagtaagagaggcatctaagtgtcttaaggttaaggggcatatgtatatggtacacaggccatcaagattagtagatatatttacatctatgaagaacaaccacttagagcctaaacgaatgagacttgtatatccatatgtggataagcctgccaatatggtgcttatagaggcagttaaaggtggaaattcgcagcttaaagtggaggaaccacttattgtatataataaagacggaagttatacagcagaacttctggatatgtatggaatgaaagaatgaatcctggatgatttcggatatgaataatctggaaggctataaattaatgaaagattattaaatgaaatcttattaaatgtaagctataatatgaaagggtgtttgtatggataataaagatatattggaatcggaaaaaggcataagccagggtataggacagttatatttatgtgcgacacctataggaaatcttgaggatataacattcagggtgttaagaatattaaaagaggttgatgttatagcagcagaggatacgagaaacagtataaagctgcttaatcattttgaaataaatacgccaatgactagttatcatgagtataacaagtatgacaaggcaaaaacactagttgagaaaatgcttaagggtgaaaatgtggccgttataactgatgcaggaacacctggcatatcagatcctggagaggagcttgtacgacaggcgcttgaggcaggtataaaggtatcaagtgtacctggggcagcagcttgtataacagcactaacaatgtcaggacaggctacaagaagatttgcatttgaagcatttcttccatcggacaaaaatgagagaaaagacatactttcagagcttgagtcagaaacaagaacaatgattatatatgaagcacctcacaggctgttaaagacacttaaggagcttagcacagtgcttggtggtgaacgtgcaataacagtgtgcaaggagcttacgaaaagatatgaaaacagcatggtgacaacacttgatggagcctgtgagtattatgaagtgaatgagccaagaggcgagtttgttcttgttatcgcaggtaagagccgtgatgcgataaagcaggaggaacaggataagtggaaggctatgtctgagatggagcatgtacagatgtatatggaccaggggatggataagaaggaagctatgaaggcagcagctaaggacagaggagtatctaagagggatatatacaataagctgcttgaaagtgaataaaatcatttttgttacaaaaatgttacaaaacttatgtaaaataggttgctttattataataaatgatatataatacgtttacttgtgaaatatttctaaaaaatattgggtaaaagaaaaataattataaaagtattacaaaaaagaaaaggcgtttttttggtaatgttataataattatttaaagaattgattgttttaattgaggaattgtttatattgtacagttttttagaaatgtgaatcaaatatatatcaggaggaagttatgaagaagaagacttttaacagagtatttgctatgtttagcgcagtacttatgttggtaggtatgttcccttctgttccagcggctgttgttgcagctgaaagtactggaagtgaaggaacagcagtggcaaaaaaggcttatgtcatggatgccgctgaccttaaagctgagcagtttggcgcagatggcaaggtcacagaagatattaaagtaggaacagatggttatttcactgttgcttctaagggtggtaaaaactcattaaaaacattagctgataagcttgaatgtaacatgggtgaatattcacaggcgcttaatcttggaggtggattaaatacatctacaggacaggcaggtataacatttactacaacagagccagttaaggttattgcttatgttgcagtaaaggctgttaataataaacattcattccagtatgccaaagcaggagctaaggctacatcaattgagatggaaaacgatacaagcattgttaacaagattgagtttaatcttgatgaagccggtcagtactggttaggtggtaacaatggtggtaacttcttatatgtagaggttcagagccgtttaccagaatatacagttgatggtgcaacagtagatgcatcaaagtttagtgctgatggtaagcttatagctgatgatacattatcaggtttctttagtgtatataagaatggtgacaagacaaagttagttacaggtcagtcagtagcttatggtaaggaaacacttacaacatcattaagattagatggaagtccatcattcgcagatggaaaagaaaagtctgctatcacatttacagcaaagcaggatttcagacttacattagtagcagcccagaagggttcaggagttccagagttacagtatgctaaggatggcggtgccacagttacacttgcagatgcagtatttgaaaagggtacagcagctaagtatacagtagagcttccagctggtacatataagcttggttctaagaatggtcttgatatatttaatatgagtgttaagtatattgagaagtatgaaatgaatgctaatgacctggatctttctaatgcagatgcagatggcaagttcaaggtaacagcagatacagcagttggaacagatggttacttcacagtagctggcaagggttcaaagaatgtatttattaagttagcagcaccagcagaatataagggtgttacatataacaataagcttcagcttagtggagctactaagttagcagatggaacagcaacaattaaggttaatgttgaaaagactgctaagattactcttgtagcggcagctaagggagcatctggtgaaggtactaaccttatatatgctaagacaggagttacttctggtacagcaataggtcagttaggtgtaacagatgagataggaacatatacattagaaaatgttaagccaggtacatattatattggtagtgctaagggtgctgacatatatgatatcaaggtagaatatgatccagaagagaataagcaggcagttgcatgggatacagtagaagctcctgttatcaattcagttacaacagacgcagatggaaactttgttgttaacttcacatcagttatagatgaacttaaaggtgctgagaatgtaaaggttactatgcttgaaggtggatatgaagtatctacagttaatgttaaggcacagacagattcagttacatttacaccactctggtcaggtgattatacattcacagcagttgcacagagagttggtgcagctgataagtcaagtggtgcatacagctatggtgcatatacacttgcagtaagaaagccagttataacatgggcacagaataagggtaacggaagcgtatatcttgactgggttaatattgaagatgcagacagctacgcagtaagctatagggaagctggaagcacaggtgattttacatatgctgttaaagatcttaaagcaagccaggcagattacacagtaacaggacttgaggctggtaagagctatgagtttaagattgaagcaacaagaaacagcgatggattcgttgctaatgctgttgcaacagttgaagttaagaaggacgcagatcagaaatggtatgtagccacagtaggttctgcacagacaactaatgcggttattacagcagaagatggaacagtaactaagtatgatcttgattcacaggaacagacagctaataagcagaacaacgttgaagctttagatatttctaatacaaacggaacaattgaaattgcttcacagacaagtggtaagatatctgatgatgaagatggtttctcttactactatacaaagattgatccagatacagagaactttaagttatcagctacatttacagtaacagatacttctaagacaccagataaccagactggttttggtgtagtagcagctgatacacttggtattaacaactggggcaaggttgactatgtacataagtatttcaactatgcttcatctatggtatatagcagcaagtcaaaaacagcttgtatgagaaatgtaacaggttatacatcagcagattcatctaataatgatggtgttgacagagttgttacaaagaaagactttaaggcagctacatcatttgcagcagattcaacatatgaattctcacttgagaagacagatgaaggatatacagcggtatgcaatggtgaagaaattaaaaatgaagataattcattcacatcagtacaggaagatggaacagttgttgttggtgtgatggtaagtagaaagattggtgttaagattagtaacatcaagttcactaaatcagagagtaagggtattacatctaatgataagggtgacgacaagataaaaccaagcggaagagtatattcttctaatacagtaggtgcagcaagctatgaatttatctatgttcctaactgtgatggtacacttaaagtaacaggtccagatggtaagacagaagaaagagtattatcagctggtgatgctgcaagagtaaatgtagcagttaatattggtgacaataagatatcctatacatatgctcctaaggcaagtgataagattacatctacagatgaacttaagggtgatgtaacagttaagcgtgctacatacggagaagagaatggtgtacttatagtatcaccagatggaacaaaagatggtgatgctacagaggctaagccacttaatcttgcaacagcagtacagtatgcacagccaggacagactatcgttcttaaggatggtacatataaggattggatatcaatccagagaagcgtaagtggtacagcaagcagaatgataactcttgtagctgaaaatacaggtaaggcagtatttgaaggctgtggtttatcaatcattggtgattactggcacgtatatggtatctatgttaaggattcatcaggcgtaggtatccagattagtggtaacaacaatatcgttgaaatgtgtacagttgaacatgcagctaattcaggtatccagataagccgttcaggaagtgctgataacaagactggtattaagtataagttatggccaacagataaccttgtaaagaactgtgaatcttttgataactgtgatgctggacgtaacgatgcagatggtttcgcagctaagcttacatgtggtaacggaaacagattctacggatgtatttcacataacaatattgatgatggatgggatctttatgctaagtcagtatcaggtgagataggtcttgtaactatagaaaactgtgtagcttacaacaacggatggcttacaacagatgatattacagatcctaactatgaatatggtgaaggtaacggattcaagcttggtggtggttacttaaagggtggacatgttcttaagaacagcatcacatttgataaccatgctaagggaatcacaagtaacagttgtcctgatattaagatatatgattgtacatcatacaacaattctattaagaatagtgcttacaatgtaggtcttaatacaaaggattcaaacagaaaagaatgggttgttaagggattaatttctttaaacaatgataagaacactaaacttgatgatttaattccttttgctcttcatagcgaggataactatatctataatggaagtgcttcttataataacttaggtgttgaagcaactaaagactggtttgtaaatgtagatacttcagttcttccaacaagaaatgaagatggtacaatcaatatgcatggtcttcttgagttaaatgatacagcaccagctaactcaggtgcaagacttgatgtaacaagtgctgaggctaaatcagttaagccaagtacagttgcacctggtaaggttgaacaaccagaaataaatgttaaagaagatgcaccagctacaaatgttaattatgattttgcagatgtacttactgatgatgaatgggaagcatataaaaatggtgagaatgttaagattacagttgaagtaaagaatgcagatacaacagtaacagaagacgtaaagaagttagtagaagaaaaagtaacagaagaaatcaaaggtggtgtaataggtcagtatattgatcttagcattataaagaaggttggagataaagatccagtattagtagaaaatacaaaacagccagtgacatttagtgtaactgtaccagaaaagcttgttaaaagcgacagagaatacagtatcgtaagatttcatgatggtgttgctgagattataaaagatgctaatacagaaacagttgatggaaagctagttattacatttagtacaagtaaattctctacatatgcgattgtatacaaggataaagtagataataaacctggcaatgatgataataacaagggtgatacaccaacagttccaacagttccaacacagccaacaacaccagataactctaataatggtaatgctgatggcagcacaggtgatgcagctacagctccatctactgaatcaggtgaaggcgcaacaacaggtgatacagcacgtccagtagtatatgcagtattagctatgatggcagcaggacttgtattatcagtagttgtatatgataacaagaagaaaagaatttagttaatcttttcaattgaagcaataaggtattttaatatgagaaagtagtaagctttgcagtcagccgaatatagggttggcagaaaagttaacaggattacagtatgcagatgggggtctgtatattgtaatatacgagggaagtagtgaagaactaaagataaacgtgaaaaaagttcaggataaacatcaagtcggtgtttatcctgaactttttattttatgtatagaaaaaaagaagaaacgatatttaattgctgatagtgtgttcattgataatagccctgatagtgttataaagataaggctttaatgtatcaatatcagcaggttctttatagagaatagcactgtagcaagtagagcttataagttctactatcataaagagcattatttcaggttctttaaggttaagtccggattctgacagcatatcgtaatatacatctttgaagttaagatcatcatcagcaacattggttgtcagagcctctttgaatattccccaggacagattctttgaaatgaaagtaagaagagtctggttatcattgagagcattgattatatggtcagcaatgaatacaatttgattagtaagtgagattgtaaaagcagcatttttagctgtctcctcatatatgtgactgttaagagctgtagcagcattcttgaaaagtttgcttgcctcatgagaaatcagcttgtttctgatgtcatatttatctttaaagtaaaggtaaaaggttcctttggctattccagctttctgtgatatctcagcaatagatgtttttgatacaccttgtgttgtaaaaagtttaaatgccgtatctaaaagagaagttcttttttgttgtttattactttctagttttcccatacaaaaacctcatttcttaaagctgtaactattttaacacgaaaaaaataaaaaatctataaaaaaatgacctgaagtcatttttaatattgactatcagtcattttgtgctagaatatcgtttgtaaagaaaatgaccataagtcatatttgagagtttttatcaatatatttatctgtgagagctgttaaggctgatcactaaggtggataaatatataagaagacgtcgcagacgtagaaatgaggcgaatgtatggaaaagtttggaaaagtaattgttaagcttagaattcctattctggttctaagtatcctgcttcttattccatccgcaattggatatgttaatacaagggttaactatgatatcctctattatcttccggatgagattgagactatgcagggacaggacattcttatggatgatttcaataagggtgcctatgctatggtagttgtccaggatatggacgcgaaagctgctaataagcttatcaagaaggtagagaatgtagaacacgttgcacaggttatttcttatacaggaatagttggtgaggatgttccatcagaaatggtaccttcaaagttcaggaagtatttcgagaatgacagcacagatacaacgttatttgctatattcttcgataatacaacttcaagtgatgacactatgaatgccataacacagataagaaaagtaacagaaggtcaggcattcataagcggtatgtcagcagtagttacagatacaaagaatctttcagagaaagaaactccactttatgtacttatagcggtagtgcttgtttgtatcgtacttgctatatttatggactcatttcttgtgccagtattctttatgctgagtataggaatggcaattgtatacaaccttggttcaaatatccttttgggagaggtttcatacataaccaaggcacttgcagcggtactccagttaggtgttacgctggattattcaatattcctatggcacagctataaggaaatgaaggcacagtatccaaatgaccataaggaagcgatggcagttgccattggcaatacacttacatcagttgtcggatcttctataacaactgttgcaggttttattgcactttgttttatgagcttcacacttggtcttgaccttggtattgttatggcaaagggcgttatatttggtgttatcggatgtgtaactatactgccatctttgattcttacatttgacagggcattagagaagacaatgcatagagaggttatgccgggatttgataagcttgctgcatttatagtaaatcattcgtgggtatttattattatcttccttgcgttgttaggacctgctatatatggacagagccatacatcagtatattatgatctgtctgatacgcttccagaggagcttgcatgctcacaggctaacaagaagcttgaagaaaactttgatatgaattcaatatatatgatacttgcagatacgaatatgtctacagatacggcaaatgaaatgcttgataagcttaatgatgtagacggtgtacagtttgcactcggacttgatacagcacttaagtcaggtattcctcaggaattccttccatctaagatggtatcagagcttaagggtgaggattatcagataatgatgattgctactgattataagatagcatcagatgatattaacaatcagattaataaggtaaatgatattgtaaagtcatatgattcaaaagcaatggttgttggagaagctccttgtactaaggatcttataactataacagataaggactttaagacagtcagtgcagtatcaatagtagctatatttgttattatactgtttgtacttaagtcaatatcacttcctgttatacttgttgcagcgattgagtttgctatatttgtaaatatgggtattccttatttcacacatacacagataccattcatagcatccgttgttatcggtactatacagcttggtgcaacagtcgattatgcaattcttatgacgacaagatataagaaggaaagaagccagggacttgctaagaaggaagctatacagacagcacttgcagcatcaataccatctattatcgttagtgcgcttggtttctttgcagctacatttggcgttggctgcatagcatcagttgatatgataggttcattatgtacattgatggcacgaggcgcgattataagtatgtttgttgttatattcatacttccatcattgttcgtattatgtgataagctcattatcaatacaagctttggttttaagcctaagaagaatcaggatatgtagccagatggatgaatgaacgggcaaagatgtatatgtcgtaacagatataagaatatatcaggaagtaagaaaatggaggaatagttatggttaagaagactttattcaaatatagttcagtattaatgagtgttgttcttatagcatcaacgcttacagcctgtggaacaaacacagcatataatcaggtatcaagcgaggttgcagtaagcagtgaggcagcttctaatacagaaagcataatatccaatgctattaaaaatgagttatctgtatcaaacacaagtacattgaagacaaatacgcgtgacgaaatggtatatgtgtttggtaaggcagatggaacacaggatcacgtaactgtaacagaaaaggtgacagatgctaatggtgatacaacaactaaccagagcagttcaagtaagagtgcacctgtatctatgaaggttacttataagttaaacggtgtagaaacaaagccagaggatatgattggcaaaagtggtaaggttactatcagatatgattacactaacaatgagaagaagactataaaagttaatggaaagtcacagacagcttatgttccattcacaatgatcacaggaactcttcttccaacggataaattcagtaatgtagaagttactaacggtaaggtcagcaaggttggtgataatataatagcacttggtatgactatgccaggtttaaaggatactttaaaccttaagtttgatggtgaaagccttgatatggatattccggaatactttgaaatatcagcagatgttaatgactttgagcttgatatgtctatgtcagtagcaactacaagtgtactcaacgacgtagatgtagatgacttctctcttgcaaagcttgaggataagatgaatgagcttcagtcagcagcagaccagcttacagatggaactgttactcttcaggatggtacccagacacttgcagacagcatcccagcacttacagatggtgttaaccagctaaatgatggtgcaggaacacttaagaatggtatatacgcttatactgatggtgcaacagcactggcagcaggagcaggccagcttaaggatggtatcacagcttatactgatggagcatctaagctttcagcaggagcaacacagcttaagggtggtctttcaacatatacagctggagtagcacagcttgcaaagggttctgatactcttacaacaggtattgcagcatatacaacaggagcatctaagctttcagcaggagcaggaacactcaaaaagggtattgaagactatacagctggagtagcacagcttgcagatggttcgacacagcttaaggatggtctttcaacatatacagctggtgtagcagctgcagcatcaggaactgcggatttaaagagtggtataaatgcatacacaacaggagctaagaatcttggaaatggtgctaccgctctgaaaaagggtatcaatgattatacagctggtgtaacgaaggcagcagatggagctttacaggtaagtaatggcgtttcacagttaaagaagatgcttacagaaaaaatggctgcagatcttaaaaataatattactgcttataaaacgaaccagaatattacaactgatgtagaaaatcttactaaagcagctgttcaggcaggtcttagtgatataacaatagctgatgatcttactgtgcttgcaaagactagcgaaactgaaaagatagaagctaagattactgaaatgtataataaatatcttatagcatataccaatagtgtagtgaataatggtgcaggcagtcagctgacaggcttatatgcaagccagttaggacttttagtaaaggcttccggtaatcagggagcagcaagtgcgctttcacaggtggcaacacagctttcaggaagtacaggttccctggaaacacttgaaaaaggagcagaagatgtaagtaatggacttaacactcttaattccatgaataaaacacttaatgatggtgcagcacagcttaatgatggcttagtagaattaaataagaataatgataatttgaataatggtattgcaagtcttgatacaggcgtatcaactcttaatagcagtaatgaaaagttaaatacaggagcttctcagttacaggcaggtgtggttaagcttaatgaaaacagtaaagcacttaatgatggtgttgcccagatagatacaggacttacagaacttaatggtaataacaaagcacttaatgacggtgcagcccagataaatgggggacttgtacagcttaatgctaacaatgatacaatcaatggtggtatagaccagatagatagcggtcttataacacttaatgcaaacaacagcacacttaatggaggtattgcccagttatacaacggcttcgcaacacttaatgcaaacaatccagctttaagagatggttcatcacagcttgctgatggtacatcaacacttaagtcatcatcagcaacattagcagatggtgttacacagcttaatgatggtgctataacccttaaggatggaatggctgaattcaacgcctctggtataaaggctataacaagtcttgtaggaaatgatgctgatacagcagtagatacaatcaaggaggttataaagcttggtaagaattataattcattccttgataagaaggatggaaaggaaagctcagtaacattcatatataagactgctgagttaactaaataataaggcttacttttccaaaactctcatatatataattgccggccaggccggcggaaagattaacaatctttcaaaaagcccccacaggaattatatctgtgggggctttaatatttattcacgtatcaatgcaattaaggtgtttaaaagcttttgaaatattcttccagtcttgtaaatgtcttagtaagtgcaatggcttcactttcgcttaagtcttctgtgatgtagttaatcatatctttgtggaactttttgtgatgattatatgcagcaatccctttatcagtaagtgatgcatatacaatacggcggtctttttcgccacgtgttctgataacgtatccttttttaacaagtccgttaatgccaactgtaagcgttcccatagtaacaccaagagccttggatatggtactcatggttccaggttcacctattccgatagcttctataatgtgcatatcggtcacggaaatatccttgaattcatctgtaattaaagctttttcctctatattcataatatcgttaaacaacgtaacaagtatagagtttaatgattcgtaaatgtccataaaagcactcaccttcatataaaattaacgtaaaaaactaattacattatatattacaataaggggtaatgcaacaaaatactacacctctttgaaccattttaaaccacttttagtttctaatggttataaaataaggtgtagtattttggtataaattatgacataacagcttaagctatcaattaattattcattcaattatctattgatttttttagcttttacagcaaaggtataaagtgttgcactgctgcaaagaactataagtagtgtaagccagagtgcaatattactgttatcagctgtcttaggtgtttccagcttattgtttgtaagcttctgttttgttataagatatgttgagcagtgatcttgttctactgtcatataaccatcattatcgactactgcagacatcatgctgattattgttccatcatctaagagctggctgtaataaagtgtctggccagcataggcttttccaacatttaacttaatgcttgcttttgcaggaagtgcaccagaataattgtatacattacttccaacaagaccaagaagtataaaaagaataattcctccgtgaaatatatattcaaatgacttactgtatgtaatgagtattgttaaaaaaaacagagagtaagcctgctaaaatcatcagaatgttctgaagcctgctgcttaagaaatgtttaagcagaggatataataaaaaacctgctgtactgacaccaagtacataattctgtgaaagagtggctttttgttctgatacaagaagagaaagctcatttacaaacatatattcaacacttaagaaaataaatgtaaataatcccattaaaacaatagcatagatatgtggcagactggttaatgttttaattccgccacattttacagtgtccttctgaggtgaattcatataataatcctccattcttgcataaattatatatttgaaagtaggttaagtcaatgatggttacaggaaggtaaaattgtcagttatctgac

SEQ ID NO: 362 - DNA, 668 bp, Unknown
  gut microbiota DNA sequence
tcattgacccgatgcaggcgtttctgggcgcagatgtggacatgaaccgggcaaatgaagtccgtcccatcttccgtagtctgggagacattgcacaggctaccggatgcgctatcgtgctgatcggacacctgaacaaagccgcaggaacgcaaagcacctatcggggattagggtctatcgacattacggcggcagtccgcagtctgctttttatcggcaagctgaaggacagccccacaacgagggtgcttatccatgagaaaagctcccttgcgccgcccggacagtcccttgccttttctctgggagacgagaaaggctttgaatggataggagcttatgacattaccgctgacgagcttcttgctgggacagacaccgccaagaccgagagcaagaccgcacaagcgcaaatgctcattctggaactgctggcagatggaaagcgtatgccaagtgcagagctggaaaagacggtcaatgagcgtgggatttcctcacgcaccatgagaacggcaaagagccgtatcggggacaggcttgtgaccgagaaagacggcacagtatgggtctgctatctccgagactgacaacaggaacacggcaagcgtggcaaagacggcaaggtttttatagataccttaatgttgccgccttgccttgtt

SEQ ID NO: 363 - DNA, 4726 bp, Unknown
  gut microbiota DNA sequence
agctcattctgagtgttcttggtaagcgtaataagagcattcataatctgggttatttcttcagtagatgattttgtcatctcagcgagagagcggatttcatcggcaactactgcaaagccttttcctgcttcacctgctcttgcggcctcaatagaagcattaagtgcaagaagattagtctgtgaggatatattcataataacattagttatatcggatactttacttacgtgttcaacaagattgccgattgtttcggatatctgtagggcagaggtatctactatggcagactggctggcaagctcatcggattcattctttcctttctctacaatctgttgaagctgtcttgctgtatttaccgctatatcggtagattgattagtcttattaagtcttgtctggatttctgttgttttttcagactgaagaatactttgttctgcactactggtagttccgtcagaaataatgtcaatagttttgttagtattgctaattatttctgctattttatcaaggtcttttcgtacctgttcaaactgggtatttacattgttggatatttcattaacatgttttgctatttcaagttgtttttcagccttttctttaactgcgttagtttcttcctcagagaattctacaagtcttttaatagccttgcatcctcctagaacgtatacaataagacatgtaataacaagaaaaataacctttacctgttctgttttatcagcagggttagtagtatttatgtatatgattttggtgattacaaagaaaaatgttgcacctgttccccatattatcaggtattcattcatataaacagatagtgataacaaagcaggaaatataatcatcatagttcttgcaggctgtatataggttattataccaaaaacagcaagaaaaccatatgcaattgacagctcagcctttttttcataaatatgttttttgacatatatggcattgcctatgtaaaaaagaagatagacacatgtaaaaacaatcttttcaataacggttttgtcagatgttaaagtaataaaaagacatataaggtatgttagtgtcacagtagtgctcgctgttatattggcacgtttcatctgatcaggtgttagactttttcttgttaaattaagcatgaatagatactccttattaagtagatttagtttaccccatgcataaacagtgtgtagaaatacaatctgatacacacttagcattaaaaatatatggttgtccgtaagtagtttaataactataacataattatgtaaaaataacaatatgttattaattgtaaaataaatgtgagattagtaattttgatttaaatattgacaaaatgatatcataatgatatcatcaaaatatcaataaggataaggctgtcagcggtacaattatccgttacattttaaaacgtgcgcagaaatgaggatactagtgtaaaaataagatttttcatacgcaggatttgtgcttcgcaaaaacttaagatgcgcgaagaagcagcgcaagaatggaggattattatggaagaaaaagtgttgaaaaagaataagaatggtatggcaatgcttacgttgttcatcgctttatatgtagcggcaattgcagctatcgtgtcaggtgcaataatgacagaaacagcagaatccgccgaatcggttatttcaattatacttatagttatcggtgttgtttatgtgggcttaggatggatattctttcttggacttaaggtattaaagcctcaggaggcacttgtgttaacgctttttggtaagtatgtcggaactattaaggaggccggcttttattatgttaatccattctgtacagcagttaatccggcagcggaaacaaagcttaaccagagtggtgatgtagcagccaacaataaaaagattgatttgtcaggtatgtctggagtaacactttcagcaggtggtaatacacagatgacgaataagaagatatcacttaaggttatgactcttaataacagcagacagaagattaatgactgccttggtaatcctgttgagataggaattgcggttatgtgggaggtgacagatactgccaaagctgtatttaatgtagataactataaggaatatctttcacttcaatgtgatagtgcagtcagaaatatagtccgtatgtatccatatgatgtagctgagaatgtagatacaacgggagatggaatggcagatgagggaagtcttcgtggctcaagtgaagttgtagcagaaagaataaggaaagagattcagagtaaggtaacggatgccggattaaatataatagaagcaagaataacatatcttgcttatgcacctgagatagcagcagttatgcttcagcgccagcaggcatcagctattattgatgcaagaaagatgatagttgatggtgccgtaggtatggtagagatggcacttgacaggttatctgaaaagcaggttgttgaattggatgaagaacgaaaagcagctatggtttctaatctgttagttgttttatgtggaaataaggatgcccagccaatagttaattcaggaagcctgtattaatggcagattcaggaaaaaagcagattcccctccgtttatcaggtaagctctatgatgccattgcagcatgggcagaggatgattttaggtctgtcaatggtcaaatagaatatcttttgacggagtgtgtacgacagagaaagaaaaatggagcaccagtaccacatgaactagatgttccgccagaattggatattaaataaaatggtgtgaacatgccattttaggggagttttaaagtggtatttaagaagtattactacagatgcaagaaccagtataatgtgtataagagccgggcgaaggataaaaatagtataaattgacatttccccagagagaggagcatatacatgcattttgtcaaagcaaaaggaatactttcaaataataacggaataaatatttatcgtggatgtacccatggatgtatttattgtgacagcagaagtaaatgttatggatttacacacgattttgaagatatagaagtaaagacaaatgcacctgaacttttagaaaaatctttaagaagtaaacgaaaaaaatgtatgataggtacaggtgccatgtgtgatccttatcttcatgcagaagaacaattgcagattacacgtcgttgtttagaattaattgataaatatgaatatggagttgctattcagacaaaatcaacaagaatactccgtgatttagatgtattaaaaaatataaatgataagacaaaagcgattgttcaaatgacactgactacatatgatgaatctttatgtaaaatattagagccaaatgtttcatctacttatgaacgttttgaagcacttatgcaatttaaaaaagctggaatccctacaattgtatggctgacccctatattaccatttatcaatgatactgaggaaaatatcaagggtattctcgattattgtgtccaagcaggcgtaaaaggcatcatctgctttagcatgggtgttaccatgcgtgagggcgacagagaatatttttatcatgctttggacaaatactttccaggaatgaagaataagtatattcgtacctatggtaatgcatatgactgtctcagtcctaataatgacagactgttagatttttttagaaaatattctactcgatatggcattatgcataaaacagaagaatgttttaggtatatgtatacttttcctcaaaaatatgagcaaatgtcgtttgcggaatttttaaccaataattgagcatgcaacagaaagaatgctttatgttcacttgctgactttggtaactactataaatcacttattgaacagaattaagtacgttagtatttgaaaagctcgaacaatcggaatttacttctacttagacatacaaactgttgacagtaaaactcctatatagtattatttgataaaatactatataggagtttttgtataaaaatgaatggcggatttcttgttaccaaaataaaacaacttggagatcgaatctttgagaagattctcagcgaaaagaatattgatgcgtttaacggagcccaggggcgtattctttatgtactgtggcaggaagatggaatctcaatcaggtcactctcgattaaatgtggattagcgataacttctcttactacgatgctggaaagaatggaaaatcaagggctgataagacgcgttcagtctgaagcggacaaaaggaaaacactcctgtttctgactgaaaaagcacatgccttaaaggacgaatacgattctgtatctgataaaatgggcagtatttactacaaaggtttttcggagaaagaaattatccagtttgaggaatacctcgaccgtatcagaaagaatcttgaggagtggcagaaatcatgagtatttgtatcaaagatcagattcaaaacatgaatatcgtcatcggatgtacagtgggatgtgcatattgctatgcccgcaataatgtgaaacgctggcatatgattgatgactttgctgaccctgaattctttccgggtaagctcaagatgatggaaaagaaacgtccgcagaactttcttcttaccggcatgagcgatctttccggctggaagtcagaatggagagacgaggtatttgaaaaaa

SEQ ID NO: 364 - DNA, 4821 bp, Unknown
  gut microbiota DNA sequence
agtccataaatctgttccttttctatattaagtgaaacattatttaccgctttctgctttctaaaatatttacacaaattttgtgtctgcaacatcatttccatctttactatccttccttccatatttcatttcttactgaaatataatctatcagtgaaaaataaagatttgatgaagattgctaaataattcgtctactctatttttattctcgtatggaataaaccatcaattgaatatcattatcagaactcggctttccactgaaatcagcaaagctgttacaaatacgaagtcctaatttaccgaatatctccgtgatttcatccaaactatataaccttataggatttccttctttcatttcaggcttataaagtgcttctccatacatatagtctacctgcccatatatcagcgtttttctatctgaccaattttataacaaaccttggcatccttagccacttcttgaaattttgtcattcccatactgtacatttttgcaccatctgaatatcttacaaacttttttgcatcctcatatctatctttcttctttgattcattcattgctgtgctcctttcactttgacttcattacaaacagagattgcaatctttccgtcattcgcctgaatgttgttcagtgtcgtttcgaggaaaacgtcacctaccagaagtttaccatcatccgtaacatctttgaatgctaccggaaccacattcggctcaccatttgcacaggttgcaagatcccacattccttctttcagaagtttgactacattttcattcaacataagaaatacctcctaaatatgcctgttgattttgatatactcattttaggagaattgctcgtttgccacaagatattagcaaatttataagtcactattaaatttcatagtatttacgatgtatgaaataatcaatgcagtaattgtataaaatatataactatttctcttaaaaatgatatattgttttctactgttgtttcactcacgcctaatatgttatgaagttacgcagttgtaatatgaggattgtctctcatttcttcatagattttcacatacattttctcatatatgcttttctttcgatagataaacataatatcatgactgatatccattccttcaatatctataacggatagttctccttcctttacatgctcatcaacagcagcataatatccaaatgctatcccgaatccgtctttaactaaagaattgattgcacctatgtttccaatctcagtcacattagaaaaatgtgatatatcatagcccatatttttcagccatccttcaaatatattccggcttccggacccctgctcccttataataagacgctcatgaaacagttcattgactgacttgttcttatattttgctgcaatatcaggagttgcaactgctacaaatcgttcatttgaaaaaggcagataagaatattcatttcttggaaaatcgccctctacgatagcaaaatctattactgaatcatccagaagctttaaaagtgctgatgtgttattaaccagcattgataatctgcaatctggatgttttatcagaaaatgctcaatctgctttgtaagcatatattctgaaactgtccttgttgccccaaatgaataatgttcaactcccgtcttagtccgcagcattttacttttcagattaatctcattatgcctgaatgtctgtgccgcatcaagaagaagctctccagcttctgacaggcggatttttttcccctcctgtataaataattgaaccccatattccttttcaaggtatctgatgtgctgcgatacagctggctgtgtgatatgaagcgcatccgccgcatgtgtataattcatatactgacatactgcgagaaatgtattcatcctgaaatcctgcataataatctccattcttacgcttgtcataaactaactaccctatatcataacatattattatcattaaataaatatatataattttttattataattgtattctgctatacttctggatgttaacagttacacccattattaccaaaacaaaagaagggattttatcatgaagaaaatcgaagaagtattaaaaggtctattattatgtctcgctattgcaattccaagtgagctgttaggaacactatttcccgttgtaggaggtgctgtttttgctatcattgccggtatgattgtaacgcttataattcctgacaaaacagcatttcagccaggaattgcatttgtatcaaaaaaaattcttcagcttgctgttatattcttaggttttgggcttaacctatccgtcatcgttgaaaccggcagacaatctctgccaataattatatcaacaataacaatatctctgattattgcatggctgattcataaaattatgcatgttcctgctaacatatctacacttataggcatcggctcgtctatctgtggcggttctgcaattgctgctgccgcgcctgttattgatgcagatgatgatgaagttgcacaggcaatttctgttatattcttttacaatatgcttgccgcattaatatttccacagctaggacatttgataggatttcctacaaatagcggtgaattattcggtatttttgccggaactgctgtaaatgatacatcatcagttacagcaactgcctcaacctgggactctatgtggaatctgggctcaatgacacttgataaggcagttacagtaaaacttacccgtactctcgctattattccaattacacttgtactgtcgctgattcgtatgcgaaaatccaataaagctgacaatacatttcaatttaagaaaatatttccaatgtttatcgtgtattttattctcgcatccattataacaacaatagcatcatctctgggtgctccagcagatatgttcacgccaatgaaaagacttagcaaattcatgattgtcctagcaatgagtgctattggtcttaacacaaatgtgataaaactgataaaaacaggtgcaaaaccactgcttttaggattgtgctgctggattagcattactgtaatgtctcttatctggctgtatccgaaattttaattcattgtcaaaaagctgtagattgaccaccattccggcagctatgctctctggggtgcatctttgttgcttctaattttgctttttctactgctttattctcatacatatgcttatctgctttatcaaacaaagtcttaattgtacaatcagcataatcttctgaaaaagcatatccgtatgcataacttacttccaccttatgtatgttttcattgaaatgtttaacctcatcatgcacttcatccatgatattaaggatttctttctttgtcgtctgtgtaataattgcaataaactcatcaccgccataccttccaacaaaatcttttgctggaatggcatttctcaataatcttgcaaaatttgttataagctggtctcctaccgcatgtccatatgtgtcatttgcacgctttagattatttaagtcaaacattacaaatcccataggttctgtaatatactcgtagttatgaagcgtttcctcgcatttactcttattaggtagtcctgtctgtaaatccacatatgcttttttctccaaaacttgatttttattctttattcttatatcagctattgtttgttttatgattaacaaaaccaacaggatgatatctatgactgaaagtatttcaacaaccctaataatatctgctactctttcagaataaatctcagcagatgaaaccgtttcatctgccaacttaaaatatgtttcgctcatagcaataacatcagtatcctcatatccgttttctcttacagatataatctcagtttttaacttttcccaatattctatttgctcatcgagattattctgatatgttgtatccgggaggctcacaagactgtataccccatcaccatacttaagtccatccagaatatcatccagatatgcaatcagttcatcatcagcagttccagtgacctccaattttgtaatgttaaaagagatattaagttattatttgtgcgaaccgaatatcccttttatgaattttcaatctttaacatcagccttttgtaatctgcccgtccacatacaaaatatggttaatgagccaattcgtcagatactctaatatatcctctatctgcttattttggtctaccacctcttcgttgtgactctccataaactcatccaatttattgataaattcctgatgctgtatcttttgtgtaaagagcttcttataatgaatacattccgggcagatacccttaaaaaaaatgtcgtggcttatatacttcattccatgtgtatctcttattctcttctccagctctgatataacatccatatcaacatcaaatatctctccacactttacgcattccacatggtagtgattttcaagcgtaaaatcaaagcggtctgatccatccggaacttctacttttctaaccttgccttcttttacaagaatgcccagatttctatatacagtccctcttccgatagatggatatttttcttttacaaatgtatatatctggtctgctgttacgtgacgatgcatttcatttactgcatcaagtaccatatctctttgaattgtgtttctaattgttttcagcctcctcttaataggatttattcttatttaggatatatatattgctatgttcattctgtcaagcgtatatatatatatatatatatatatatatatatatatgcgct

SEQ ID NO: 365 - DNA, 16214 bp, Unknown
  gut microbiota DNA sequence
tttatatggaaagacttagaaatatccaatcaaagcttctggcattgaacatagtgtgcaggactgcctgtagcttatatttgtcgtccgttcgtcaccagctaatatccaattaaacaataatattttagaaatgccccccagagcttcctgagttgccacctccgcctccactgctgccacctgaacttccagaactcgtctgtatgcgtcttgtcgtcacggttgtgtttatgaatatgtcccttctgtccatcacgtcaaagttatgattttttgtatactctgtgcttgaaactgtcatctttgccttggcactgctcatcatggcaagcacacctataactgctataactgctgatattcccagttttaccggcatattgtatgtaagcttctctactagtgacgtattaagtttcttttcaattcctttgatatacttgacacagccctcataatagtctcctgatgcaagttcattttccgctttttcccttatactatccagccggctttgcgatatatcactccttgctcttccagatgtaactatacggtctgctcttgatttcatatctattccgtatacaacagcctcacaatcacttcctgttgcataatagccataatttttttcaaggattgaccttaaatatgtatccattgcatagccatcaagattcctgctcattgttatgatcactatatcaagcttacatttatcagatgctgccttacataattctgccaggtgcttttcttctgatgtgctcaatatttctgcatcatctataacataggtcttagatgtacctgaaaccgaactactgctttcagctgtttcagactggctgcttacttctgattcaactgctttctccgatgctgcatacacatattgacctgttgcagcaaacataataaatattgctattgacaatactgccatgactctcttgcatactcttctgcatatttctttattagcagctatcttatcagaacttattcttttatatctgactatattcatcatataaacaacagacctcctatcatagtaataataagaacaacaacgaatattatcacaccatatgcagccacctttactgcacttataggtctgtctgctactatctttcctgtctgtccattaaggtaaaaatggaactctttatttttaaacctgaaattaagcatccatactggaagaagtgcatattcattatttttaagtctcatgcttacattatttccaataactgatacacttgtatatccctgtatagttcctctggctatatcagttatataatcatccgctctttctttaaccctggactctatttcatcagatgtataattgtatctttctgaaagatatcctgaaagataaggcatcgcaaagccctctatatcactataatcatatggttcaagcatatccatctgtctatctggcatcttttcagaagcatcagctggaattctgtcaaactctgcatgtacatccctgtatacgtcaaaatgatccgtatatgtatactctgtatctcctctccttgttgttcttactttgttggcatgtgcattcatctgtgttctggcattatagctatataaccagaatgggacataaacaccgcttatcttttctattgtgcttgaggtagataattcttttggtgtcaacggaccttttttcagccactttctgtatatatcaacagcctgctccttattaattttaaatggtattataagctgtggcttgaattctccctgcaatctgtcctcaaccaatgttggattcccacaatatgaacaaaatgttgccgatgtatattcatctgcgactaactgggcaccacagctctggcaattataaatcttcatattaggaactttttctctctgttcccctgaagcagcgctatctttttcatatgtttctacatctatctgtgtaccacatcgtttacagccaagcttttgtgtatcactgtcaaattccatcgctgcaccacaattaggacacttatatataactggcataatccccctccttaatcattgtttgttatatatctacagcattttgcttaaatcatcaaataaacataactgtaatgttaatatgttaagatacctggatcaaaaggtctaaaaccatatgagcctgttcataaaatgttcatactacattaaataagatttaacattatgaacattatttcttcacttttagtcaatatacttcaaatatagacaaaaacgaatgaaacacttcaaatagttgacattcttttgttttgtaaaatcacttatttacatttatttgttcttcataaatttgagttgttttaaataataaattgcaactctcctccctctttcaaagcctctccttatacttaaggagaggtttttgttgaatctgttcaatcatgtaatgtatgattactatctgccatataggctataagacagctaaactctaaaagcaaatacattttaatgtcagattacaaagaatgatattataagaaacattaatccggcagccatcattattattcccgcattcttatttttttggttagtagctttatctatattaacgctgtctctctggtcataaaaaagattaaaattcttctttgctgtaagatatttactaaatcccataaatatgacaacgaagcctataagaaaaagcatgaatccaacaaatggaagatatgaatcaccactatttccttcaatattgtaaaaatcaacatctgctgctatatagccaagtactccaagaatatatcccatatgctattctcctttcaatccacaaaaatattttttgttgtgtcgtatatcatctgacactatccacccaacacgtctatcatatatactgatatatctattatgactggattttattttctaaattatacttcttttcagcattaatcacaaccaaaatatatctttatatatatataaatcgacattgtatttcaataagactatttttctaactatttccttttctttttagtatatttaatgtataatgaacaaaagagtgggacggtaaaaactgtactcataattaattatcaggaggtttatatttatgttagtttcagcaaaagaaatgttagaaaaagcaagagatggtaaatatgctgttggacagtttaatatcaataatcttgaatggacaaagtctatccttcttacagcacaggagatgaattcacctgttatacttggtgtttcatgtggtgctggtaaatatatgactggttttaagactgttgcaagcatggtaagcgcaatgatagatgatcttaagattacagttcctgtagcacttcatcttgatcatggaacatatgaagcttgctttgactgtattgatgccggtttctcatctatcatgtttgacggttcacattatcctattgatgagaatattgaaaagactaaagaattagtagctatctgcaaagaaaaaggattatcacttgaagctgaggtaggttctatcggtggcgaagaggatggtgtaatcggtatgggagaatgtgccgatcctgatgaatgtaaagcaatcgcagatcttggtgtaactatgcttgctgctggtatcggtaatatccatggtaagtacccagctaactggccaggattaagctttgaaactcttgcggctgttaaagaaaaagtcggtgacatgcctttagtattacatggtggtacaggtattccagaggatatgatcaagaaagctatctctttaggcgttgccaagatcaatgttaacactgaatgtcagcttgctttcgctgatgctacaagaaaatacattgaggctggtaaggatcttgaaggaaaaggttttgatccaagaaaacttcttgctcctggatgtgaagctataaaggaaactgtccgtgaaaagataaatcttttcggctcagctggaaaggcttgatttcatgaataccagttataataatgataataaatcagacaatttaaataatagcaccgaaaatgaggattttatcgatggctgttctgatagtgataaagacagcatattaaacgatgattatgatattgattcgcctgattacgatgctgacgatgattatacagataaagatgatatagatgaagatgatgctgatgctgtgtttgacagacaggaaaaagcaaagaaaagatctaatattgtacgctatattgtacttgttatatctgctgccgtatttatttttgcagcatacaatcttatcaatatattcctagcttatcacaaagcggacgttatatatgataatataaaccaggatgttctagatgaagattcacataccaaggttactataggtgaagatgagcagcctgttgaaattccatttacatataatcatcaagcattgcttaatatcaattcacagggtattggttatatgtatataccttccattgactgcaggcttcctatggttcagggtgatgataatgattattatcttacgcacacgtttaacaaggaatatagtgctaatggatgtctctttgaggattatagaatcaatggcgggctatcagccagtcatgtaatcatctacggacataatatgagaaatggtgccatgttcggaaagcttaaaagctatcagaattattctttctggaactctgccggtaacaatgttttttacatatatactggcaatgttattaaagaatacaaaatttttagctgttatataagtgaagctataagtgacacctatacatttaacttccctactctcgcatcaatgagagattacgcagctaatatgaaagccaaatctatgtacgatacaggcgttgatgtttccaatgcttcacaggttataacactctcaacctgtaccaacgatggagaacagagatttattgtacatggaatgtatattggagaagcctcattagaatagaaatagtacaataatcattacattaataattattctttattttttaaaatatttttgcaaaaagaacttgcattattatcagtaatgagttattttatttacagacaacgattagatagttgtcactaatcaaataaggtagaacaaaggcgttcatgttatacatattaatatgtgtgtatatgtggatgccttttttagttttactaatagaataataatctatgaaaaggaaggatgaaaaagttatgagcgaaaaattcaatgtagctgacatcttcggcgaaaatgtgttcaatgacgcagttatgaaagaacgtttaccaaaaaacgtttacaaaaatcttaaattagcaattgcaggtgttcaggaattaaatattactgatgcagatgttgtcgctaatgcaatgaagaattgggctatcgaaaaaggcgcaactcattacacacactggttccagcctttgacaggaactactgctgaaaagcatgattcatttatttcagcacctaatgaaaacggaaaggttcttatggaattctctggtaaagaattaataaagggcgagccagatgcttcatcattcccttcaggtggtcttcgtgctacattcgaggcaagaggatatacagcatgggattgcacatcaccagccttcgttcgtgaaggtgcacagggtgcaacactttgtatccctactgctttctgttcttatacaggagaagctcttgatcagaagacacctcttcttcgttcaatggatgctgttaacgagcaggctttaagaatattaaaattatttggtaacacaacatctaagaaggttactccttctgttggtgctgaacaggagtactttatagtagatagagaaaaatatcttcagagaaaggatcttatcttctctggacgtacattattcggtgctatgccaccaaagggacaggaacttgatgatcactacttcggttctatccgtgaaagaattgctgcatttatgaaggatatcaacgaagaattatggaagctcggcgtatctgccaagactcagcataatgaagttgctccagcacagcatgaattagctcctatatatgcacagtgcaatattgctaccgataacaaccagcttatgatggaggttatgaagaaagttgcttacagacatggtcttgtatgccttctccatgagaagccatttgccggagttaatggttctggtaagcacaataactggtcaatcacaactgatgatggtatcaaccttctcgaacctggcaagacacctcacgaaaatatccagttcttacttgtactcggtgctgttatgaaggctgttgataaacacgctgatcttttaagagaatctgcttctgacgttggtaatgaccacagacttggcgctaatgaggcacctccagctattatctctatgttccttggtgagcagcttgaggatgttgttatgcagcttattgataagggtgatgctacaagctctatccagaagggtaagttaaagacaggtgcttctacacttcctgaccttaacaaggatgctactgatagaaacagaacttcaccatttgcatttactggtaataagtttgaattccgtatggtaggttcatcagattcaattgctcctgctaacgtagttcttaacacaatcgttgcagaaagctttaaggaaatcgctgaccagcttgatggagtagaaaacttcgatatggctgttcatgatcttatcaagaaactctttactgaccatcatagaatcgtatttaatggtaatggttactcagatgcatgggtagaagaagctgaaagaagaggtcttccaaatatcaaatctatggttgaggctattcctgcccttactactcctaaggccgttaagctttttgaaagctttggtgtatttacagaggctgaattaaagtcaagagctgagattaagtatgaagcctatgcaaaggctataaacatcgaagctaagacaatgattgatatggctggaaagcagattattccttcagttatttcttacacaacagagcttgctaattcagttcttactgttaaggaagctggtgctgatgcttcagttcaggaagaacttcttacagaagtatctggatacttaaaggatatgaagaaggcttacaagaacctcattgatgttacagctattgcttctacaattgatgatattgttgcacaggctacatatttcagagatgaagttaagactactatggatgagttaagagctcctgctgataagcttgaaatgatcgtagataaagaattctggccattcccaagctatggagatcttcttttcgaagtataaataatatgatgtcggagtcagaggattcaggcatcaccgacttatatagctgtcttttctttaaatacaataataaatttaacgaaaaacatacaaaagtggcttgagtacaaaacactcaagccactttttacaactattgtttattatgaagatacgtgaactatttcaccatctgattgccatacaatcattattgtggataattaagtctctcaggaaccggattatcaagcacctcttccttgaacttcttcatatataacttggcaagtgtaaggttattatcaagatagttaccacaatctcttggtgaataacctggaatctcgccttcataagaaagtacatattctgcaccttctctaagcacctcaagtatatcctctgacttaaggtcacctgcaaatatcacataaaaccctgtacggcatcccataggtccaaaatatatagttttatctgcccattctttattatttcttaaaaatgtagccataaggtgttctattgaatgtatgcctgctgtatccataggtgcctctacattcggtcttgtaaatcttaaatcaaacgttgtaagcacaacatctccctgataatcttttcttgatacatatacacctgctaaaagatcgagatgattaactgtaaaacttgctattttattcataattgttttaatacttcctttccatatataatcattaaacaatgcagctatccaaaatataaaaatatattttatttatcagcttcctattattttattaagcgaaatatttattcctttatatacaccattcttctgttttcgcttgtcactcttataacaagacattttattcccattataaattttgtcaatgtagaatagccatattctcttaccttaaagtccggataattgatatgtatcttctgtccaagtgctccaagctcaactccattatcacttgacttaacataattaacagcatattctgtaaccttttccttcatattcttatcttctttaagccgtacaagaactgtgttgttaaacttcttaagctcaaggctgttcatctcttcaagaaatgtagacaatgaactgtaaccgtagtttctcacatcaaaatcagaatatttcttctgaagtctgcttcctatctctccaagcccggtctgcttacccttattatcattttcctgaattatctctataatagcattttctatctttgactgctttataatattattacttgcttttttcttaacatgcttactatccggctcatcttcatgcgcctgttctcttaaaagttcaagatctgtaaacactgaacatgctgccctgaacgaacgtggtgttttattctctcccatacctataacatccattcctgattctctaaggcggcttgcaagtcttgtaaaatcaccatccgaagaaactatacaaaaaccatctacattattcgtataaagaatatccatggcatctattataagtgtagaatctgttgcattttttccaactgtattgcggaactgctggataggtgttatggaattctccatcagttccttcttccatttgttagcctgcgtacttgtccagtctccatatattctcttatatgttataacgccatatttagtcatctcatccaatatatctgatatatactttgacgaaatattatctgaatctataagcactgcgtatcttttatcatccaattattttcacctctttcttctttttcctcttttcccttttttattttttgaataaatcagacattacacttacatctgatgtcttactactttatattcatcattgctctgatagtacggacattctctgtattctgatgttaacaatctggcatagtcatcctcatccatatctacatcgcatacatattcttccatttcttcatcatataccatattattacaataatcacagttataacgtgctactgccatatttatcttcctctcctgtcattgtatttaacagcttattttaatttattctattcatcagctgcggcctgcttattattctcataagtatccagaaagctgtgtttttctccgtgctgcttatatgcaataacggtatccagattaacattttcaacacttctgaatatatttttctctatatatggacttaccttcgttaaatccctgataagctgttttatctcagccctcttagaaccctttccagttccaccacatgaggcgcagccttctgtaaaacggcatgcgcattgtataaactgaagcttattatagtccttccagtgaataatatctgcctcccttataagatacataggtcttataagctccattccctcaaagttcgtgctatgaagctttggcatcatagtctgtatctgtgctccatataacattcccataaggatagtttctataacatcatcataatgatgcccaagtgctattttattgcatccaagctcttttgctttgctgtaaagatatcctctacgcattcttgcacataaataacatggagattcagttatatcaactaccgtatcaaatatctctgttttaaacactgttacaggtatgtctaaaagctttgcattgtttagtataacattataattaagttcattataacctggattcataacaagaaaaacaaggtcaaagttattctttccatgtcttttaagttcctgaaagagcttcgccataagcatagaatccttaccacctgatatacagactgctatcttatctccatcctgtataagatcatattcgttaagcgcctgtgtgaactttctccatataggctttctgaacttctttactatgcttctttctatctctttaacacggtcttttgcttcattggtgttttcattctcatcctcttttatatattctgtgaacttccacttaagatatgccacaaatccaccatctatgctgtatgcctcataccccatctgttcaagtgtatcttcaagttcttcacttttctgtcctgaataacataacagatatataggaactttctttgagtatgtgttaagaaacttctctcttccacttatattatccatcttgaggtcattcatcatatcttcccagaaatactggacagctgaatccatagtttccttatcatattcttctttatctcttatatcaataataactttatctcttttatcatcataaagctgttgtactgttctcattgtagtttatagtccccatttcttatagtacatcgtcattttgcgttttatatcatattaacatatttcttgcaccgattctatatttttaatgttattgtacctatattattacacctgcattacatctttttcatacatttataatgtttcaaatgcatcacaaaatataaaaacctctggtcagaccttgatataatccagatctgaccagagggcagctttatctttacctgataaattcataatatttattataagcaggtcttttctacctgcttattttacaatatacttctaacggcacatcccatctgctttaccttgtccttctgctccttactgaagtccacccatatgcgctgcatggcataatatcttctgtcatacatattaagatacatggaaggcctgcagttatataagttatacatgcggacaagtgcctcagcatctggatattcctgctccttttcatatttacgatattttttccttggcagacaaagtttttcggacatagtatcctgcgaataatgcaaaactgttcttacatattccaacattgaaaatccatcccactgctttaacatataatcaagcagtacatcatcatcggttacattttttcctcttaatatatcattattacggtaatgcattatactttcagcaataattttcatagcaaaaggcttactgctatcatcatattcattcataataatatcaagatcttccgtatgcacatcattcttacttccacacaccagctcatctatgtctgcacccagctcctgcaatgcttttatatttttaaaagatataataatatgcccattttcacgctttgaataatcatcctgggatataccaagcctcttccccatttcagtctgattaaaaccaagcttttttctataatttttcattcttttacataaatcttcataatgcatgctgtccatttactttatcctcatagtaaattacagtccacataactgcagactttaattccatttttttccaacatttcttatgaagattttattatattaccaaatgtcccaaataggtcaataattgcataactctatctgtttcagactttttttattattgatatcagttattttctctaattctctaattttctaatttgatataaatttaactagcaaatttgacgatataattatataataaaaaagaacttaatttattttatctactgatatattttgatgatattatgagcgcaggtattctaatgcctgcatcatattattttacaataaataatacaactggaggtgttgttttatgaaaatacaagatttttgtgatatgaataagttcgaacagattatgtctaactgggctaaaagtacaggactcgctacagtagctgtcggatctgatggtaaatatataagcgactgctataacttcactgagttctgtatagacttgacgagaggttgtccagaaggcaaaaagcgatgtgaaaagtgtgaccgtgaaggacatggtgtatatccttgccatgccggacttgttgattttggtattcctataacactggatgatggtacagtacttggaagcataataggcggccaggttctccctgaacatcctgatgaaaataagttccgtgctactgcaagagagcttggaattgatgaagataaatatatagctgcactccaaaaggttaatgtaaagacgagtgaagaaatccacgcatctgctgaccttcttggtgatgttatcaatatgtttgtgcgtgcaagctatacttcataccagaattcacatattctttctgaattaaagaccggcataagcaatgctgccgaacagctgcagactgccaatgataaagtaaaacagattgatggttttagtaaacgtcagaatatactcgctcttaacgcatctattgaagctgcaagagctggcgataccggaagaggtttcgctgttgttgctgttgaagtccagaagcttgcaagaggtatgggcgaagcaagcgatgatatcaaaaaagctattaacgaagtcacacagactattacctctctggataaagaataaaaaatatagtgatgtcaacttacgttgacatcactatattttttatctgtcagtactctcaacttcgcctgtgaatcctgcctgttctatcatcttaattgtatcatctattccctgtccacctgctgtaaggtatcctgatgcgaatattgaatcaaccaccttaaacaatgtcggttctatacccttaaagtatacctctcttcctgctgcacatcttatatctgacttaggtaccataagtcttgcaagacatagaactttcagacagtactcctgagtaagtccagatatatccctgtctgcaagtcttgttccctttatagggagaagaaaattaataggaactgattctggattaatttctctgatatccataagcatgtccacaacatcactcttactttcacccatgcctattattccaccacaacacatttcaaagccaatattttttaacatatgtatgtttttaatcctttgatcatatgtatgtgttgtacatatattaggataaaatgaacggctgctgttaagattgtggttaattctgttaagtccggcttctttaagcatccttgcctgtttttctgtaagaaaacctatagaacaacatatctgggtatcattcttcttcattttacggattctttgtgcaagatcttctatttcagcatctgtaaaactgattccacttagtcctatgcaatgtcttgcaagatgtttttcatctactagatcattatcaccataaagcttctcatctgatactcttctatacttttctatatccgcatgtgattcacatgactgcgcacaataggcacaattctgtgaacaattaccacttcttacattggttaaaagctgtatgcttactttctttcctttgtactttaacctcaatccatatgccgtgcttataagcttatcaagcttatcatccggcagattaagtatatcaagagcctcttccttcgttaatatatgctcttcgttccaattatccaacatttgttcaatagctgtttctgacataatacatatactctcccttgttgtcataaaatacgcttatatcaagcgcttatatgctaataagtataaaagtatgaaagcttattgtcaactgcttggtattgcaagttgacattttatactgtaatctgatacgaatatgacatctttggttctttcttctttgctgaaagatatgtaataatgtcctttcttgttataatacctatgaatatgcctctatcatctgtaactggaacaaagttctggttggtaattttctcgaaaagttcctccatagatgtgtctactttaacactaggataatttcttctgaaatacaactcatcgactttctttttctcaagttcctttacatctatactcaatccattattctggttaatcctgcatatatgccataaaaaatcgccttctgttatagttcctacataacgttcttcctcatcaagcacaggtatcgctgaataaccataataattcatcttctgcagtccctgcctcaatgtatcattattatatatatatgctaccttacacttaggttgtaaaaaaaatgaaatgttcatatacatcctccacttaactctttttccaatactgcaacgtgcaaacaattatatgcatattttctaacacattttagtgtaaacattgtatcatgttaacaagaatattcatatgctatatgtgcacatttcatatatttttaattatttttatatcagtctcttcaatctgcagttttcaattccttcatcccagaaatgtgcatatgttttatttcttatctgacatataatacttgagttcatcgcaccatgtccaactataagtatatctcttccttttgcaagctctggctgaatcacttcatctaggaactgtcctgttctttcaaacaactcatcaagactttcagctcccttatctgctatatatctgtctggatttctaaataacacatttacattacaatctgaaatattgaaactattctgtactccctcatattcaccaaaccccatttccataagtctgtcatctatgacaacaggaacctgcgtttttctgccagagagtactatcctggctgtctgttctgctcttttaagtggtgagcaatagcatatatccaaatgtatatctctatattcttctgctgctttttttgccatagctattccattttcattaagtggtatatctgttcttccctgcagcttatgctgttcattccagtctgttttcccatgtctcattatatataacattctgtttattccttttcttactttcattatttatttctattgtgttttcagctgtctatatgcacatttaaaatcgtcttttcctgcaccctgtaacagacaaagcttcaacaaaatctaaaatctaaaatctaaaatctaaaatctaaaatctaaagcttattataacacaaaataaataataaagcagaattctaagataactaacaaaacatccggtcaggtcctatcaagtgacctggcaggatgtctattttatataatatcaggaaaaaagtcttgttattttgtactaaatcaatcccataagctttggtactccaagtgacagctctggaataaatgtaataagcataagtaatataattaaaccaataaaataaggtacaagcttaggtgttactttctcgattgatacattttcaataccacagcctacgaacatgacatatcacttgatgttcttgcagatatgtttcatataagtacttactatctttgtcgtgaatttaagaaaaatactaaccgtactgttgttgactatataaaacacacgcgcataatgaacgcagaacgtttattcaaggaaactgataaaaatgtcaccgaggttgcaacactgaccggattttccaacctcacacacttcaaccgcgtttttaaagaaatagccggagtaaatccttcgcagtataagaaattacatgcaaagaattaattactcctgattaaaaagcctgtcatatgactgttcgaaatcatctagtaatttatttattttttcccggtcatataaaccttgtaccttccaaaatgtaagtatgctgttgaattcctcttcccttttatctataaatcccatacacaaatgtccattatacattgcactatccgtttcctggcaggcaaagcagccggtatcttcattcagtcttgaacaatctccacaggtaagctcctttttttcagaaatataatggcagctatcttcaacatttacaacaaaccattcgccttgcagatatgaacatattgcagttcctgtttcctctgtattggatacattagttttatatttacaattattgcacttcaattcatccaccctttgcttcctcctcgtaaataaatattccatcaaaaattctataaaacagtataaacatggatttatctcatgta

SEQ ID NO: 366 - DNA, 1874 bp, Unknown
  gut microbiota DNA sequence
attttatttttttcattaaatattattgcttttatgacatataatttataaaattatgctatgtcaattataacttggttaaaccactcaagaatggagattactatgcctcttccacttaaacccggagaaaatatttatatagaccacaaaataaaagaagcaagctacgcaatgccagcaatgcaggctgcacatgaccactacaccatcggttatatggtatcaggtgatcgaagatggattgcaactgataacatacgtgtatgccacgctggcgattttgggattgctaagcctgaggtttatcacaggaactgtcctatatcggatgttccttatgacagatatgtaataaaagttcgtacagaagtatttgaacctattattaaaataatcggacatactcaattagatattctttgtcgcaattatctacattttgccaaagcttcacaggatgaaatacaaaaaatgtgtgatgaaatgttatacgaatacgaacggaattctgaccactcacaactgcttcttcagggaatgttttataaactattcttctatgtatatgagcatcacatttcaagtgactcagataacaatactttatatctgaaaagattcgatgacagaattcagaaggctatgatatatgctgaaaataatcttgaatatggtgccagcctgcagaatgtggcagactttgcctgtctttctccatcacatttttcaagacttttcaaagctgtaactggttcatcatatactgaatatataacagcggttcgattacaacacgcaaagattcttttagaaatcggggaaatatctataagtgcggttgcaaacaaagtcggcatatctaatgcaagctaccttagtgcactgcttaagaagcattatggtatcacaccgacacagataaaaagaaatgcatatagaaacgattgcacaaaatataataacagaattaaaaatagctgatatcttataaatgtaactatccacatcgtccaatctgtaacctgactttgtaaaccatcacatcttatataagataccagccattttcaattaattttcagttataattattgagcataattattcatttataacacttctataattatagtaattttctttaaattaaattatttcttctatattataatgtattaatcagaagttaaaatctatcactttccaatacatctacattataacacatcaacctgcttaagcggccttctctgagttcttctcactctttgcatagctcttagctgagttaactacaatgataagaccaagtacgataagaagaattgctattataagctgaagtccatttgctatgaacaccttaccccatgtagtagtacctgctgggattgtaacagatgctgcgttctggatagccttaaccatagctataagtctctgtacaagtgctgtaaatgttacacaaagcataatgataagaggtgggaagagcatcttgttgctgcgtcctgtaacctttaagaatacgcagagtgttataagaacaagtgcacttaataactggttagctgaaccgaataatggccagatgttagcatatccaatctttgtaagtacgaaaccacaaagaagtgttacgattgttgagaaatatgtattgcaaagtaactttctccagccttctgcgtgttccatatcatctacgctgaaaagctcctggaaactcatacgtccgatacgtgcaactgcatcaagtgatgtaagggcaagtgctgaaacacacattgtcataaatactgttgcgaaatgtactggaacaccaaacatttcaaagaaaccagctacaccacggctgaatatctggaatg

SEQ ID NO: 367 - DNA, 210 bp, Unknown
  gut microbiota DNA sequence
ttacacctcctctgctcggatatgaccaagacgaaaatggagatcttgtaatcaatccacatgaagctaaaattgtgcagcttattttttatatgtatcttaatggaagtagtactcaacaaattgctgattctttgacagaactcggttgtaaaacaaaaaagaataatgatgtctggtcatccagtaccatactacaaatccttcaaa

SEQ ID NO: 368 - DNA, 947 bp, Unknown
  gut microbiota DNA sequence
ttctggcgcttgagactgagtatagtaattattaccgaagctattcatccagtcggcaggataagctaacacactcttagaatcagatattgtatcaggcgtgttgttattgggggcggatacttcgttggtacttgtcgggattcgtatttctgtatcgtccatgttgaaaataaggacattttcattgtctttttggtgggcaactcctaatattctatatttgcattttttgtcccacttaaatatctcgtataatgttggcaaaaatgcagcaccggaaattggttttggaataagttgaccatctttgagacgtgaccactgcactttattttttgtttcagaggaacatggtcgaatagcaagtagttttgagctcgggtgtattagcatttcgacaaattttatgtttggaaatttccgtatagcatctttgttaaaagagatctgtttatatgaaaaagaaacagaaatccgaccaaccgaggagaaaaattgtcctctagcaacttcatagtctcttaaatcgaaggaaccggcggaagcagtaattgtatcaggtgcattcatatttgccggtttaaggacgctttgagatgcttcaaagtagtctctggatttaaatccagaccatcttggattaatgcttataaatccacttagagagccttcttgtatcacatgtaattctggtaaaatctctttatttccatatttcgcatttgtaattaatttttgaacagctatgaaatcatctcgggagataatagcttcatgatgtccgacttttctgtattgattacggtcttgattgtttttccttgatttatggtcaagataattcggagtccatgtttttctcgccagaacatccccacaatggcgttcattttgaaggatttgtagtatggtactggatgaccagacatcattattcttttttg

SEQ ID NO: 369 - DNA, 181355 bp, Unknown
  gut microbiota DNA sequence
agtaacttatttaataagtttactgtggctcttgtggctctcttaaaagcatccgccctaatataccgatataatagatatcggggttaaaagctcacgactatgatatatcccatctcataagtcctataaccttacctaatatcatacagtcatcaacaataataggatccataaaatcattctctggctgtaaccttatatgtccgttctccttatagaatctttttacagttgcagaatcatcaagaagagcaacaataatttcaccattttctgctgtattacacttttcaacaactatctggtcaccattataaatacctatattgatcatactgtcaccttttactgtcaatataaaagtttcttcattaggcatgaattctgatgggatagggaagtaaccagtaatattatcaactgctaatataggctccccggcagctacctgtcctaatactggaacgttaaccatctcacgtcttgtaagattaaaattatcatctattatttctatagttctgggttttgtcggatctcttctgatatatccattcttctctaatgactccagatgtgcatgtacagatgaagtagatttaagattaacagcagagcatatatctcttactgaaggtggataacctttattaagaatctgtgatttaatatattcaagaatttcagactgtttctgtgtaattcgtccatacgccatattatatacctccatttaattatatctgctttgcagccgcttccttttcttttgcgcttattatattttataataacatattttatttaatatgcaaacatgttttctgaaaaaacgttctgaaaatatgttcgattgctcattgacaaacatatgttcttataatataattcaatcatcaggaacaagtgttctgttttttattgaataagctttaaagcatattactattaacagaatttaattagcagaattatatacaaaggaggtctttatattatgaagcatatattaaaaaagagacatctgttacacaggatattacttattaatgcaatattactaattataatattaggaacaattatggttaatgcctctgatacaaaacagcctgataaatattatacaagtgttatgattgaacagcatgatacattatggtcacttgaatcacaatataataatggaacagaagaccgtgatacgtacattaacaacattaagcaattaaaccatatgagcaatgatactattattgatggaagttatatattgttatattattactaattagacttttcatacctaatctgataaaatataatataataggttaatcaaaaggttctcatatatcttatataatgtacctgttatataaaatcctaagattaacttattaataataattataattggagatgttatatgttatttaaagatttagagaatattaattcgaatatagcagctgaactatcaaagcataatatcaatgagatgactgatgtacaggctaagacatacaagcatatctataataataaagatttaatagtatgctctggcaccggtactggtaaaacactggcatatctgtgtcctattatatcaagactttcagatacaactaaaaatatccaggctattatattagttcctaacggtgaacttgcttcgcagatcaataagcagcttgaagatattttttcatatgataactgtccttattcatctatgtttgtaaccggcgaagggaatatcaacagacagcttgaagcactaaaacataaaccagctatattagtcggaactcctgcaagagtataccagctaattaacattaaaaagcttaaagtacatgaagttaagactattgtactagatgaagcagataaattattaggtaaaacatatattgaacatgtatattctataagaaagagtcttatgaaatacacacaggttcttttattctctgcaagtatagataaaaaaacacgtaaagaagctaattcgcttacatataaagcaatagatattaatattaatgccattaagaattcagagagtattattccttcttctataaaacataattatgtgatcacagatagaagagaacgtatagaaacccttagaaagcttgtaaaggctgttaaacctgtaaagtgtattatattcataaatactaaatacgaccttgaggaagccttacagaagcttcagtaccataattataatgtaggatgtatttcaggcaatcaggatgccatgagcaaacgaaatactcttaataattttaaatctggtaagcttcagcttcttttagcaaccgatatagctgcaagaggcttacaaattgataatattgatgttgttattaatgtaaacttacctgaagaaccaaaagaatatatacatcgtgctggacgttgtggacgtaatggcaataaaggtctcgtattatctatcatcacagaaaatgaacttaataaaattaaaaagtaccagaaagattttcatattaatatgctgcagaaaaaattatatcagggacgtcttgttgctaaataaataatatagaagatgagtataatatataaatataacgccgataaatctcaatttatcggcgttatataattattttatttattattctttacctgttcaaacttttcaataacttctttagacggaccacctgttgctaagctcacaataactataacaagcatagcaattataaaagctggtaaaagctcatatattccaaatattcctccaagttttgatattccatatttccatacaaatatcataatacctccagtaatcataccggacataattccatacttattagcttttttccagaataaggcacataaaacaactggtccaaatgtagctccaaaaccagcccatgcaaatgatacaatctcaaatacagaactgtctggatttgatgctaatataattgatataactgatattataacaactgtaattcttgcaactaacatagatttttcttttgatatcttaataccaaatacttctgtgactatattctgagaaatacttgaagatgctgcaagcagctgtgaatcggctgttgacattgttgcagcaagtataccagcaagaataacacctgcaatgacagcaaccaatgcaccatgcgttgaaagtaaatgtgctatttttacaattattgtttctgaattgcttcctacaagtgtttctatagcacctgctttagtcatgctaagtccaactatacctataaatacagctacgctaagagatattacaacccatattgtagcaactcttcttgaaagcttaagcttattttcatcttctatagccataaatcttaataaaacatgaggcattccaaaataaccaagtccccatgcaagcatggaaaaaatctttaaaaagctgtaaggctgtgctgaattagtagctgcagaatatgtatcaaacaatccaagatagcctggaagtgcttttgaattatctataactgcatctactccaccagctacatttataccaaacaaaacaacaacaataagtgctatagtcataactatactctgtataaggtctgtcatacttgccgcaaggaaaccaccaagtgtgcaatatgcaacaataataacagcacttatgatcatcgctgcaagataattaaaaccaaataagcttgaaaacagctttccacatgcagcaaaacctgaagcagtataagggataaagaaaataacaataattactgctgcaataaatgtcaatattctcttatcatccccaaatcttttagaaaagaaatcaggaatggtaaaagcatcatatccttgcgtatattttcttattcttttagcaactataagccagttaacatatgtacctatagcaagtcctatagctgtccatgcagcatctgctacacctgtaagatatgcaagtcctggaagacccataagaagccagctgctcatgtcagatgcctcagcactcatagctgttacaaatggtcccagctttctacctcctaaataaaaatcatctacagcattattctttttagaacatactacaccgatgataacaacagcaacaaggtatataataattgttgccataataattacctgtgacataaattttctccctttttgttttatatataatttttgttaataactttaacagtatatcatatttctgttaaattagtcaaaaattatataaaaatcaaaaagggagaatcctatttattatttttattatttatttttattcttcaagcttatcaatataattatactttttaaactccttgatatccgcatcagaaggaatatcaaaatcagataatatctcaacgcttgtattgataccacaattattatatatccacttagcatccgccggagccataaatattgaaccatatgtaagacttgttcctatcttgttatattcatcaatattcatgtttccaatagtttttgtaaaataagctgtagaacatatatattcagaattatcaagtcttgaactataatgtgcatatccattattgtcaagcttgcgccattcagctttctctgatataactgttgaacctgtttttatatttttattaactgcaatatgaaatgcttttattgtcctgccattctcacttgttccatcaacagttgatataactgcaatattcttagaaacattgattctgatacgatatgactgattctttgcaacatatgttgaagtttcttcctgcagagatgactcattatccagatcctctgtctgattgttaagttcattgtcaatattatcattatgcattccagctattgtcctatatgcaaacatgataagtgcaaacaacaataataaaatcaatacatataaaacaagattactgcctttaaaccatcttttaatatccttttttttaatgcgtttatatcctcgtatctccatattgaccaacaccactattaattattagtttataccctgatttttctctttaagttctataaacttaagaataacttcaatagctccttcaattccaacaagaccactatctacacataaatcataactcttggcatcgccccactttttgcttgagtaataattataatagcttgctctcttcttatctgttttctgaataaggtcagcagcctttgaatcattcaattcatataatctcttaattcttttaactctttcatcaatacttgctttaacaaacacacttacagcaaaaggatcatcttcaagcgcataatccgcacatcttccgactataacacaagattctttttctgcaagcttctttatagcatcaaactgtgctaaaaacaccttgtggttaataggcatatctacgtatgaattggaatatcctaaagaatatgtatccataactaatgaataaagaaaactattagttggtttttcatcctgtgaggcaaacaattctttacataatccactttccttagctgcaagctcaagaagttccttatcataacatttaattcctaatctttcagccagcttcatacctatctcatgaccaccactaccaaattcacgtcctattgtaattactgttcttccatccataatgtttacctcctggttacaataatgtttaacttcatattattttattaaacatattatactttaaattgtgtataaaatctagtaatttttagtaaattttataatttttacaattttaacaaaatattcagtaaataaatttaaaaattatgtaacatcatattattaagatattcagagatatctttaccatatttattggctacaatactgtattgactaggtgtaacacatacaagtcttactgtgctatatcctcttgctccgaacatataatgctttactatattagaattctttatcttatttatcacctcttcagaaggcttattccttgttattataataaatgatatataagaatacatgtgatttttacaaggcagtttattatcatttcttacaaaatgcggttcaatatcatcaactgtaaattttaaaagatcatttaattcatccaggccaagattatcacaattaatgaagaataaatgctcatagcacttaacattccataattttgctgattctgttgtactgaacttgtcacgatttttataattataggcatatataacaaatttacggttattaaaccaatagttatgataaatgtcaaatgtatcagatattccattaagtataatatctataaattcttttcttctcatatatttcacactttcccgatatagcttaatatctgtttactatatgataacctgctttcttaacttatcaagtatcatcttgaaatactctggcagaggagcactatattcaacatattctttagatgttggatggataaaaccaagaacacctgcatgtaatgtctgtcctgtcagcttaaaaggcgatctgccacttccataaacatcatctccaagcaaaggatgtcctatacttgccatgtgtactcttatctgatgcgttcttccagtttccaactgacattctatatagctgtaccttccaaactgttccaataccttataatgtgtaacagctcttttaccattctttttatctattgccatcttttttctatctgatggatttcttcctattggtgcatcaattgtaccttcttctgtattaaacccattaagaactatggcataatattttcttgttatcgaatgtacacttagctgctctgcaataaaattatgtgaataatcatttttgcaggcaacaattactcctgttgtattcatatctattctatgaacaattcctggtcttagaactccattgataccagaaagattatcaagacaatgatacattagtgcatttacaagtgtccctgtataatgaccagctgcaggatgaactaccattcccttaggtttgttaacaactataatatcgttatcttcatatacgatatccaatggtatatcttcgggttctatctgtggcacctcaagttctggaagaataacatcaatcgcatcctctgccatgaccttataatttgattttatacttttaccatttaccttaatcagattattttcaataagcttctggattcttgaacgtgacacatcctgcatttcatcggaaagatacttatctattcttatattactatcatcaacatcaactataaaacattgatttttattattattctgcatatactgttttcctgtattattctttataaaaatttagttatcactaacatttctatttttatttttgaatgataaaaaatcaaactcattgtccttgtaaacaaataaaattaaaattataaacattgctacagatatagttacataacaatctgctacgttaaatactggaaaattaataatcttaaaataaataaaatccctgacatatccaaatctgacacgatctataaaattacctattgctcctgacacaagcattgtacacactatatacataggcagatatcttttatttaacggcatccttataataacatatgtaatcactgcaactataataactgtcaatataagaaatgcatttatcctgccactaaacataccaaaagcacttccatcatttctaagatatgtaaatgtgagaacattctttattatatctacatcatttttcatataaagattagtttctgccagatactttgttatctgatctatttgtgttaaaacagctgtcataataatgtatataacaacacttattatacgtctgttactgtctatttttttattatacatattttttccttttacaacttcatattgttaaactaacatttaaatcaggacacttttcagtgcttctttcatctctatatcggatacatcataatctatatatgcatttccaatactatttaataagataaatttaatttttcctgcatccatctttttatcacttttagatactttaacaacatcatccgcatttattccacttactgtaacagggaattcataaagcttaaacatatcaagaacatcttcatactctttctggcttatatatcctctgtttactgatattcttaatgctgctatcatgccaagagttacacattctccatgatataatgtaaaattcatcagcttttcaatggcatgtcctaatgtatgtccataattaagaagtgctctgtcccctttctccttaggatccttttcaacaacttctcttttaatattacagctcatatatatcatatattcaagagcatctgcatccatatctttaatttttgttgcattaacccttaaccagttataataatctgcatcctttataagtccatgctttattatttctccaaagcctgaattaaataatcttctgctaaggctttgcaatactgatatattcatatatacaagttttggctgatgaaaagctccgaccatatttttatatgctctgaaatccactcctgtttttccacctatacttgaatcaacctgtgccagtaaagatgtcggtacctggataaaatctatacctcttaaatatgtagcagctgtaaatccagtcagatcacctacaactccgcctcctaatgcaactagcatatcttttctgtcaaaatggttctgtataagaaactcataaacatcctctactgtattaagattcttattttcttctccagctttaaatacatacgtaaacactttattacctgttttttctaattcttttgcaacatcatctgcatataatctggcaacattgctgtcagatactatacacagctttcttcctgttacaccaagcttgttaaattcatcagagagtttgtcaaaggttttctcaataacaatatcatataaaggtttaccatcatatttaacgttaatacattttgccatttatatttcctctttcaaataatatatttattatacaaactgccacccttggcagtaaaccaggagtggcagcaatatttacaatttaaaacttagtatcattattcttaaatgaagttaaatcaatgccacctgcgacgatttcaggtatatctcctgaaatatctacattaggaggtgtcacaagaaatatgtaattagtaattttctgtaagttacctctgatagcataacatgaaccagctgaataatctatgactctctgtgcaacatccacatgtataccttcaagattaagtacaacagccttaccagaaagtaaagtatctgttatttcactggcatcttccattgattctggtcttattacaacaacctcaagtcctcttgatgtctgcttcataggaactaccttgccctttgatgcaaactttggtctgtcatttactgtattagctgctatatcttcatcatctgatttcttagaacctgaaaataacttctttctggaagccgtcttttcatcttcgtcatcatcataatcatcgtaatcgtaatcatcatcgaaatcatcatcctgaaccttaaaaagattaagaaatccatcaacaaaactcatattctctctccctatatataattattctttgtaatataccgttactctgttctatgagcatactgtctttgctttatctgttagaataatccctggcaccaaatatagctgtacccactcttatgtgtgtagcaccttcttctatcgcaacaatatagtcattagtcatacccatagaaagtacatccatattgatattatcaatgtttttagcattaatgtcaacacataattgctttaattgtctgaaatacatacgattatcttcaggattggcaacataaggagcacttgtcattaaaccacgtacacgtatacctttataatctgatatttttcttataaaatcttctacctcatctggcttaaagccgaatttattctcttcaccagctacatttacctctacaagaatatcagcaacaagttttttctttatggcttcattactgatagcttctgctaaacgcactgaatcaacagaatgtatcatagaagccctgccaacaacatacttaactttattcctttgaagatgacctatcatatgccatactatatccttaggaagagagtctgctttatcaaccatttcctgcacgtagttctcaccaaactgtcttatattgcaatcatatatttccataagcatttctttgggctttgttttacttactgcaataagacatacttcctttgggcttcgtccacatttttcacaagcttttacaatattattctgaactgtaacaagattatctttaagcataataattctccattcttgcgtgtgaaaaatcttatttttcacactatatctccttgttttttatgacatttatttagtatatcatttcattaggcttgtatttatcagcctctaataatattctgtcatatactgttattccatgagtgattttttgttttacaatataatattcgttattctggtctagaatttctacaggacagaatatcgtgtaacccgtattaacacagtatacaccctttaactttgcagcaggtcctataacaaatcttgatgacgaatcaggcatcacaataacctgtcctgattcaaagctttccttattgacatatacatattcatcagtagttttatatatatcagcctctgcaaaggaaggaacaatatttccgttttcatcatatttttcaactatgaatccgtaattattgctatttcctcctttggtcatatatgactttggtatctcataaaaatcattttctgtaacagatgaaactggtattttcataccacttttaccagttgtcacaagctctatatcaagaaatctttcagatgcgtatcttatcatatagctatcaagagataatctgccataaatgccatcacctttttctataattgaaaatccacatgtaaacgtcatattatcttttttaactttaatatctatagttttctttgactgaagaccatatttactgatatcatcctggttaagctttatcatgagataccagttttcacttgtaaccattttatacgcaggattgcctgtcaccattatggattctgctttaagattgcttttattataattgtctttattgaaatccgaagatgttatagtttcaggttctttgctctcatatccatctacagaatacacaacaataccattagtctctgctggtattgttctgaataaatccctgcttcctgtactttctataatagaatcaatattattcattatattttcgttaatagactgcagcactgcagcattcagatctgacttcaaatcatatatatacgagaaatcacttccatcataatcatttttataattattaagagtcgatttaatatccgccagattctgctttgatagggaattctcgccaactttattatagcctgccaatatatctgacactcttcctgtttcatctaccgaatatactgtgtccccctttttcactctggtgttttctctctgataataattaatatttcctgaataaggagaataataaacgctctcacttcgtaaagcaatagctgtatatacagcattattagtaagagaacctgtattgacctcatatgtctgaaccttggatttagatatatacagtacaacgaagcatattatatatataagtacaagtgcaaatataaaagcaactgcacgtggtcttcttttatatctaactaccttactacctgacatttatgaacctttcctcctatatacaataagctgtcacactaatacacatacagggttgcttaatgcgacagcttcatattattattgatatatttctctccattccatatcgccacgctctaatgatttgatcagaagctcagccgttgcaagattagttgctaacggtatattatacatatcacataacatacatatattattagaatcaggctcatgaaggctaggtgtttcaacatctcttaaaaagattacaagatccagctgattatgctcaatctgggcacataactgctggtctccaccaagatgacctgcaaggaacttgtgaatcgatagattggtgacctcttcgataagccttcccgtagtaccagtagcaaacagctgattcttgtttaatattcctttgtatgcaatgcagaaattctgcatcaatttcttttttgaattatgtgcaattaaacctatgttcataagaaccccctatcttattagtaatagcaagccataacgaatactcctgcttatattatcctctgaaatcttcagcaaatatatcatcatccctgtcaacatttctttgcagattaacattaagtacaattcccatggctgcaaaaagattaaccaaagatgtaactccacagctaaaaaacggcaatggaagtccggtattaggtaaaagctttgtaacaacgcctatattaataaatgtctgaaaagctatataggctgctacaccacagcacaacagccgcccttcctgatctttggctcttactgctgtaattatacactctattacgattgtaaacaacaataaaatagtaattacgcttcctgtaaatcctaattcttcacctatgaccgcaaatataaagtcattctgtgcctcagctatatacccagcgttcttaagcgatgatggatcatcattattaagtccttttcctgacaattgtcctgaaccaatagcctgtacagcataattctgctgatatacacctgcacttatattaccatccgttgaatcactgccatatatgaaatcaacgattctgtttctttgatatttctccatgaatataggatcaggagttgcaataatatatacaagaaatgcagctaccagcggtacgacaataagcaacgcacctccaattatcttatagcttaatccggcacagaatataactgtaaggatgataagcacaaccatgactgtagttgaaagatctggttccttaactattaacaatataggaacaagaagtactaacgcgagaatcgtaagaaacttccatgtgttaagcctgtccttatacatagttatgactttcgcaagaaaaatggcaacaatcagcttcataaactcagagggctgtatttgaaaagatcccactccaagccaccttttagcaccatggctttcttttcccgctataagtacaagaataagcaatatattaccaagtatataccacaaccaataatattttgttataaacttataatcaacaaatgatataaatatcatcatcagaaatgcagcggccatgcccactccctgctttaacgtatactctgaattggcactgtttacaactgtcaacgcataagcacatgtaactgctataagaattatcaatctgtaattgtatgaccgcattttatactttttaaacataaaatctccaccaccaatataatccgtttccggttactgtgtgattatttttcactgtttctcatatccttaataggaatattagcatatattgcaggtacagaaccattatcaccttctgttgatgtaatctggatatcaagttcttctgcatctataaccatgtattttgaaatgaccttaataatgtcattctttatcatttccataacctctggtgaacaattcgccctatcggaaacaagtaataacttaagtctatcctttgctacatccccagagcctttcttcttaaacaaatcaagtaaactcatatcttcttccattctgccttatatggcttttataataactattaatttttcttgtcacccttaaatagtgccgataactttttgaagaatccaccttttccattaagatcaaggaatggaacttcttctccaagtattcttttacatatattcatataagcctgtccagccatgctgctgtcaccaactagtggctgtcctttattagttgctacaactatattctcatcatctggaacagcacctataacgttaagctgaagtatatcattaacatcagaaatagacatcatttcccctctgttaaccatgtccatgcggattctgttaacaataagatcctcatggtccttaaggccatttgcatcaagaagtccaactattctgtctgcatcacgtatagcagaaacctctggtgtagttacaacaagtgctctgtctgcagctactattgcattctggaatccctgttcaataccagctgggcaatcaagaattatgtaatcaaatccttcaggatctgccttaatctcttctacgacctttatcatctgttctggagaaattgcagatttatctcttgtctgtgctgttggtaaaagatacaaagaaggacatctcttatctgtgatcattgcctgctttaaacggcaattaccctcaacaacatctacaagattatatacaattctattttcaagaccaagtactacatcaagatttcttaagcctgtatcagtatcgatcataactacctttttaccaagtttagcaagacctgtacctatattagcagtggttgtagtcttaccaacgccgccttttcctgacgtaacaacaataacttcactcattttatttcctccaaatatcaatatactaagtaaataaatacacaatagaataattatgcttaattttgtgcattaaatcaagcctttttttataaatatcgtctttttgtgaatgtttgaaaaatcttccagctttaatattaagaattaaagatgtatatcttccaatacattctgttcaaaatcttcaacatatatattgccttcatatacataggctattttaggctggactggctgctttgtctttaccttaagcttctttcttaccggactgctgtcagaacatcttgcgataatatctgctatctttatctgcataggttccatatccaacgccacaacaaatgcattttcgttgccattagcaccagcaaatatatttccctttaagctgccaagaacaatcacatttccacacgcaacaacctttccaccaggatttacatctccgagaataaccacgctgctctctgtttccaatacctgtccggatcttaaggttcctttatagaactgacacaaaggctgtgctggtacttctatttctttccccataatttctgctgtaacatcatgcttatttttgttattcattgcatctgcaactgctctttggtatatcagatctctttcctcatcatggtcaataagacatacaatattaatatctgtaacctcagatattatatccatgatctctttttcctgcgtatctgataattctcgtccttcaagtgataatgcaagagcagcattgttaaaaaacttagctgatgctgtgaatttatctcttatcatatctttaagttcatcaaagctcacagaagcatccatttttactgcaattccattcttatttccttttattactactgaattatccaattatttcacctcttattttattaaatgatgattgcgtagcaatgcagcaatctggcacatcagtcaggaggcaaatacttttcctcctgacatctttaaattactctaagccataatatatcttatatatatcagctgtcaaatcaatagatgtacctgatgagtatccatgctgtatacatacagaaacacatatttccggattatcatatggtgaatacgtaaccagtaaagaatgatctggttcttttgtattttcctgtgcagtacctgatttagcagcaattttcatgccaagctttgatatgcctgtatatgaattaccagcaagtgtcataccctcatgtactgtatcccatatattactgcttaattccacctggtgatcaacctcggcttcattttttcttataagattgccatctgaatcagttattttatctataagtgtaagattataacactttccagatgaagctatcgttgtaacatatctagcaagattaagtgtactatacttatgattaccctgtcctatagccgaagcaatcgagttcgtattggaagcctgtggtgaattttcctctatttcaactcctgccttggttgataatccaagaagatctgaatacttctgaagtgtgcttgttccataagtactgttataagttccatcctttctacatgccagattataaccaacattatagaaatatacgttacatgaatctcttatagccgttgccgcaacttctccaccatgtcctgataatctccagcacttaggtgcaggggttaccttatcaaatgaacccgaacaataaaatgttgtaccagacgatatagttcctgtatccatacctgctattgtagtacatggcttatatgttgaaccaggtgctgtaaatgactgagttgctctgtttatcataggcgcagctttatcattgatcaggctgttgaaatatttggcatcaactgttcctgagagcttgttattatcatagcttggataagaaaccatagctaatatatcaccattttgtggattagtaataactgttgatgctgaacatggctgcagtgcaagctgtgcaggagttattattttattagttatggcatataccataaactcataagcgccaagtcctcctgaggcaagcaatgcatatcttgaattctcatcattcatatcaagaacaccctgttcatacagcagcatacatatctgtcttccagatatatttccagcattgaccatatacttatacatctttttataaaacgatgtgtcttcccttagataactatctatataatcaataagtgcatcatatgactcctgaagacttgtatactgttcagatgaaaatatattaagattaatccagttttttgatatgccatgtgtaagcagttccttaaggcttgttccgttgccttctgtccagtccttatatacattatcatctgtatctacattagcagtattaaatactcctctgtctttcaggctcgtatatacataccatatatacagctgctgttcctcatcaagctttccgtatggtgtatctcccacagacagttcatttcttagccattccattgtactatcctgtttagataagaatgctgaatatatctgtctttcagtatcagtactctgggatgcaatatgctttattgacactatattgttatctataagggcaaaatatacttcttttgcaagtatatatactgtatttacacttccgttagaattatatgaatattttgtatccccattacgcatatatgttaataatatctgtataattttatcctcaagggcattgtatatttttttctgaagattaatatcaatcgtcagatatacgtcattacccgctgatgaatcctgttcatcaagcacctctgttattcgtcctacagtatcaacgtaaacctttctggtaccctttgttcctgcaagctctgattccatgctcttttctataccactttttccgacaatatcattgctgtcataggaatcatccaatgtttccagctcgcttgacgacaccgtaccagtatatcctaatatctgggaaacatacatgctgtctacgtatcttcttatatactgctcatctaccgtaacacctgtaagctcatctgaattttcaaggattgcagctacagtctcatctgaaacctcattagcaattgtaaatgatatatatctgttatatgaattagcagacatatatcttcttaagttaactatcataagtgcatgttctacactaaaaccatcagctaccggattcattccctgctcttttaacagctttatagtagctgccatagctccgccatcatttatataatcatcacctgctacagctacgccatatctgtcacataattgtttaaacagctcacctgctgatacatttctctgttcatctgaaagctcacttatagaacgcttaccatatatatctcttaagaatctaagcagctcattatcctttatgttatattcatacattccattagaataaacaataggaaaatcattcgaatagctgtcacctttttcttcaataattgtaagagttttatctattgaagtattaagcagcctgtttttggtatcattatcctcatactttccactatcgcttatccttactgcatatgcaagatcattatacgccagtaaaactccattcttatcgaatattcttcctctcgtggcagcaacactcatgtccttttgtattgaacttgataaatcttttacataagactctccattaataatctgaagtgaaaataatctgttaacaagtacgccgacaagtacaataaacaccattatcaacggaaaaattctggatttgaagagacttagaatataatcaaatatttccttcatctaaattaccttttttccttttcttccacttaacatcaagcaatgtatcaagtttcatcaacggataataaataaccagtgcaattataagggtataaaccatctccggaatgataaactttgttatgaaataatctgcatttaacctgttatgtaaaaggaacttacctatgtatgataaaaattcatagataaaatctgaaagcataaccattgctaagggaataaggacctcaactttctcatattctttataaaacattcctgaataatatcctacgtacacaaaaaccaatactgaaaaaccaaataatccagaaaagaataaatcatacatgatgcctgcaaaaaaaccaacaaacatcccctcattctttcctttaaagaaaccaaacagcactggaaggataatcaaaagattaggaactatgccacctatggcaatagtccttccaaaggttccctgtataaggtaaaccagtaaaattataaccaactctgttacttttcttttcatggttctcctgcctttaattattgttttttcatttcagttataattagtacttcctgaagattattgaaatctaccgctggaacaagatatcctgactgtgtaagattgttagaatcaggtgttacatctttagcataacctataagtatcccctgaagatatttatcacttatattggatgtaactaccttatccccatctctgactgttatatcacttttaaaatgtgtaagcttaacaaatccactgtccgactgttctatatcgccttcaacaatacaagtttcattagtatctataagcattccactcaccgaattattatcctcgattattgtcttaataatcgaataattctttccaacttctgtaacaatcccaacaagaccaccgccggcaataacattcatatctttttgaatgccatcatcactgcctttatctaccttaaatgctttagaccagttatcagctgttacttctattattcttgctcctacctttgtatatcctgtatacttctcatcgagctgatacaactccctgagtcttgaaagttcataagtatcctgtcttaactgattgttttcttctgtaagatcatcaaccttgctctttagttccttattctcatcaagaacaactgatatttcctgaagagtcgtatacttatcgtatgtccagagtccaagattattcattcctttctgaagaggaaccactaccattgatatagcacttcttaaaggtgcaacaagcctgtctgtaaaaaaacttgtcgatataaatataagacaaacggcagttaaaacaattaaaatatacttggatgtcatgaatgaagatactttctttttcattttactcttccttaatcataatttctatcttttggagtataagcaatctttgcaaactgtggattagttacaactccaataagacctcttacaacactctcagaaggctgatcaactatattaacattaagattagtctcctgtcttataaacttttcaagattattaatctgtgatgtaccacctgacacatatacaccatcctttataatatcagctgcaagttctggtggagtcctctctagtataacctttattgcatccataatagaatgaagggcatcaactattgcattatatataacatcagaagaaacatcaacacttacaggaagtccggataatacattacgtccaaagcctggtgcaaatgtttcatcaacctttactgcacttccaagttctttttttaatccctcggcagtcttgctgccaataacaagattatatacctttcttacattactgataatgcaatcatctaacttgttaccaccaatttttattgacttacttataacaattccgccaagtgataaaacagatatttctgttgtttcagcaccgatgtttaccatcataacacctcttgacttagtaacatcaagccctgcaccgatagcatctgccacaggtttatctactatatatatattcttggctttcacctttgaatctgccacaagttcataaaatgctcttttttcaacctctgtaacatctgttggaacagctatatagaaatcattattgcctgtatttttcttatcatcgttaactttgttaaaaaaattcagtaataaagtctgcatattctctatatctgctatcacaccgaactttacagggaaagaaacctctatattctctggtgccttttcatacatttcatatgcttcatcgccaaaagcaagaagatcttttttgttagcaattgctattatatttttttcattaaggattgcatccttatccttgcagcacattttaaaattacttgtgccaatatcaataccatatacgttagacataattttcttcctttcatgtatgtgaatagctgctgcataattgtaatcctatcctatacagccatattcttttaaacttgtgtaattattatctccaataattatatgatctataagatgaattcccagaatctcaccagccttacttatcttgtctgtaacttcaatatcctgtctgcttggattggaatcaccacttggatgattatgcacaagtactatgcttaccgctttgtttctgcatgcctcgtaaaacacctccgatggtgatacaagggaactgttgactgtgccaattgaaaggacaatatcactgattaatcccagcctgctgtcaagcataataagtatcagtctttcttttgtcagatacctcatatcctccatataataccctgctatggtatcaggcgatgagaacttaagcctcatagcagcctgccttttggcaatacgccttgatagttcacatatgcactttagctgtgctgctttagccatacctatgccttttatatccataagctcctgtactgacatatctataatgccaggcaatcctttactaccagcactgttaagtatatcctctgcgagattctttgctgttttgcctgctgtacctgtctttataatagctgcaacaagctcagtatctgtaagactgcctgcaccaaactccatacacttttcataaggcataagatcctttatttcatctttttcacatattaaattatcactcataaaatatcgataagccttatcttatataactttataagctataatagccagtataacgccaataatacttgctattgttatcctaagctggatagaaaaagtaagtaccataaatcccagattaagaataaccggactttctaatgctcctactccaaatgtctgtccatatcctaaccagctaagagcaggtatccctgctgtaacctctgctatcagaccaccaagcacgatacctataagaataaataatataagaaaccatccattcttatacttggaaatattactcatgctactccattcccgcacgtatcagtaacacgtacgcaattattctatcagtatttctatcggaatacaaccacttaggcataataaaatattccaaaataacctaaaatagtatatcacaattaattaatcttaagaagtcccttttcatacattttctgcatactcatcataataccgaatttcgcatggtaccatgtaagtccgccctggaaataaacagcatatggttcctttactggaccatctgcactaagctcaatagatgaaccctgtacgaatgcacctgctgccataataacatcagaatcatatccaggcatagcccatggttcaggcgttacaaagctgtcaaccggtgctgctgcctgtatgcctttgcagaaagctacaagcccctctttagtcccaagttctacagcctgtataatatcatatctttcttctttggcatcaggtatacatctaaatccagccttttcatatacattagctgcgaatatagccccctttaatgctccagcaacaacagtaggtgcaaggaacagaccctgatagaaatctttatttacatttattgttgcaccaacctctttgccaagacctggagatgaaagtctgtatgctgcctgttctatgcagtcctttcgtcctgcaatatatcctccacaaggtgcaagtccacctcctggattcttaataagtgaaccaactaccatatcagccccgacctctgatggttctatcttttcaacaaactcaccatagcagttatcaaccatacatatgacttccggtttaatgtctttaataaacttaataagttctccgattctttcaactgaaagtgtcggtctttgggcatatccttttgaacgctgtatagttacaagctttgtcttttcattgatagcttttcttataccttcataatcaaagcttccatcaggcagaaggtcaacctgcctataacttatattatattcagcaagacttcctttagatggtcttattcctataatctcatccatagtatcatatggcttgccaactggcgataaaagctcatcaccaggtcgaagattagatgatatcgccacattaagtgcatgagtaccgcatattatctgaggtcttacaagtgcatcctctgttttaaatatatcagcatatattctctcaagagtatcccttccttcatcgttataaccatatccacttgttccatacagatgcatctctgcaaccttattcttctgcattgcgctaagcaccttcagctggttatactctgctatttcatctattctatcaaatctttccttaagttctttaataacattctgaccataattatacacattctcacttatgccaagatgttcacagtacatatttttcatattcttcctctttcttttgctttcagcataaattctttaacatactttatacttattctgcctattgtgcaactatattcttatctttcagtatctgaagcatatatgataacagtttatccttatcatgatcaaactcatcaagattaagccattcaatgtctttttcccttttaaaccatgttatctgtctttttgaaaaatgtctggtattgtttttaatattttccttcagttgttcaagagtacataagccatcaagataatcaagtacttccttatatcctattgcctgcattgatgtgacatctctatctataccactctctttcagtctcttaacctcatcaacaagtccttcatcaaacatctggtcaaccctcaggttaattctgtcatacagcagctttctatcatcattcaaaacaaaatatacatagttataaggtgattcttttttctgctgttcctcattatgctcagatattttcttacctgtctgtttataatattcgatagctcttgcaactctcttaacattattgtaatggattacatctgctgacttttcatctatctttcttaacatatcgtgaagatactctgcgccttcacgtcttgctatatcatacagttcttccctatatgaagtatctttatcttcattttcaaactgtatatcataaagaactgactgaatgtaaaagccagtaccaccaactataagcggtatatgcccattagctcttattttatcaatcgcctcgcatgccatctttttaaatatagttatattaaattcctcatcaggattcataacatctataagataatgcttcactccatgcatttcttcctgttttatcttggcagttcctatatccatgcccttatacacctgcatagaatctgcacttataatttctgctccaatctgttttgcaagtcttatagacaaagaagtttttccaaccgctgttggacctgttaatataactaaaggctgtttttccatattaatagccacacctttctacaatctgtcttttacctgtcttttacctgttttacacaattctcttgaattttctttctatatcatacttgctcatgactataagagttggtcttccatgtggacaattatatggattatccgctttcataagctcatccataagttcctctgcttccttataagatattttattattaccttttattgcagctttgcacgacatagatgcgaccttttcagtaaggatatccatatcagtcattcttccttcactcataagtccatcaagaagatccataagcatctgtctgtaatcaagctttggaaatcccgccggaattcctgtaaccttatactcactaccgccaaactcttctatttcataacccattttagtaaacacctgcatattctgtttaagtacttcttcctcattcatattaagtgtaagaataacaggtggcataatcatctgtgtatcaatatgcttttccctgatttttttcatcattctctcataaagaaccttctcatgtgcagcatgctgatccatcatataaaatctgtcctcaaactctatcagccagtaagtatcaaacagctggcctattattctgtaattatccttattatcctcatcaagaagcttatccttaaacatcgagagctgttcaggttttactttaacttctgcctgatatttttgttcatcttcctttaccatagcctctgatcttcttgtttcaaatggttctgggagtctggtttttgtttcatccagcatagctttttgtaattctatcgttcttgttggttccagctttagttctgactttgattccgattctgattctatctttacttctgactttaattccggctttgattctacctttacttctgactttaattccggctttggttctgactttggttcttgttttaattgtaccgtttttttagtttcttctgttctgtcaattccaaatgctgcttttgtttcttttatttccagctctttttccttatttagcttctgcattatctgtccatcagcttcaacctcagcaacaagctcttttccctttaacgtggaaagaattgtatcatacacaaaattatatacatattcattattagaaaatctaagctccatcttagtaggatgtacattaacatctatgatttccgggttaatcgtaaaatgcagaactgtaaacggataattatgtggcattataaaacctttatatccagcctcaatcgctctgtttattatactgctctttatatatctgccatttatataatagttctcatataccctgttaccacgattcacaaacggttttcctatataaccctctatcctgatattctcagcagcactatttacttcataaagattcgcagtaatatctcttccataaacattatatataatatccttaagcttcatatttccagatgtatgaagcttattctggttattattaataaatctgaatgatatatcaggacgtgataaagacagatactgcatcagggaattaatataaccagcttctgttgctgctgactttaaaaactttctccttacaggtgtattaaagaaaagatttctaacaataaatgtagtaccatcaggtgcacctatatcttcaactgatattttctttccaccctcagacagatatcttgtacctgtaagactcttttgtgtctttgttatcagttctatctgtgaaactgcagctatacttgcaagtgcttcacctcggaatcccagagatgaaactgttatcagatcctctattgactttatcttgcttgtcgcatgtcttttaaatgctatatctatctcatctttattgattccagaaccattatctgtaactcttataaatgagattccaccttcctttatttcaacagtaaccgcattagcccctgcatctatagcattttcaaccaattctttaacaacagatgaaggtctttctataacttctcctgcagcaattttattaattgtattctgatcaagcagctgaattcccaacgtcagtctcctttccttattcacacatatagcatttatcaatcaaaagcagaataatcatccattttagtcagatatattttcttaatttaccagcggtttttaaccttcccctgcagcttatataacgtattaagcgcatctattggtgtcatattacttatatcaagttctttaatatccgatataatgtcatcatctttaaccgtatcaaacaatgacatctgtttatcctctaaatcattaatctttttatactgattattcattttttcaagtttctttgaatattgggctatatctcttgccttctgtgatatatctgcatcacttaactcagcaacaagctctttagccctgttaagtaccgtttccggaactcctgctagcttagccacttgtataccatagcttttatctgctccaccctttataatcttacgaaggaatactatatcatcaccacattctttaaccgctatgcaataattattaactccgtcaagcgttccttcaagctctgtaagttcatgataatgtgtcgcaaaaagtgtctttgccccaagaatttttgtattggctatatattcaacaacagcccatgctatacttaatccatcaaatgtacttgtacctcttcctatttcatcaagtattataagactttttgaagtagcatttcttaatatattggcaacctctgtcatctcaaccataaaagttgattgtcctgaagccagatcatctgatgctcctacccttgtaaatattctgtcaactatacatatactggcagaatccgctggaacaaaactacctgtctgtgccataagcacaataagtgcagtctgtctcatatatgtagacttaccagccatattaggtccggttattatagtaactctgtttgatgaattatcaagatatgtgtcattagatataaacatatcattggttatcatcttctcgactaccggatgccggccatttttaatatctattattcctttatcgttaatttttggttttacatagttattctgagttgcaacaactgataaagaaacaagtgcatcaaccatcgcaacagctttggcagtattctgtattctgactacttcctttgcaatcttttccctgacatcgcaaaataaatcatattcaagcgaatacaatttatcctctgcaccaagtataacatcctcaagatgttttaattcatctgtcgtataacgttctgcattggtaagtgtctgctttcttacccattcaggaggtaccttgtctttaaatgaattcgtaacctcaagataatatccaaacaccttattatacttgaccttaagatttttaatacctgttctttctttttcacgcatttcaagctctgaaagccactccttgccttttattttggcattgcgaagctcatctgcctcttgtgagtaaccttccttaatcatacctccatcacgtaatgatataggtggttcatctactatcgctgaaagtacaagcttataaagatcagataaatcatccattttatcaaaacattctacaaacatagaagtcttaaagccaccaacaatacgtctaatatgtggtatcatttccagtgtattgcgaaatgcaattaaatcccttggatttgctgttttacagcttattttagtcataatacgttccatatcataaacaggattaagatactctcttagttcttccctgtctatcatacaatcattaagctcttctattgcatcctggcgttttattatctcgtctttgtttatgagcggctgttctatatatgaacgaagcatacgtgctcccatagctgtcttagtcttatccagcacccacaaaagagaacccctcttttgtttttcacgcattgtttccacaagttcaagatttcttcttgaagagctgtcaataagcatatatttaccagatgaatatggcatcagcgtagttatatgaggcattgtacttttctgtgtctcataaagatatgtaaggagtgcaccagctgctataatccccaccgtataatctttaacacctaatccatcaagcatttcaatatgaaaatgttcaagaagcttatttttgcatgtttcttcattgaagtaccagttatcaagtgttgacactgctataccaagctttgcattaatcgcttcaagattaattccactcattgcaaagtattcattcacaattatttctgatggagcaaacttatttatttcatctatcagttcactccccccatcaagctctgttacaaaaaaatctccagtggaataatcagctatagatacgccaaggttatctccaagatacactatgctcatcatataattatttctggtttcatcaagtccaagcgtattgatattagttccaggtgtaacaacctttataacttctcttttaactattcccttggcttttttaggatcttccatctgctcacatatagcaaccttatgacctgctgccacaagtctgtttatataagtttcggcagcatgaaaaggaacgccgcacataggcgcacgttcctcctgtccacaatctttaccagttaatgtaagctcaagttctttagatacgattattgcatcttcaaaaaacatctcatagaaatcaccaagtctataaaacaatatacagtccttatactcgttttttgttgcaagataatgctgcatcattggtgaatactcagccattttcatcctccagtcactaaatatacattcttaatcattcatggttcccatataatagaaacctttacattcatccatatgaacattaacaacagttccaataagagatttatctcccttaaaatgcactaaaatattattagtcatcctgccagttaaaaaatcactgtcatggtcgtctacatcctcaacaagcacatccatatcatggccttcatatcttttaatatgttcatggcttatatcagaaacagtctgtaataggcggttaaatctttccttaacaacatcctctgcaacttgtccttccattctggcagcaggtgttccagttctttttgaatagataaatgtgtatgcactatcatattttgcttttcttacaacatcaagagtatcttcaaaatcttcttccgtctcacctggaaagcctactatgatatcagtcgtaatagatatatccggaatagtttttcttatcttgtctacaagttcaagataatgctccttagtatattgtctgttcataagcttaagcagtctgctgcttcctgactgaagtggaaggtgtatgtgattacacacctttggattgtcacgtataacctctataagctcatcagacaaatccttaggatgtggagtcatgaatcttattctttcaagtccatctatcttagctatttcaccaagaagctctgcaaatgtaacattatcatcaagtgtttttccatatgagttaacattctgtccaagaagcataacttcttttactccatctgcaacaagtctttcaatttctcttattatttcttttggttctcttgacttctcgcgtccccttacatatggaacaatacaatatgtacagaagttattacagccaaacattatattaacgcccgacttaaatggatactttcttgaagttggcagctcctcaacaacctctttagttgaatcccatatatcaataatctgttcctctgatgtaaatctgttatataacagctctgctaacttaaatatattaaatgtaccaaatacaacatcaacaaacttataagaagtctttatcttttctacaacctcaggttcctgcatcatgcatccgcacatagctataatcatttcatgattatttcttttagccttttttagctgtccaagtcttccatatactcttaagttagcattttcccttactgtacatgtattatatataacaaaatcagcattctcttcattatcagattcttcatatccaatatccttaagtatgccaagaagcttctcggaatccctggcattcatctgacacccgaaggttgaaacaactgccttaagtggtcttttaagtctttcttcttttgccttaactatctgtctgcatgctttaagatagtaatactgcctcataggttcatattcaggcactggagctgataaatcaatactgttaatcatattttctattgtattatccatataattcttaattacctttcaatctgtttatattgatatctgttttatcattcatctacgctgttatgagtttccagaaatccatatgccctacaggcctgctataataatacccctgtatgtagtctgcaccaagatttcttattttctcaagttcttcttttgtttctacaccctctgcacatatcttagttcccatttcatgtgccattttaataataaagccaactagtatactgttattatcgttgttatggatatctgtcacaaaagatctgtcaacctttaatattccaaacatcctatctttcatatattcaaaattagagtatcccgttccaaaatcatcgattgcaagtaaaaagccattacttacaaaatcatcaagcactcttttaactgcaatattcgaatccatctgaatactttcagttatttccaggacataatggttattagccgccttatgtcttgatatattttccagaacatccttcttaacatcactttttattatctgcacaaatgaaagatttacatgcatgacaaaatcagggattatatctatacatctgctgcagaattccgctgccgtatccacaatccatcttccaagaggaattataagtgagctttcctcaagcaatggaataaaatcaacaggtgacatgaatccatacttttcgctgttccatctaatcagtgcttctgcacctattattttacctgttgcaacattaactataggctggtaaaacagttcaaagcctttataattatcatttacacagcttcttagttcatcctgtatctgaagccttttaagataagctgcatattctttttcatcataaaactcgaaacggttcttgccattaagttttgctgaatgcaacgcaaatctcatcttctttgaaagttctttaaaagaatcagactgcgagtcaaaagtacatgcacctgctgatatattaaagaacaccgcatagcctctgtcacttatggttttatctatatatgtccttatctgcttataaagctggcgcgcattttcagctatatcgccgcttacatcaagcattaatactgcatattcatcacctttcattctgtagaccttaaacgattgtgcagaggcctcttttaacaaaacagatgaaagcattgaaagcacttcatcaccagcctgagagccatatttttcatttatttctttgaaattgtcaatacctataagcatgccatatccagtgtgagtttcatttctgatgcgcgaattatactcttcctcgaaaacagattctgtatacaagccagttatattatcgtatctgtttttctttcctatttcagccacacggcctatcatataattaatgttatttttacggacaagcacacctctgcagcttatccatacatagccatttttttttgacctccagcggtattccatgtcatgtttctttatgataccattctgaagatcacttatattattaaaaacagcttcataatcatcaggatatataacatcctttagtctcattccagcattttcaaactcagcacattcaagtgcaaatgtatccgttactcttttactgtatattgcatgatcattgctaagatcatatatataaatataatcatctgtacattcatcaataaaagacagaaaattcttccagtcttctatatcagcgtcaatctgttccatactgcttcccccattctgtataatacaaccatataatcgtatgaatattacataaacgccctttatttacattactttctgacctgaccgttaccatatattatatatttgcccgtagtcagcgcttcaagacccataggtcctcttgcatgtatcttctgtgtacttatgcctatttctgccccaaagccaaactcataaccatctgtgaatctggtagatgcatttacatatacacacgctgcatctatttcattaaggaacttctgtgcatttgcataatccttagttataatagcttctgaatgccccgtattatatctgtttatgtgttcaatagcagcatcaatactatcaacaaccttcatagatataatatagtctagatactcacgtccccagtcctcatcagaggctgcaacaattctgtcatctatgctttgagctgtttcatcaccacggatttctacattcttagtctttaacctgtctactatcacaggaattgcagcttctgcgattttactgttaataacaagcgattcacatgcattacataccccgattctctgtgttttagcattgtagataatatcaaccgccatatttatatccgcatattcatctacgtatatatgacagtttccagttccagtttctataacaggaaccgtactgttgttaacaacattctttataagtcctgctccacctcttggaataataacatcaacatactcattcatatgcataagctcatctacatattttctatctgtatcagttatataagatataaccgcaggattgatgccttccttttttaaaacatctgttataacattaactatagctatgtttgaattaacagagtcgctcccgcctcttaatatacacgcatttgctgacttaaagcacaatccaaatgcatctgctgtaacattaggtcttgattcatatattatagccacaacaccaagcggtactgttttttttcctatcataagaccattaggtcttgttttcattgattttatctcacctataggatcgtcaagtccggcaagcacccttagtccgtctgccatcccttctattcttgcatccgaaagtaaaagtctgtcaagaagagctgtactcatgccattctttctgccattgacaatatcagtctcattggcctcctttatgtaatcggcactttttataagtgcatctgcaaccttattcagagcattatttctttctgttatccctaatctggcaagttcttttgatgcagcctctgcctctctgcctataatctttaaatctttcatacctacctcacttcaaacaattatagatcaattaataatacgtttttctgtaattattttatctggttttatatcaaattcttctgacataatgtgttcgacgatctgataatcaaagcatattgcagttttgtaaaaatcagacatatgctgctgtaaatatctgtcatagaacccaccaccatatcctattctgttcttttgtgtatcaaaagctattccaggcataactaataatccatccttaagtgacgcgtaatcatcacttactggttccatgattcccatatatcctggtgcaagatcctggtaactttttattttcacgaattccatatattttacatctttatctttaaacacctttgggacatatacgttttttccagcttttatactttgttttatcagtatgtcagttcttacttcctgattataacttacataaaccagtacattatcactattgatatattcatccgatgttataagctgattaattatagcctcactaagagaagcaatatccgtatcagacatagatttttttatttccgatatatacgctcttatttcacttttcgtctgcattatttttcatcttttcttcatgtcttttctttacatctataattgagccatctggattcttgattttaatagtatctaaagtgcctttcagattactacggaatgcttcaatatactcttttcttaacctgatctgttcctgtgcttcttcttttgtcaatccttcagcctttgatttgtgataaagctcattaattctgttaattgtgtcctgtgttaccatatccaccatccttataatactacattgtaaacactaataaatcttcgccattgataatacatgttttaaattctgccttttttttaagaagaacatgctgtatatcaggaaacttatatgcttctatatattcagaattttttttaataaatggtatgcctctctttattctagtcacaaggataacatcattaataacataccgtattttcatatcaggcggcatcttatattcctctttctgtgtgttaagattaacaagatacattgcttccttatctttttttattgtgtaaggattatcattaattacatatgtgtaattaagatccgatgcttcctttatgtcattattaattctgatctgttttattttattttcaaaatcatataatacaacttcctcagacatagtaaacatattaaactttgaatatataaccctgttacctgaacgtttcatatatgcaaatgtttttttactatcagcactatcaagtacttccatcgttatttcggcaggattcagcatcatttctgatacaaactgtcttgtattaaccacaacaatacattcataatcatccttaataatatcttccgataaaccatctgtattttttatgcctgcattataaacatctgtattatttaagcttgtattatttatatcagaaacaaagcttttggtctttccaaacttaaaaacacagctgtttccttcaagtggaataatattatataagccacatctgctaagcagcgagccctttactgatatatccttattgacactgaaatctcttaattttactgaatgtacagtgctatcatcacgtccgatttcttcaataataacaaaatcatattcaagaacatatatatgaatacttacctcctctaaatgttttattatatcaatcggatacctgtaaacaagactgctttcgttgtcatcgaatgaatatctgtacaagagaatatccattcttgcatctgtaagctgttcagctgaaacaaagaaaagatagtcgtgcatattatgcgcatactgtatatctgcaatattatattttttgatttcaggagaaatctcgtacttttcgttcgttgttgaattcagaatgtacattttctttcctataaaatcaagaaatctgtagttgtcatctgtcatctgtaatacaagaccattgcttatagatgaaaaaactgcgtcttctgaatttctgataagcttaatgtccatcgacacctcctgatgctaatctataagtccaacaagatcaaaattctgctttttatcactgacaaacaatgttccaacatcttcaccagccataatacctgtgatgttatctatattgtttccattggctataaccatatccgctcctgaacttgttgctattcttgctgctataagcttagttgccataccacctgttccgacactgcttccagatgtagttttacccatatcaagaagattgtcatctattttatctacctgatcaataaactttgcatcagggtttgagttaggatcatctgtatacaatccatcaatatctgataataatataagcatgtcagctcctactatagatgtaactatcgctgaaagtctgtcattatcaccaaatgtctgtacctgctttatctcataagtagacactgtatcattctcatttactatagggattgcacctaactttaatagctcattaaacgtattttctgcattcttcctgcttgtgtcattcacaaccgtagtctttgtcataagcacctgtgctgctattgcactatactcagcaaatattttctggtaaaccatcataagtttagcctgtcctatggcagcacatgcctgtttaaccggaagttcatccggtctttcatgtaatcctatagctgtccttcctaccgctatagcaccagatgatacaagtatcacatctttgccggaattcttaagatcaaccaatgtccttacaagcttttctatctttcttaagtttaaccttcctgtgtctttatgcatcaaagaagatgaacctatctttattactattctttttctattgcgaatctcttctctcgcactcatcttaattcctcgttccctataatacaaaatctatttcatgggtaacagtgataaatttatccagctaccatttaaacattgctttttattttactataatttcaatcagctatcaagcgcaaagctatattttctgaaacctttatgccatctacagctgctgatgttataccacctgcataacctgctccttcaccacaaggatacaatccatggcagcctgctgatacaagttcatcatttcttgttattctgacaggacttgatgtcctgctttcaacacctgcaaacaatgcctcgtccatgtcaaagcctttaatataccggtcacagcctgttacaccctcacttatagcttctgctatataatcaggcagtatacttcttacattagtcagcttatattctccctttatgcacggacttactgcaccaagtgatgttgatgctgtattttccttgaaatcgccaagaagctgtacgggtatttttccttcaccagcaatatatgcagcagcttccagttttctttgaaacttaacaccatcaagagtcccatagccataatcctcaggagttactgtgactatcatggcactgttagcattagacgaatctcttcctgaatagctcatgccattaacagcaagcatattcttttctgagcttgcatttacaacatatccaccaggacacatacaaaatgagtacactcctctctccctgcctgtacagactgacttataagtcaccttataatctgctgctggaagattatatatattatttccatatgcattattgttaataaactcttgtggatgcatgattcttagaccaactgcaaaagctttaggctccataataatctttttatcataaagcatggcaaatgtatcccttgcactatgtcctatggcaaggcacacatttttacattttcttataaactccttacctgatgaagaatcatatattgttatacttctaacatgtttattttcaatttcgatatccttcattttatgtctgaaatatatatccgcacctaatgattcacagtattctcttatgttttttacaacaacagctaaaacatccgttccgatatgcggcttattagaacataatatggcagcatctgcaccaaatctgacaaatgtttcaagcacatctcttattcttccagtcgggtctttaataactgtattaagcttaccatcagaaaatgttccagcgccgccctctccaaactgcacattggattctgtatcaagttctcccctatcccagaatgtactgacctttttttgtcttacatcaacactgtctccacgttcatatataactggtttcatgcctgcttctgaaagtttcaaggccgcaaacatgcctgcaggtccaaacccgataataacaggtcgttcctcctcacttatatgtcttttaacatcactgcctggtactggaaattcatatatacttttttcaacatacatcacatttggattcttttttaagaatttctttaaatcaatgttatttccattttttgatattttctttacatcaacgctgtaaacatacataatatagggcttatgtctggcatctatagatctttttacaacatcatattctatctggtattcattttttaatcccagtgttttcttcagcatcaataagagctgttctttactatgatctggctttaacttaagattatttactcttaatacatgttcctgtttcaattatctgcacctttcctttatataacgtctgactccatcagctgctgactttccagagctccatgcccactgaagattatatcctccacatctgccatcaacatcaagcacctcacccgcaaaaaagacacctgctaccctaagcgactgcatatctgatgatgaaaccgcttttaaatcaacacctccctgacatatctgaccattttcaaagcctttattatcgactatatgtacattgaaatgcttcatattttcgagtaatttctgtaatttagatattttcagttctgatacgcggcttgctgcatcaatattacattttctactcaccatagtaacaagctttttattaactattccttcaaaaaactgttcaacagtcttatatccttcctgtttaaccatatatgaaagtatatattccatttccttatcatcaatatcaggcagcatatctatacatacatgcacatcttttttttcataaagtgcttttactgcgtatctgcttatctgaaaaactggtatacctgatattccataatctgtatactggatttctcctgtatcctctgatatttttataccatctatgtatatttctatctttccctggcttcttactccggcagctattctataaagctccttttcatctcctataagctgtactaatgccggaagcggttttatcacctttatcccaagtttttttataagctcatatcccgaaccatcagagccagtctttggagctgcctttgagcctgttgcaaaaacaactgtatctgctatataatcaatcccctcacattctataagaaacttatccttcatatcagcagacaatttaacaacattttttattataacatttgtatggatactcacttttttattttcaagctccagccgtaatgcattctgtaaagaagacgcagtcattgaaagtggatacacatacccattcttttctttatggtatattcctatccctttaaagaagtcgagtacagcatctacattaaatctgtttattacatccatgacccacttcgtgtctttattctggtacattgtttcatccatgttaaggtttgtaaaattacattttccattaccagtctgtaatatttttgtacctattcttgaagtatgttcaaggatacatgtttctattccatatcctgcaagagtaatggcagccatcattccagctgcccctccacctataattatacattcatgttctttcttcatgttctacgctcattcctgtcttttttacttaagtctgttaactgctgtatgcctgtaagaattcgtacaattcatcttccccgtaaagctctattcctgtctttaatagttcttttttatcgtgcggaagattatctgtatttatcagtgcataatcaaaaaatttctgcacttctttatcagcatcagaaaaacatttatatatagctataccatcacctatatctttgataatatacttctgcggaatcatcttttctggctcattattaataacagcctcctgtccggcttctttataagattcatctaatatttcctgtttgttatctttgtattcactttgtcctgttgcatacataccaccagaaccagaatttccatcattatttttttctttttttattcctgttgaagcaagaataataacaagaaccataataacagctataaccatgcacacagatattacatttcttctactcatcattatgatatactctccttcataatggtaagtattagcatatatttacaaaatatacattaaagtttaaatgcatatggcagcagggcattaatatcataagaatatattccatctttatcctctgtaattatcctttcatccccatggaagaactcactcatgacctgtctgcatataccacaaggataagttttctctccagaagatgaaacaactgctatcctatcaaagtcagaatgtccttcacttacagccttgaatatagctgttctttccgcacagtttgatacaccaaatgaagaattctctatattacagcctgtaaacacactaccatccttcataagcacacatgctccaactgcaaagtgtgaatatggtgaatatgaatatttcatagcattttttgccatatctaataactgtctgtcagtatacatatattccaccttcttactatttcatatgctgctcttttttcttttgcgctcattacatcatcttgttatgccaagattatcaagcacagctctttgtttagcctccataacactgctttcttcttcagtcatatggtcatagccaaaaagatgcatcatactatgtgctacaagaaatgcaagttctcttgtaggtgtatgtccatatttttcagcttgttcaataaccttttcaactgatacaactatatctccaagcataagttcacccgtatcaggattaaaataatcctctgtatttgtatcaaactcttcctctaaagaatcaaaatcagatggtttatcataattaatcattggaaatgataatacatcagttgctctgtctacctgcctgaattctttgttaatttcatgaatagcctcattatcagtaagtgttacattcacctcaacctcatatggacatttttcatatgtaactgcttcatcaataaccttattaattatatcttcataatcaagctcaagctttttttgtgtttcatattctatattaactgtcatttcttctgtttcccttcttttcctgttttatttttctttctctttcagctctgtctgaccgcctgttctgcctttcttcatactcctcgtatgcttttacaatcttttgtacaagcgggtgtctgacaacatcatggttagtcagcttaacaaaacctatctcatctacctttgacaacaccttcatagctacatcaagccctgatgtgacatcttttggaagatccttttgtgtctggtcaccagttacaacaacctttgaaccaaaacctattcttgttaagaacatcttcatctgtgcaggtgttgtattctgtgcttcatcaagtattataaatgcattatccagtgtccgtcctctcatataagcaagtggtgcaacctcaataagacctttttccatattagcgttaaagctttctgctcccataatctggaacagtgcatcatataaaggtcttaaatatggatcaaccttactctgaagatctcctggaagaaagccaagcttttctcctgcctctatagccggtcttgtaaggattatcttattaacctcattattcttaaacgcctgtatagccatagccatagccagatatgttttacccgttccagcgggtcctataccaaacactatcatcttatcacgaatctgatcaacataattcttctgtcccaatgttttaggttttatcggctttcctgctatagttctgcatacagtatccgaatctatctccaacaggctattttctttatcatcaaaagaaagtgatatagcataatcgacattctgtctgcttatctggtttccacgccttgccagttctgtaagattatcaaggactcctttggctctgtccacagcagttttttcaccaataagcttaacaacaccatctcttgctataaggtcaacctttaagcttctttcaatctctctggcatattcatcaaactggccaaacaccataccgctgtattctgccggcatatcaactataacttctatatcactcatatgtttatgctccatttctttaactatctgatatcagtctcagggtcaaccagaatctcaatttcgcctgtacacctgtaatttttttctgatgcatctatattaacacgacaatctattatttgcactcctttttgttcaatatgcttaatatatgtatcaaatctctgctcaagcagctgtctgcattccttttcattccgttcttttatgatgcaattatactcatactgtgtttcaaacccatatgttattttagtatctatatgtccaggtaaatataacttcctgttttcagttttactctcatataaagtttcttccccaaatgttataccagctttcaattctccatattcatttcctactattaatctgtgatttttttctccagtaaatactttgtcctcatattcaacatcaatatgatcatcatatggaataaccgttcttactaatatatcagcatcagaatcaacatatgtttctttcacaaccactcccgaatcatctgtcaccgtaactatcccctcaacaagaagctgatttacagataccggatctcctgaatgtacgaccggcgtacctttccttgttataatgctgtatatatctccatcatatcttgaatatatatctttttttacatctgtatcatcatatccactaccatctgccatagtatttccatctgccttttccatagaatagttttcctttatataaactataactcttgaacctttaactgctacgcatgcccatgtcacatcaaaatcatcccttatctttttttccaggaaatcacaatcaattgttttaataaacttcgcacaacatattccgttatctgccatatatttttttattgtttcgtctgtatatatatggtttccataacagtcaatctcccatacaaacatcccaagcacgcgtaaaacaacgaacataacaaccatgcctgtcagaaatgaataatgctttctgtatctgaacaaaaaatatacaggataagctttacctgtaactttaatatgtacgtgtgtaagccttatatattttcttaatttaaaaaaatcttttcttgtcactctgacagttatgcggttttcatactttccatcgtatttcatatgaataaatgtaatatcatcttttctgcatatattgatgaaacgtcttatctcatcaccttctataataagttctatataaaatatatatctgagatgatttttcatactccctccatcaagataatagcagtcaaagacattaatcgaaagtaatctggacaatcctgccttttacagatatttcatctgcatcaagataacctatatccaggtgttctccctctacatatacaatccctcttttggtgagtatcttcacacatgtatcattatattccattatagttttaatgttttcaatatacatttcccggtttcctattaatgtaagaacaggcagtgatgttgacatccccggtaatgtcatacaatccgttaaaaaaacatctttattatttttatcttgttttttcacactgaccttccattcctgcctgttaatacctagcaaatgattatattacagacaaaatgaataactattaatatatatataatatatgccacttccatgtaatatatgcacctaaaaaaatcccgatgcatcttatgatacaccgggattataatttcgctataaaaattaattgaacttacgttttctagcagcttctgacttcttcttacgtcttacgcttggcttttcgtaatgttctcttttacgaatttcctgctgaatgcctgcctttgcgcagtttctcttgaatctacgtaatgcgctatctaaagactcgttttctttaacgatgacatttgacataccttttcctgaccacccttctgttgcgtaattgtgctgggcaatacatatagggttttacctttacctaatcgcacaacaaatattatatcacagaaaagcacgaagtcaactaattttttaacttttttattatcttataactgttcttcaagcacatttggagccttctttaaaagctctggtattccagccggattctttcctcctgcctgtgccatgttaggacggccgccaccgccgccacctacaagtgatgcaacagccttgatcagattgcctgcatgggctccttttgcaactgcatcatcagtagccatagctatcatattaaccttatcgcttcctattgcacttacaacaagaacaacgcctgaacctatttcgttcttaatcttatcaccaaggttacgaagctcattcatgtctacattatcaaccttagtagctacaaacttaacaccctttatctcaacaacattatctgaaacatctccaagtgcattgtttgccagttcagccttaagcttttcattctctgaagataatgcttttatttcatcgttcattgtatgaattcttctgacaagctgtacactttctgtcttagcagcctcacttgcttcctttacaagcttctcaagttcttcgtagtacttaaggactcccttatctgtaagggcttctattcttcttacaccagcagcaacacctgcctctgatataatcttaaaaagtctgatattagctgtattagcaacatgtgtaccaccacagaactccttagagaaatcatcaatgcatacaacccttacgctttcaccatacttttcaccaaagagtgccatagcacctgtcttttttgcttcttctatagtcataatcttagtttctacaggtatagcttcaactatcttttcattgactatatcttcaacctttttaagttcttcagctgtcatgctctggaaatgtgtaaagtcaaatcttaatctttcaggatccacataagagcctttctgctcaacatgattgccaagaaccatccttaaagctttctgtaaaaggtgtgtagcactatgattcttacatgtatcagctctgtattcagaatctactaaaagagtaactgtatcaccagctttaatcatgccttttgtcataactccgacatgaccgatttttccacccttaagttttatagttgtatctaccttgaattcaccctcaggagatgtaatatagcctttatcgccttcctgtccacccattgtagcatagaatactgtttcatcaacgattatagttcccttatcgccttctgaaagtgcctctacaacatcttcttcagttgtaagaactgttacctttgaatcattcttaagcttatcgtatcctacaaactcacttgttattgctgggtcaatctcgtcatatacggtagcatctgctcccatgtagttacttaccttacgtgccttacgtgccttttctctctgctcgttcatgcacttactaaagccttcttcatctattgtaatgttcttttcttctaatatttcctttgtaaggtctattgggaaaccataagtatcataaagcttaaatgtatcctctcctgaaagcacattcttattctgttcttcaagagccttttccatatcggctaatatactaagtccctgatcaatagttttgttaaacttttcttcttcctcagagataacctttgttatgaactctttcttttcttcaagttcaggataaccatccttagatccttctatgactgtttcacagagtttagataagaacttgtcctgaattcctaacaatcttccatgtcttgctgctcttcttaaaagtcttctaagaacatatcctcttccttcgttagatggcataattccatcgctgaccataaatgtaacggaacgtatatgatctgtgataactcggatagaaacatcctgtttttcatcttctttatattttacacctgccatttcgcacaccttgttacgaagtgcctgtaatgtatcaacatcaaatatagaatcaacatcctgaacaactactgcaagtctttcaagacccataccagtatcaatattcttctggataagatctgtataatgaccatgtccatcattgttaaactgtgaaaatacattgttccatacttccatatatctgtcgcagtcgcatcccactgtgcagcctggcttaccacaaccatacttttcaccacggtcatagtaaatctcagaacatggaccgcaaggaccggcaccatgctcccagaaattatcttccttaccaaaacggaatattctttctggcgcaatacctatttctttattccatatatcaaaggcttcctcatcatcttcatatatagatggatataatctgttggcatcaagtcctacaacctctgtaaggaattcccatgaccagtgtatagcttctgtcttgaaataatcaccaaaagagaaattaccaagcatttcaaaaaatgtaccatgtcttgctgtcttaccaacattctcaatatcaccagttctgatacacttctggcatgtagtaacccttcttttgggtggaatctcctgtcctgtgaaataaggctttaatggagccatacctgaattaataataagtaaactgttatcattatgtggaacgagcgaaaagctcttcatctttaaatgtcccttgctctcaaagaaatcaagatataatcttcttaattcattaacacctctgtactgcactttaattatcctcctgtttagctgcctttttagcatctaatccttttcttatcttaccgccggcaaatactgcaagaactaaaagtccaagcataacaatgaactttgccgcttcgaatataatctctgaaactaatgtaagtcctatcataattcttcctttctgctactgccggcttcgcagcagctacaaacaacttagtattttatcatagcttatatcaattttcaactcataacaaactagcaattccattttccattttcaagaaaatatctggcactattttctgctgcatttataatgtcactgttatagcctattgtttttaacagctttattgcatttcttgttgttgccggacctgaatatagtttaaaatcaaatataacctcattatctgtaaccttctcctggaaatgataattatcatattgaccactaagaagtgtagtaagctcaatatcatgtgttgcagcaaaaacaagagccttacttgcattgacactctttaatatctccgatgatgcagctattctttcaactgtattagtaccacgaagcacttcatctacaaacataagaacaggatgtccttctttgttaacagcatccagtattcttttaagcgattttatttcaactatataataactgtttgaattactaagatcatcacgcaaagccattgatgaatatatcctgtatacaggagctttgtaataatcagatacacttgtatatatagtctgtgacaaaagtgcattaaccgctattgtcttaagaaatgttgattttcctgatgcattagagcctgtcagcaaaacattatgctttgtacttattgaattggcaacaggtttctttataagcggatgatatacattttttacttcaagctgcatatcactatcattcttaaattctggtatgcaccatgcatcaagcatatttctaaaagatgctattgcaatagatgattctataaatcccagagtgtctataagctcatatatacacttttctttatcatgaaaaagctttataaggttgttaaacttaataaggtctgcatgtgtaagcattctaagataatcaagtgccatttccatgatagagccatcaacatttccagtttcaagaagccatgatcttttcattatatcagataaatcttctgttatattttttagcttaatattgtactcttcaagaaaatcaacattaagtgcagttatctttccagcccccatcataagcttaactatatggttgacacatataaaatatctgtcaacgccagctttgaatttataatatgttattattgaaaaagcgactgctgcaatacacagccatattcctataacaggatttataacacacgtaaaaactattgctgcaactaaaaataacaatgaagcataatgaagtgcattgctttttttatcaagccccacaacaacatcacaataatcactaatagatatgtgctttgcccttcctatccagacaaatattttttgaagttcaagcctctctgatgcatttttatctatggcagtggcaagcctatcaagtttttttaatgactccatatcagcatctggctgtcttaacattctgtataaatattcctgtccggctgatgaattagtattattcatcatacggaatatatcatccatgccaagatcattccatgttatatcatctatagaattctcattggcatttcttttaaagtaatgtgatatacattcgtaatcatcaccagtatactttctttgtgctggttttccccatccgtttttcagtttattaattatagcattctgttttcttttattatttgttattgtaacatatacagctacaaaaaccaccattgcaaaaaatacaattatctgcatacttgacttgtccattattttcctccttgaacacaggataatactgcggtttcaagtgaaagctttatcatatcatcaaaaccatcctgacgctctttaaccgacagcgactcaccattaagaagattatcacttattgtaaacatggcaagggctctctttgaaagtcttgctgcattcatatataatgctgctgattccatctctaccgcaaggacattcattttactccacgatttattatattcagtattatcattataaaaaacatctgtagatactacattacctacctctgtccatatgccatataaccctgcctgttcataggctgtatgcaaaagtccaaagtctgctatgggcgcatacaatcctggaaggcggtactgcattgcataattagaatctgtacatgttcccatagcaagtactatatctcttaaatccaccttatcagatatagttccagctgaacctattcttattatggtatcaacatcataaaacttaaataattcataactgtaaatacccattgaaggcattcccatcccgctcgccataaccgataattccacatctttatatatgccagtgtaaccatatatattacgcactgaattgaattttctgacattatcaagataagtttctgcaatatattcagctcttaaaggatcacccggcataattactgttctggctatatctcctatcttagccgtattatgtggtgtagccatattactaatatttcctccttaatacatttaaacaaaggctgtattctgccataacatcaatacgtttatgtcactttcaagctatatgcaatgcaacagaccttaacgtacagacatgcagaaaaacagcctgttattaacctttatatctattttccttcatattttatgacagaatcaacattataacctgtgagcttttctctgccatcaagtccctcaagttcgataagaaatactattttcactacaactcctcccagtctttcaataagttttatgatagcttctgtagtaccgcctgttgcaataaggtcatctattataacaaccttctgtcctggctttatagcatccttatgcatttcaagagttgcagttccatattcaagtgaataatcctctgatatagtttcacaaggaagcttacccggttttcttactggaacaaaacccttgctgttagcatatgcaactggtacaccaaatataaagcctcgtgattctggtcctgcaactatatcataatcaacatccttaagtaaatcattcatgccatctatagcaagctttaatccctccggactctgtataaccgatgttatatccctgaatataatccccttttctggaaaatccggaatgtttcttacgtaatcttctacttttttcatattatcctccattcttgcgctgcttctttgcgcatctcaagtttgtgcgaagcacaaatcttgcgtgtgaaaaatcttatttttcacactatcctcctatagaacaggcagaattccacttatcatttataagtacattatttacaactcattttatcagattcatcatatacaatcaagcatttatctatacaatcagacatacaagcccggaattttcattcattaccttttctatcgtttcacttattttatccatattttcttttgttatattatgagttttttcatatataccatcatccacaatctgttcaatcgtttttccaaatatgcttgtgtcccatataccatcaggattgtcattcgtgctcttctttatatagtcaatcagatcatctgcctggttttttgttccaactattggtgcaatttctatatttatctgagttttaagcagatttaccgaaggtactcttgcttttattctcacaccatacttatttccattttttataacaactggttcatcaagttctatcgcatttcttacaggtgttactacgccaaagcctgacagattaacctgtgacatagcctctcctatgccctcatactcctttttccttatagacaggtctcttattatgcttacaagttcatattcgttacggatgctggttcctgtaagttcacttaatatatcataatatatcccctgactcatatcataatccacacttaccacgccttctgccatgtttacatcacttattgtaagctgttttatgtattcattatcattattatattcataattatctgcatcttttatagtattaacatcattaagcatctgatgtgccacctgacaaagttcctttctcagccagtgttttgatggcagaacctgtgtccatgctggcgtattaaaatctatttctttgaccgggaattctttaaggatactttcaaatatcctgtttacatcctcctgctttagctgatcacaattaaccggcataactgaaacatcatatttctctgtcatatcagctgccagtctgcttgtttcctttgaataaggtttaacactgtttagcaggacaacgaaaggtttgcttatctgtttaagctcatttatagtcttttcttctgcaggaatataatctttcctgtctatccccgttatacttccatcagttgttaccactatgccaatcgtagaatgttctgtaatcacctttttagtacctgtttcagccgccttggaaaacggtatctcctcgttattccatggagttttaaccattctttcaacaccattttccatgtgtccgttagcaccttctatcatatatccgacacaatcaaccatccttactttaacacttattccatcaaatggtgttataagtgcagcctcttttggtataaactttggttctgtcgtcataatagtggttcccccggatgcctgtggcagttcatctgtagctcttttcttttcattttcatcctgcattacaggaagcacacataattccataaatcttcttataaatgttgactttcctgttcttactggtcctactactcccagatatatttcaccattagttctgtgtttaatatcgttatacatatcataaccagcatccgtatatgacgtattagcctccataacaaaaacctcctgaatatacacttgtaaatgtatattcaggaggtaatataattatgaccatgacatatattgctaatccagcataaactataaattatgactaataactaataaataataactgatgactaataactgattactccaaactgtgccagtgtataaaatacaagaataataagaagcaaaacaggcgctatatacttgaccatcactctgtatataagctttcttttaaatgtctcaccattctttgttgcttcatttataacatagtctggtttagcaaaccatccgataagaatacatgtaaggaaagcaacaaccggaaggagcagactattacttatgaaatcacaaaatgtcaggaaatccatacctaatattgtaacatgagcccatacaccattgcccagcgaacatggtattccaagtaatactgaaaatactatgattcctatgcacgccttaagacggcttatccccagtctatccataatcatagatgttatcgcttccatgactgaaacagagcttgtaagtgctgcaaaaaatacaagagcgaaaaacaatactccaataattcttccagcagccatctgtccaaacaccttaggaagtgttacaaacataagacccgcaccgctcgcctgcgtaccagcttctccgctgaatatatatactgctggaacaaccatcataccagcaagaagtgctatagctgtatcaaatatttcaatctggttaactgattttacaagactcacctcgtctttagtatatgaaccataagttatcataatacccattgcaagactcattgagtaaaacatctgtcccattgccgcacatactgttttaaacgaaaacttgctaaaatcaggaagcagataatactttataccatccttagaaccaggaagcattatgacataaatacatattacaatcgcaagcacaataagaactggcataaggaatctgctgacattctcaattcctttttcgactcctgatataactataatcgaagtaagtgcaagaaaaattataaaaaagacaagtggtgcccattcctgactgacaaaatttccaaaaaacgaatcatttgcggcctcagtaacctctcccgttgcaaaaactgccacatattttgtaacccagccacctattacgcagtaatatggaagaataataacaggaattatgaacgcaataggccctataaatccaaattttttatcaaccttgctatatgctcttgtaggactaagctttgtttttcttcctatagctatctctgttgtcataagtgtaaaaccaaatgtcaacgcaagtataatgtatacaagaataaatattcctcccccatattgcgctgccagatatggaaatctccataaattaccaagtcctactgcacttccggcagcagcaagaacaaagcctacgccgcctgtgaagctgcctctttcttttttatccattattaatatccaaacctttctatatttatctattcatcaaactctgcaagaacatagtagcccctgctcgtctctccaacttcttttacaaccccatgccttgactttaatctgtctggtgttgaataattcccagacattgccaccgcaggttctatcgtataataatagctgcttggaagctttccttcagttatatctacctcatcacccggcttaacaagattaggccggctcatagtaaactccatctgtctcataatacctccattcttgcgctgcttctttgcgcatttcaagtttgtgcgaagcacaaatcttgcgtgtgaacttacagattgattttttcaagacatttgatagtatattcatcaagcttgctgtttagagctgactgctgttctttgcttatatttatcacaccatccgcaatactttttgcggactctgaggcttcctttaacgtcttagcatctgtgtaaatatcagctattccgaaatcaaaatcaccactttgccttatcccaaagaaatctcccggaccacgcagctttaaatcttcctctgcaatcctgaatccatcgttagacttgttcagtatctcaagcctctgctttatctgttttgatttagctgatgttacaaatatacaatatgactgatatctgccacgtccaactcttcctcttagctgatgaagctgtgcaagcccaaagcgttccgaattctcaaccatcatgactgtgctgttaggcacattaacaccaacctctataacagttgttgatacaagaacatctgtatctccattcataaacttttccattttctcatttttttcagatgctttcatcctgccatgaagataatcaatccttgcatcaggtatagcctcttttagcttctgtgaataatcaatcacattttccgcttcaatattctcactatcctcaaccataggacatataacatagcattggcgtccttcctttatctgcctgctaatgaatgtgtatgctttagttctatacgatgtatcaacaacacaattctttattggcagcctgtcagaaggaagttcatctataatcgatatatcaagatcaccataaagtataatagccaatgttcttggtataggagtagcactcatgacaataatatgtggattctctcctttatcagaaaacatttttctttgattaaccccgaatctatgctgctcatctgttatcacaagcgcaagcttcttatatataaccttttcctggataagtgcatgtgtaccaactactatatcaagctctcctgtctcaagctgtacatacacttttttcttttctcttagtgtcatagaaccagtcagcagaccaactttaagttctatacctgatttataaaaaagctctgtcattgactcaaattgctgctttgcaagaacctctgtcggtaccatcattgcagcctggcatcctgcgtatgcagtattcatgagtgccagtatggcaattatagtttttcctgacccaacatctccctggataagcctgctcgtaacatgttttcctgccatatcagcttttatttcttcccatgtccgcagctgtgcgttagtcagtgtatacggcagcctgcttataaattcatctgtacgtttatcattattaattatatatgaattaggaatacgctcattagctgactttagattcatggttgcaagaacaaaaaggaaaaactcttcaaaggctatcctgtgtctggcttgtatataattctccattgaatctggaaaatgtatattatgcatagctttattatgttcaagaagtccatatttatccataatcacatctggaatgaactcatgctccattccaactgcatattcatctatcgcctgcctgacagcctttgtaactaccttgttagacagtccttttgtcaacggatataccggtgacatactgttctttatttctgcataagctgccatggtatatatatcaggatgctctaatgcatattctccattctttacaacaattctccccctgaaaatataatgcatgccaacacgtagttttgacttcaaaaaaagcgaattataccataaacattttatagtatccatattttcatctttcacaactactgatattatacttttccgttctccaccatatatcttaggacttgccactactgttgcttcaactgcagcaaccatcttttcactactgcttagtgaattaataaaaacaggctcctcatacacaatataatctcttggatataatcttacgagatcctctaccgtatatacagaaagcctgttaagattcattgcagtcttagtccctattccttttaattgtgtaatatccatacatcaacctcggataatagtctttgacttgtaatattttgtttattctacagatacgatataataatataccggctgtccaccatactgaagttcaacatcaacaccatcaaacttttcttctatcttgtatactaactcttctgccttgttttcgtcgatatcttcaccataatatacacttataagctcagattcatcatcaacaaactcagaaagcatatctataagtgtatcatccatatccgtacctacagaagcaagcccattgtctccaagtccaagataattgtcttttttaatttccttaccatcaatagatgtatctcttactgcatatgtgagctgtccagacttaactgtcgaaagtgattcaagcatagccttctcgttttcatctgctgatcttgtaagctcaaaattaatcatggctgttataccctgagggatagtctttgttggtataacaataagctttttatcctctataatagatgcagcctggttagaggcaagaataatattgctgttattaggaagtacaaatattgtatctgcattaatcttgtcagctgcgttaagaatatcttctgttgatggattcatagtctgtccaccctgaataacttcatcaactccaagacccttgaatatctctgctaatccttcgcctgccgcgatagttataaaaccaaagtccttcttaggtgcattcttaggcttttcatcctcatgctttttcattgcatctgctgcaacggctgactgatattcagactgtgcaataaccttctgattatgctcttccctcatgttgtcaaccttcatctttgtaagctgtccatattcaagacccttctcgaaagcctgtcctgggtgattagtatgaacatgtactttaacaatatcatcaagattaacacatactattgaatcacctatagaagaaagaaactttttaaattctgcttctgtattttcattaaatggtttttcaagcatgataataaattcagtacagtatccaaacttaatatctgcattatcaatagcagcacctttgcctggcatgctcgaaccagctttaaattctgcattaggctctgttattgtaaaatctgtaaccttgcctgtgagtgcatcaagcatacctcttaacactactacaagtccctgtccgcctgaatcaacaactcctgcttcttttaatactggaagcatatctggtgtctttgaaaggacttcttctgcatattctatgataagagttaaagccttttccatatcagtgatagattccgcaacctgtgcagccttatctgaaacacctttggcaaccgtaaggatagttccttcctttggcttcataacagccttataagctgtttctgtagctctcactgttgcaacagcaagtgtctttacagttatttccttaacctgtgacatttctttagtgaatcctctaagaagctgtgaaagaataacacccgaattacctctggcgcctcttagcgatcctgttgatattgctttagcaagattctccatagttggatttacaatagaactcacttccttagccgctgacataatagtaagtgtcatattagtacctgtatcaccatctggtacagggaatacattcagatcattaatccattctttctttgattcaagattcttagcgcctgcaagaaacatcttctgcacaagtgctgcatctatagtagtaatagccactttattcctccattccgccataataaaggcttgtaaataattctatactaatcaattaatctataacacgcacaccttctacatatatgttaatcttcttaatctcaaggcctgtgcattcagatactttgtattttacattttcaataagattatctgcaaccgttgaaatacatactccataagaaacgataacatggaaatcaatctctatcctgttatcactatctatatcaaccttaatgcctcttgtaagactgtctccctttaacagctttacaagtccatccttcatacttacagctgccattccgacaatgccaaaacactcaactgcagttgaaccagcatactgggcaacaacctcacttgagatagatactttacctaacttattattcaatattccattcatatctagcctccatactgcgacttgtattttaaggaacctacgcgaatctaccgcagaaagtccacgcagtcagactttcctcgcattatggaaaataatttctcatataatctgcgaattccgatttaatcatgtatatattatactatcaaagctaaaataaataaagtgaatcacgcaattttattaaactgggcaattcactttaatgtactgatataaattttcgaaaattaatagcattaggcacgctcaactttacctgaacgtaagcaagaagtacaaacatacatcttctttgttgctccattaaccttaactctaacagacttaacgttagaattccaaatcttattagatcttctatgagaatgactcactgcattaccaaagtgagcacctttttcgcaaactgcacatttagccatatcaattacacctccttaccggtattcggtattgggtaaaattacccacaacagaacatattgtatcagaacacaatatattttgcaacacttttttttagaaaatttatattctgtcaatggcagaacatattatatcctacaagaatcaatataataataatagatatgcataaaaacaagttatctgcaagaagcagcgctattatcatgccaacagcaatccagaatataataaatccaagcatccggcacattttaatcccccacacaatttataaaatgtctaatcctggttaaaagcatagtagtataccacagatttccatactaaaatatatgttatttttttatatatataacctgtagtctcatataaaaatgcctggaacaaatgccaaaatgcttattattgcaaaatacaatcaatcttcctttgaaacatctccgatggcttcatctatatcatcatccatcttaacatcaccaaatctgccagttattttatcaacaacatcaggaaccatatccagtatcttagtaactgtatcctgatttttgatattaacaagctttgtcgcaccattctgtattacaagaacagcacttggtgacatttttgcagtcatgactccacctgcattattctttttatcacctgcaaaagctccggcaccaacgccaaatgaaacatcacataatggtaaaattatagtatccttcacatgcacagcttcaccaacaactgtcttcgctgatataaacgaatccatccccttaaaaagtgatgcaacggttgtatcaaaactgttcttattattctctgccatatacactcctccattctatcttttaaataccagtttccgaaatctgtcattcctgtatacacgaaacgctataagcagaagcttgtatatccttattctgccttttaaatatatgcttccctctattatttcctgttcaaaatccggggttatattcatatctatgccgataaatccgtaaaatattgaggcatagacaaggattttgccagtaatataaggatcctcacacccataatgaatattaatatcctgcttaacaggtttaatttcatgaagaagaagcttaaactgttcaagcaggaatctgaacatttctttatttggctcatcttcaatcgcagtttttatttcatcaatttttgctttaagcgtatcctttgtttttatagcctttatggttttaagctttattttttttaatatattcttagctttatctatcaatacagctattctgccatctgtgttttcttcttttttccgctgtccgttttgagcttcatcaggctttttagctgttttttgtgtagacccagtctccggttttgctatagttttctttaccagtgtctcattttttttcgttactgattccgtggctgctacactgtcatgttcatgataaacattttcttttttttcttcatcaaaaacattcttttcttttttatgctttggctttttttcaactttcgggggtttattcccagcttgactatcctgctgtttattgctgtcatataacgtaaaaaacaaagccttaaccctgatatcagattctttatcataagacatatttattctcaaaagattaaaaagccatccaacatgcagctttcccttaaaatgcccatgataatctgctaaaatcctatacctgacaggtacaaaaagtactgtgattaccgcaagcagcaacaaaccagcaataataagaagaattattccgataatcttaagtatcaataataagatatgcaccaacgaacattcctcctaccgtttatttccaaacttcaaatatccgcttatatcaaagccgccagtattgtgatacacctcatcaattatatctcttacaagttcaagtgcttccatgcgtccttttgctattccaacaacatatatatctttaagaacctttttttctttaaagtgtgtctgcaacagcacattagcagaatacacatcaagtatattggaaggattcgatggcagtgttataagatatgtatcaaatgacagtttcttctttacaacacgacccaagatcttatatttagcttttctggcttcatcgcccatatatagtcctttataccacttcacaatatgctcccataatccaatctactgaccactaatcaacattcttataacttcaacaacagcctttttttctgcctcatcgctacattgtataagcgaactgttaatataatcctgtatttcttctgtattattaaaaaatacaggaagcattgataataccgatgccatcacagcccgtcttacacatacctcttttgatgcaaacagttcatcaagttcttttataaacctttctgcaacagaatcggcatatgaatcagcaggtatctcttcaaaatattccttaggcgctatatctacaaaatcacttccagattgtaatttctgaataacatccagatctttatacatatcaagcatagacatatcagccagcttttctttaaggtttccgaaagcatactgtgtagcaaaatcagctgacataatcgcttcaagaatatgctcctgtttgccttcaaacgcttcaaaaagcactgctatttcatcaagatcctgttcatcctcaaaaacagcctttgactttcttataatatcttttgatgcattcacctcattgctatctccaattgtattattgtcagataatataattgtatacagatcatttactatctgtgcaagaagaacatatatatcagctgcatcagccatcttttctgttgcaatatccaacgcacctttaagtcttgtatatccggcctggtcaagatttttatagtcagccttatcaagtgttacatatatatcatgcatatccgtaaaaaagctgttatccatatctgccctgccaagcatagcacttgtactcaacgaataataaaaatcgtctattgtctgcttctgtgcgccatgataaagggtgaatgcatcgcttatacggtcataaaatcttccttttgacattcttacaggaagctgccctactacatccgatattctggcattaatagacacgttatccttatcagagaatatataatgcataatatcattagtcatatatgtattatagtattcctcatcaaatacgctgtcatcatatctatgttcaaccctgtttaagacatgctcatacaccttgaacttatcaacataatctgtaacactttccattatgcttataatctggtttctaagattctctattctttctacaagcatacttctttctgccacagatgaatctatagaagacagttctataacctcattcacgccttgaaatatctccaagaaatgctcatcatctatttcgttatctttaatcatattaagaatcgtataataattcatagataacttaatataagcaagaccattataaagggaagtcaaaccttttccatatttttcaagattctcttcaagattttttccttttgttatttcactagcaatataccctaaattcttcatataccttttcctgtattcttatttatcgccatggaccatatgcatatgcttttaataccacacaatccatgacacaattattttattttacttaagattaagcttatcaagtgcatcgcagaaatcaaatgtagcaaaataatccttaggtgtttctgcccttctgatcatctgtacatcaccattttccttaagaagaagttctgctgatcttaactttccattgtactggtaacccattgagaagccgtgggctcctgtatcatgaataataagatagtcacccatatcaatctttggaagcattctgtctatcgcaaacttatcactattctcacaaagtgatccagttacatcatacttatggtcacaaggtgcatcttcctttccagcaaccgtaatatgatgatatgctccatatatagcaggtctcataaggttagcagcgcaggcatcaacaccaatatactccttgtatatatgcttttcgtgaatagcctttgtaacaagacagccatatggtgcgagcataaatcttccaagctctgtatatatagcaacatcgcccattccagcaggtgtaagcacttcatcatacaccttatgaacgccctcacctataactgcaatatcattaggtgtctgctctggcttatatgcaacaccaacaccacctgaaagattaataaacttaatatctgcacctgttttatctctcaactctacagcaagctcaaaaagaatctttgcaagtgttggataatactcgttagacacagtattacttgcaaggaaggaatgaataccgaaatgcttaactcccttactctttaatatcttaaaggcttctataatctgatcatgtgtcataccatactttgcatcgccaggattatccataatcgaagtaccaagctggaaatatccacctggattatatctgcagctcatagtttcagggaactttccatcaaggatcttatcaagaaaatcaatatgtgttatatcatcaagattgatagtagcacctatttcattagcgtatgcatactcttctgctggtgtatcattagatgaaaacataatctcacccggcttatagtcaagtgcataagccatcataagctctgtttcagatgcacagtcaactccgcatccgaattcctttaatatatttaaaatatatgggttaggagttgccttaacagcaaaatattctctatatcccttattccatgcaaaagcttcctttagtcttcttgcattatcccttatacctttttcatcatataaatgataaggtgtaggatatgtcttatcaatttccttaagctgttgtaatgttacaaatgtctttttcttactcattttgctctctccgttctgcgtattagcgcatatataagtacatcttcatataatcctgctgtatcaaagccctgctaaaaccagcagcatatatttatccacgttgaattgtatattagataccctctttcgtcaagtattatacattatgcaaaaagagaacaccttatataacaaggtgttcccggcatataatccataatatgcagcatatacttttataacttttataacaaataatctgctattaataaatcagagatttctacagccagtaaatgaagtaggggttattctgacattttttccataatcagcttccttaagactgctgcagttaacaaatgcttcttcacctatactctccagtgttgaaggaaatactaccttttccagtctctgacagttctcaaaagcattggcgcttatagccttaaccccttctgggagttctacctccacaatatcatccctgttagcaaaaagctcctcaggaataacagaaaaatcgctcatatctatctctttaaatgttttattatataacttaaccttaattctgttgctcataatctctccctctctttctaatctttattctatagtgtttctgctgattcctaacatattaagaacattttttcctgagccagtcaatgctgtcttatagtaattcataagctcattgtctgatacagaaaaaagctttgataatatagctttatatgtattcatgacatatttatagtcatcataatccagcagtgtccttgttgttctataaccagatgaagtatatgaagtcctctgacctgcaacataagctctgttagcagttatctggcttcttaacctattcagtccatttttatccaaagacactgcatcgctttgttctgatgcagatgatgaactaaccatgatccctgtatcctctactgcctcacttcctgacatatctgttttagccgctccgtctatagttcttgaatcgtttgataatacccctccaagaatatcattgatcctgtctatatagcgcagtgtttcattatatggaggaacaccaccatatctgctcacagctccgcttccagcattatatgcagcaagtgccagcgacacatttccattataatcatcaagaagatatgctaacatcttagctccacctgttatattctgtcttgcatcaaacggatcttctaccccaagtgactgggctgttgttggcataagctgcataattccctgtgcgccgcagcttgaaaccgcctctgtatcaaaatctgactctgcctttgccacagcttttaacaggttaagatcaacaccatattcgtcagatacctccttaaatatatcatccagtgattcgctgccagaacttatctgattgatcatgccatcaaaatctgtctgttgtgtatgccttatattctcaccctggcttacaagatatatattgccatctaaaatattacctattgaacctactatcataatcaccagtttccttctctttttagtttcctgtatattgaataagcctctgataatatctgcttttcattatcaaactcaagaagatgatatgcttcatgatacttataaaacccaacatcataaaaatattcttctctctgtggcttacagtcatagctatcagcctcgcataaataccagtaaacacttttatctatatgtctgctacctgctttaaaggcatactgcgtttcacctatatattctctgaccttaacgcttgcgccactttcttcaagtatttctcttattgctgtctgttcatgcgtttctcccttttcaacagttcctttaggaagaacccatccatcatgtgtattcatatagttcctgtataacacaagaatcttgccacggaatataacaactccgccacagctaaatgcttccgacattttaatcctccaattcattatacaatgctgaaattctataatcaaggctaacctctagactaattacactttttttcgacaccttattcaaagaatgcatcgaacacagctttagctgtgtactgggcacttgagcctgaatatcctccctcaagtactacgcttatagcaatctgtggattttctgccggtgcaaaaccgacaaaccacgaatgtatattgtcactactgtcatactgtgccgaacctgttttaccagcagcattataagacgaccatctcattgaacttcctgttccagagtctataacctcttccatgcattctgtcagatattctgcctcttctgccgacataagctgttctataactgaaggtttatactgcttgactattctgccatatgcatcttcaatataatccacaacatatggtgtcatcattttaccaccattggcaactgttgaagctatcataagattatgcagaggacttatcattgtctttccctgtccaatcgcagtttcctgtgactcgcttattcctgactctttattaagcacaaaagagctcttattgtattcaaatgcaacaggtatatttctgttaaaaaggaatgtgttacacaattccctgaatgatgcattgtcaagacctgctcctatatgtgaaaaagcagaattacatgaattagcaaatgcttttacaagcgtttctgtcttatgtacgttgccatctgcgcaaggaatagttgttccaccttcttcataatcacttccactgcaggtatatgaaaaatcatcatatgtattcttattctctctcatatactcaagggtagtcattatcttaaacgtcgaaccaggtgcatacagcccctgtgttgccctgttaagtaaaacagaatccttactgtcatagcttatccattcatcatagtcctcatatacaagattcggatcaaaatccggttttgaaaccatggcaagtatctttcctgttgaaggctccatgactataatagctcctttattgctgccaagagccctatatgctgctttctgtaatgttgtatcaagtgttgtatacacattatgtccctttgccttctcaccagtaagatctgtcgatatctgatcaaatatattgtctgtttccgataacaaataatagttttctgccagctcaactcccatctttgtctttgaattgtatcctataacatgtgaaaagagctttttttgtggatatatgcgagtttcaacaccgttttcatcagtatcagtagttgcaagaagtgttccatctgcagaatatatatcacctctcacgactttttctgcctgattgtcaactcttttattatatggattatttatgacattttttgcatcttttatattaaacatacacaaatatataatcataatcgcaaaaagaccaacaaagataaaagatattatgttagtttccctgttccttaaaccctttttgctgccttccactatatctgccggtgtacgtctttttttactgttttttggttttgtttttaacattttttgcttttctgtcattttcatactcaccttcatcatgtctcatgttatacataccattaataagtgaaaacatcacaagcgaacttatgattgagcttcctccatagcttacaaatggtaaagtaacacctgtcataggtatgagcttaatagctcctccaactgtcagaaacacctgaaaaccatatgtaactcccagtccaactgctacaagcctgtaaaacagtgtcttgcatcttgatgcaatattcatcataagaataagattattaagacacactaacagcatggcaatcgaaaaaatcaaaccaaactcttctgtaacagccgcaaacataaagtccttctcagcaacaggtattttttccggcattccctgacagaagccatagccaaaccatgagcccatgcctatggaaaacaaagactggcatatctggaatccacttccatcaatattgctccacggatcattccatactataaatctttttctcacatgagaaaacaacttatatgcaagtactcctgctacgcctcctgctgcaagtccagcaccagtatacagcacatttttagttgcaatatacatcatcgaaagatatacaacaaagaatataagcgctgcaccaagatctgttgaaagcacaagtattatgacatgtaatgctgcaaatacagtaactatagctgtctgtctgaaagttgttgccttattaaacatagatgcaacaaacataacatataatatcttaacgaactcagccggctgtacagatacaggtccaagtgtaagaacaagattagctccatatattttatttcctaaaagaaccgccgtaagaagtgcaagtccggctccgcagtatatccatcccatctttctaaagcttttaactgtctttaagagccacggaactgcaatagttaatattgttcctgcaactgctattgcaaactgtttaacacattttgcataatcaagtcttgctatcattacaaagcccactgccatgagcatacacatattattgacaagcagacgtgatgctttaggataaaaaatcatatatatcattataactaccatgaaatatacaagctgggcaaaatacatgaatatatatttcatatcatcataaacaatatacataataagaaaaccaataaaatgcacaactaccattataatattctgtgtaatatatattgttcctcttttttcctcatttcttataaccgcacccctgtaagctgccagcgcataaaatgccataagaaatgccagtacatacttagataattccaaacaaactgactgcatattaattaactcctctatagaaatgacctttatagtctatatcagacttattattaagaatattacgtatctgttctttgctttcatcatcaaactcatatctgtacgagcttacagacatatcatcaagtacatcttcttttgacaaatcaaatgcacccgctctggttacagtataacagaaactgcatacgcttttaacaatatactccctgtctgtattctgctttaacaaggtttctttattttttttatcacattttccatatgtttttcttacacattgcttagaaaccatcaacggtgccctgccatatactataagctcactgccttttccacatacactttttaactccgatgcattaagctcatatggcaatgtgtattctttcatattaaggtctgcattttccaaaatgtcttttaattcattttttgcatatgtattaaaaatataaagaccagcatctgttattatatcataacaatttctgttattttttaaagatagtttttttctttcagcaagtaaacctgcctcttcaagatttcttacaagatatcctttaaccttaccttcaaaatgagtatccacataatcaaacagactgcataaaagttcatgattatcctgcgttaatatatacggaagtccaatataaagctctatatcagaagctgctgctgcttttcctaacgctttggaaaactcatcttcatcacgataaaatatatcaaagtcaatatatactctctttacattttccgtcataagaactgtatcaagatgctgcacattatataaatatacacttttaaaacattctttttctttatgctgcaccccatcctgtttatatgaatcatttatttcttctgtagcagttattttacagcttctttgatgcacttctataagctttttatcaagctgcaaaagagcctccctgcgaagcttttttatctcactgactggcataaatatatcactatctataacaacttctacctgtccagctatataaccggtctgtcccatcattaaaagcttgttcttaatgttttctttagttgctgcctgttttgatgcctgctgtacttcttcaccataaacagtcacataaacatccttactgcttattgtaagttccgctttttctccctttaaagccttaaaataaatatcgacagaaatacatgtattgcaatcaacatagctttttttaaccagctcagtcagatatgcatttttcattctgttaagcacttttccaacggcaagatcatactttttaggaagattaaccaccatagtctgacctttttttatatcatttccactttcaaagctatgttccttatcgatttcaaaaacgtcctgacggttaatatctgtcagtgccttaaatgtaatctttccttttacgttagacacaacctgaagtgcttttacaccccagtggtttggtctggtaagtgccatcatatctcttcccttgccggtgtcataaaaaccagtagtaaacgctcctctgttatatatatcacaaagctgctctatatccttatcagaaactttatatccttttcttccattagcgatatatttatctacatactttctatatatggaagtcacataagctgcataagttacattcttcattctgccttctattttaagtgaatacactcctgcatctataacatcaggaagtatcttcagcgcacacatatctttcggacttagtgcatatttttcatcctgattatttattatgttctgcccgtcatacactttatatggcaaacggcatggctgggcacaacgccccctgtttccactacgtccaccattaaagctgctcataagacactgtcctgaatagcagtaacacatagcaccatggacaaagctttcaatctccatatcaggatatgcttcatgaagtttttttatttctcccaatgtcatctctcttgatgttacgacccttactgcaccagctttatataaaagaccagcaccctctacacctgtctgtgtcatctgtgtactggcatgtatatccatatcaggaaaattctgccttataagcctcataactccaagatcctggactatgacagcatcaagtcccctttcataaaacggggcaatataatcaatcaattgtccttctatttcattctgcttaagaagtgtattgacagtaagatatatatgtctgtccagcttatgcgcataatcaagtgcctcaaacatttcctcctggttaagatttcctgcatatgcccttgccccaaacatatcgccaccaagatatacagcatccgcacctgcattaataacagccttgcatatatctaacgatcctgctggcgctaatacctctactactttaccagcattattgtatccgcctttattatccatatatgtataatatccggtcatctttcttcctcacttcttatactcaaaatgtaaaataggactgcaggtatatatccccagtcccctttatgtatatattactttcttgaatcttcaagctcagtttcaagcttaactatattattctgaagcttgcttattttgtcttttaattcttctatctgcttatctgctgcctcagcctttatctgttcagctataagctcatgcttcagattatatatttctttatctttgttttctatttccaacgaaagattatctccaagctttttggccttaaagtaatcatccgcaatattaagatacataagattagaacgcacctctgctgactgtcttctaaatccatcatctttagtaaattcagctaacttgttattaatatatgaagctattttctgaagatattcctcactttcatagcctcccaaagtaaataccttaccgcctataattacttccgttgtattctttgatgacatagcatcctcctgacataacatatattagtgatgcaaagctttctgccccatatggtcattatgatttcttcatgacacatcatatattaaagtatacaataactactcttttagttcaataccaagatttgcataagcctttctcgttgccattcttcctcttggtgtcctgttcagatatccattctgtataagataaggttcatacacatcttcaagtgtaccagaatcctctcctattgatgcagaaagtgtctctattccaaccggtcctccttcaaacttattaataatagttgaaagaataagcctgtcatttctatcaagcccctctttatcaacatcaagaagatcaagggcatagtcagccactgcttttgttatattaccatcatacttaacctgcgcaaaatctcttaccctttttaacagcctgttggcaagtcttggggttcctcttgaccttctggcaagctcataagccccttcctcatctatgttcacaccaagaaccgctgcagatctgactattattttctttaattcatcatgtgtataaaactcaagatgattaacaactccaaacctgtccctcaaaggtgccgacagcaagcctgctcttgttgttgctcctaccagcgtaaaccttggaagctcaagtcttatagatcttgccgtcgctccttttcctatcattatatctatctcgtaatcctccatcgccggatataaaacttcctctacctgcctgttaagacgatgtatctcatcgacaaacaatatgtcaccttctgcaagattgttaagaatcgcagccatttcacctggtttttctatagccggaccagatgtaacctttatattaactcccatttcattagctataataccagcaagtgtcgtttttccaagtcctggaggtccatagaaaagtacatggtcaagtgaatctcctctttcctttgctgcctctatatacactttaagatttctttttaccttttcctgtcccacataatcctcaagatgtaacggacgaagcgagttttcgacctttgcatcttctgcaagaatctctgttgatattattcttctttccatattcttttctcacctctcattatccctgactttaagctcacacatcagtatacatatgactctacattatagccagacccttaagtgcctcttttaatatctgctctgaattcttattctggatattttcaacttttttgacagccgctatggcatccttactgctatatcctaaagatactaaagcctccaccgcttcgttcataacgataactgtgttatcctgtactgtattttttttgttattattgttaacggccatttcaaatgcatcctcaagccttaacttatcttttaattctataataagcttctgggctgttttagcaccaacgccaggacaactctttatcagattgacatcatctgacaaaacagcaaaacgtaaatcatctgtacttattgctgataatattccaagagcgcccttaggacctattccgtttacattaagaagcagtttaaacacttcaagttcatcctttgaaagaaaaccaaaaatctgcattgcatcctctcgtacgtgaagatatgtatatattctgaccatatctcccactggtgggagactgtctattgtcatagccgatgttttgatattaaagcctataccattattctcgatgacaacggtatcagctgatatttctgcaacttctcctattatatatgaaagcataactttttcctatctataataattatcattttaaaaccatcaacaaatcacgaatcactgcgctgcataccaagacaatgattaataaactgctgggctgttcttcctgatataccgccgtggcttaattcccacttgttagcttctgccatgagttcttcatctgtcatatcaagcccgctctttcttgccagtcctattacaatatcataatattccttattagaaggctttgaatagcatatctgacatccgaatctgtttacaagagacatcttctcttctattgtatctgacctgtgaagaccatttgttgtctccatatcatttctatcattccatgtttctttaataagatgtcttctgttagatgttgcatatataagtatattatcaggctttgtttcaactccgccttctataactgccttaaggaacttatattcaatctcaaactcttcaaatgaaagatcatccatatatataataaacttataatttctattcttaatacttgcaatgacattggaaagatccttgaactggtgcttgtatatctctatcatacgaagtccctggtcatagtactggttaacaatagcctttatacttgttgacttacctgtaccactatcaccaaagagcaatgcattgtttgcctttcttccctgaacaaagttctctgtgttttcaacaagcttctgcttctgtatttcatatccaataagatcatctaaaacaaccttatccatattattgattggatggaatacaagaccatccttttcatcacttgatattctgaatgccttattgagaccaaacataccaacgccaaatgctttgtagaattctgtcacctcatcaaagaattcattctcattcttagttctttcaagcctgctgctaagctcccttaccttttcacttacatttttattatacataagctctttttttacaatagctttataattggaaatgatagaaaagcaatcgattcccagcttttcttctatttcactgaaatcataatggaaaagattgtaaaacaccttaaaatcatttctggcaaatatgttgacacttccgtcattagcaccaaccttttcacatgttatactgaatggattctcattagtaataaggaagtatgtaaggtaattatgccagagattgttatcaaagccataatcagttgccacctccagaattcttttaatctgtgtatatatatctgtaataagctcttcttttgatgataaattattatcaaaacgattgaatatatccgccattgatgataaaatactattgttgtcaagattaccatacattattaattttgatatttccttatacataacttgttatttcctttcagaattattaattttatataatatatcttaaatatgcgttgcattcaagaattaatgctgtatcatatataataacatacaaagtatgaattttgtcaatttttttagaattattagtcaatttaactattgacacctaacaaactaatgatataatctgtaaagaactttgcaaaagtttgtaaaagttttaacaggcttttatcttttatatttagtgaggatttcaaatgaaaatcgtatcagatgtcaatgcagttttatacatattattaactctgttttatttctatcagggtgtatacgtactaattgctttgattggaaaaaagaaaaaaaataacataaaagaagataatgcggcacttcacaagtacgcattcattattgctgcacgaaatgagaatgctgttatcggtaatctgatcgacagcataaagaaccagaactatcctaaagaacttattgatgttattgttgttgcagacaactgtacagacaataccgctgaaatatcacgccagcacggtgctatagtatatgaacgttttaacaacatacttgttggtaagggttatgccatggactatgtctttaacaagataaaagaagaacatggtgactatacatgctatgatggttactttgtatttgatgcagataatgttattgatgttaactatgtcaaagagatgaataaggtgtttgacagtggctataaggttgtaacaagctatcgtaattccaagaactatgataccaactggattactgccggctactctctctggtttataagagaagccaagtaccttaacaatccacgtatgatgattaaaacaagttgtgcagtatccggaacaggatatcttgttgatagttcaatcatcaaaaagaacaatggatggaaatgcaaccttcttactgaagatattgaatttaccgttactaatattcttaatggtgaaaaagttggatactgtggaaacgccatgttctatgatgaacagcctactaccttcaggcagtcctggaatcagcgcatgcgctggacaaagggattttatcaggtattatttaagtacggcaaggatttatttataacaatgttcaaggaaaaaagaatgtttgtatcatgttatgatatgattatgactcttgctcctgcaacattacttacacttggaactattcttttgaatgttgttttacttttatgcagtggttttaaccctgtacttttcaagcagatattttgtcctactatagcagctatacttttcggtttctttaacttctatatgatgttacttgttatcggacttataactcttataaccgaatggaaaaagattcttgcacctggaagaaaaaagataatgtatcttttctctttcccactatttatagctacatatattccaatcagtatagtagctctgtttaaaaaggttgaatggaagcctattccacatactgttgtaaagactattgatgatttatctatgccacagtacaaagaatgaatataattatacatataaaacatagttggttttcaaaataaaaaacattgctgttttaactgacagcaatgtttttttattcatacaatatgtatggattatcttttgttctcatatcatatatactttcaagccatcttataacaccagccttagaccttccaaatggtgttttatggctgcacatgaaattcttcgcctttactttcttaagcacctctatttcttccttgagaatcccggtattatataagctttgaaagcccttttgcattgcatataatccatcaccaagaaagcagtattcattatttacctccagtgctatacttcctttcgcatgacttgagggtaatggaaagatatgaagtactgattttccatcttctatataaacatcatcttctattatgctcccaatatgtgtatgcttatatgtcaatcttccctggtaaatattgcagcaatcaagcttttcacataactgtgtaatatttcctatatgatcctgatgaaaatgtgataacacaatatttacctttttaccggcttttgtgccctgcaaaacagaatcaccactataatcacagcattctgtcctgataaaacattctaacatatctggtatatctggatggtttccaacatcatacagccatactgcatctttactatttattatgacaacatttgcagataacggattaactgtcggctgtatatatgatatattatcatctaatctggtaattcttagttcatctttaaacagacacattatcttctcatccccataccacagctcatgcctgtatcattatctggtatctcagatatatatcttgcattaaattctgcatttacctctgatatttcctttttaccatctatatagtccatgaaatactcaagtaagtccattccactactctcgcagccttcacactcttcccattctttaacaagctgaattctttctgactttgttgtatcttttattaatatgcttttcatcgtatctacctccatttatttgatgcttttatttcgcgctgttaacattaatctcagttcactactttccttacatgctttgcaactatacctgataccactccgattacaactcctgtaaacacaccagaaactataagaacaggcagatagaaaactatagcctcacttcccataataaatactgctgctattatctgtcctatattatgcataacacctccgcacacgctcacacctatgcatgaaaagaaatcaagttttttcataattatcataatcgtaagactaagcgctgcacctgatatgctgaacaaaaaactgttaacattaccaaaaagaagtgaagtcagtactattcttaacaggttaatcactatagcttccttaacaccaagcacatatagaatcgtaataactgctatattcgcaactccaagttttataccaggaactggtattggaactggtatcacgctttctatataactgaatatcatggcaagtgctgtaagcacaccacataaggctatcttttttgttgatatacgggtatacatttatatgcttctccatttcactttgtttttatgctgcatgtatgattattttactacagagtctatggaatcgtcatccggacttcctttaatctctacaacaactctgtgtggaagacacactatagtttctcccaccctgcttattttacctgtcttaacacacagctcatctggacagtcagcctccgtcatactaacctttccatcattgattacaaccttattcactccaccctgatatccattgacctcgatggttgtttccccactgttaagatccagtgtcttaatcacttttccatcaaccttaataaccgcataactgccatcttttttaacagcaaaattaataattaaaaatgctgccgcagctataataaccatcgacagcaccagaataatatctctttttaatctgactttattatccaatgctttactccttttatttgtgacactcacattatataatagcattttatattaaagtcagcaacaactaacttcttaaatcagcattaaatcagtaatcttatttactcattatttcttgccgttttaaactcttcttttatctgcttaagcagctctggatcaacaagcacatcacatatcgaatctgcaattatccttgctgcataaccaatagcgtcatgtgccgcctcactctttcctgcctttaaatagctttcagaatgtggctgtgcatcctcatctgtaaatgcaattcttatacatgaacctggaacttcataaagcacatttccaaagtctgtagaacctgtcttctttcttggaggtgctatagcaggtgcatgctcatactctgcatttgccataagaagatcattaaccttatgacacactatcttactcttaaacggaagatccctttggatttcgtatgtagtatctgtcatgagtgctgcacctttaagtatattataaaatctctcaacaacctcattaagatacttcgtactgtatgaacgcagtgtatattccgccactgttatatcaggcacaacattaggaggtccacctgcattacggattgtataatgcatccttgtatcatccttaacatgttcccttaacatctcaatagcatggaatgaaagcaatgccgcatcaagggcacttctaccctcttcaggacttatagctgcatggcttttaacaccatgaaatgttactacaaaattctcaagtgccatacatttctcatcaacagaagtactaggtgaaccatgtgacataaatgcaagatcaagttctttcatatatcccttatcaagcataacgatcttaccaccaagtgtttcctctgctggcgttccatataccacaagctcatacggataatctttaatacattcttttactgcaacagcagctcctattcctgtcggtccctgaagatgatggccacacgcatgtccgattttttcaagagcatcatactctactagtattccaagaacaggaccaccctcaccattcttataagatgccctgaatgctgtttcaagcccggttccacgttcaactgcaaaaccttctttttccagatatttacataacatttccgatgtcttatattcttcaccacttatctctgcaagatcaaatatcgtatctgacatctggcaaagctcagacttatgtgcatctatcacttcacctagcttcttttttatattatctgccatattttataattactcctctcacgcaatccctgattaataaaaagtgctatgtataatgtacctttaaaaggcatatcacaacataacacttcttataacaccttaattaatatccaatcactaacgcgcctaacataaatatacatccaagtgctgtccatataaggaacagaggcatcataaacttaagccacttgctatatggaatcttggatactgcaagatatcccataagtgatgatgacataggaagtactgagttagagaaaccatcacctaactggaatgcaagtactgctgtctgtcttgatataccaacaagatctgaaacaggaaccataagtggcatagtaactgcagcctgacctgttcctgatacgattacacagttgataagtgactgacagataaacatacctactgcctttatagaacctggaaggaaattcacaaggttaactattccatatacaatagtatcaagaatatgagcatcacttaatataacctcaactgtacgtgcaataccgattataagacatccaactacaatacccttagcaccctcaccaaattctttagctatcttacttggtccatatccgtagattaatccacagattacacccatgaatatgaaaagtcctgacatttcttcaaaataccagcccttctttgaaagaccatatataagcagtccaaaaccaagtgccataacaacaagaacacctatctgtcttcctgtaagattatctgttacattatcaaatgtatactcttcatcttcctttattccatagattacgctcttttcaggattagctgccacctttcttgcatagcatattatatatatacttgttgcagcaatcagcactacaagaacaacaattctgtatgccatacctgagaataatggtaattccgcaatatcctgtgcaactccgacattgaatgggttaagtatacctgctgtaaaacctactgcagcgccaagtgctatcatggcagtacctgtcaccttgtcaaggccaagaaacagtgcaagtgttattccaataggaacaaaaatcataacctctgatgacatacccattgtaaatccaaatatagagaataaagttaaaaatacgggtataactacatacttatgctttgaaaatgtcttagaaagcttcttgcaaagtgcagtaagtgcacctgtagaagttataacctgaaaagctccaccaattattaacataaatgtaatagtagatgctgatttaactatacctgtatatatagcttctggaatctttaacagattaagcggacttgattcaatcctgtgataacttcctgcctcaactaaagtctttcctgttgctgcatccttgtatcttgcaaactcacctgccggcacaatataagttgctgcagctgcgataataataatcactacaagaattacaaatgtatgcggcgttttccattttttcttttcttttgcctgtgtttccatgtgtgaatcctttcttaaaaaaataccattactcattttcatatgcatatattacaatatctgctttatatgatgtcggggtcaaaagcccccgactttgatacctacgaattgttccgtgctacgcactcccacaattctccccgatattcgcatatcgtgggattatcatcccacttttatgctcatatcggggcgggtcccaaggtctttcacccacctatgagcaagctcatgtggggttataccttttgaccctggtatctttatatttatatataaatgagaaatactttcaaattacatatttattctaatatatactcattcaaaagttaaattgtatgtttttataaaaagtataaatataatttatactttagtaggaatatcacatatgtttttatgcataagtttttacttataattaattcctgtaaattcctttgtaagccttatccactccatcagctccatgcgctgttcatctcctttacggaatgctgctgaaaaaggaatcttaagtgtcggatctccgacctgtaacacgactgaatcagatgacagcttcatagcagaaagataactgttaagtgtaaatgcaataccataccccttctcagcaagacgtatacctgcatctatactgcttattttataagtcatctctggtaacacatccgcataaaacagtgcatcctcttcaagctgtcttatgctctgattactatgctgaagaataaaccgttccttgcttaccatagaaagatccagccatggatatatacacgtatccagccttttcacgcttagaactgccgggtgagattttgtaaggactgcaacaagacagtcctcataaatagtttcatatgataaccgcgtattactaacactgttatatccaaaaaacatatcaatgtctccactgataagcttttcttcaagatcagacaaatgtccatcaacagcatatacaactgactgtggatacagctgattgaattctgtcataacagaaggaaacaatgcttccatctgccgtaccatatatccaatctgcagcttaactgcaacattctttcctatatcaatcattctgtcttcaagttcgaaacatttcatagttatctctcttgcagactttacaaactcttcaccagcatatgtaagaatcattcttctgccttttctttcaaaaagctgtattccaagagagttctcaagacgtttaagctggatacttaacgctggctgtgataaaaacaacgcatttgcagccttagtcagattgccatagtttgcaatagtaagaacatattgcatatctttttctgttatcatacaggtcttccctttcatgttgacatcttttcttctgcgctcattgtatctagaatttcttaagatatcctgcaagtaaatctatagtctttttactttctggcaaaaatggatcaaacacactgaatgcatgcgtaagcctcttatcctttggaaaatctacaaactcatattcttttccagcctctgctaatgccttctcaaaatttaatgtatactttcttaagtaatcattgtggcttgtcacaagccatacaggcgcaagtgactctataagttccttattatccgggttcacatacttaccaaatgctgactttttataattctttccatataaataccttggaagaaacattcctatcttatcaaacttagttgtataaaacattccgcttataaagccaatcgcgttaatatgtaaatctgaaggcttaacacctgctgcctttgctatttttttattattctgaattgcattggtatacataataagacacgcacctccgctgtcacccaccatgtatacgtgcgattcatctccaccgtctgtcctgatacgcccacttatataatccatggccataaacacatccctgaactggtcatatatcatacaatccggaataaggcggtattctatgctgtatacaagaaatcctttcttacacaacaaagaacaaaaatatttattaaagcctttgtttcctatgatcagtccaccaccatgaacattgattatcacaggaagaacttctccttctctgtcctttggacgatatatatcaagctggtgcgaaggattgccatctttggtataagcaatattttctgtatattctacaccttctggcattgtaagcttcttatctctttcaatacatgataaatcaaagtcttttctttgcctgtagaactgtttttccattatatttgtcattgtattcctcacgtataaatcataatatcgcatatatcttaaccgattaatgtcaggatatcaataaatatttttacatattccaaaaacataagtaaaagaatttaaatattttccataatttaaaacatcctaacaaaccagcttactacgctcagccataagccactccacaagtctgtccatgccctcacctgtccttgcacttattggcataattatagcattaggattaagttctctaacatactgtgtgaacttctgtatatcaaaatcaaacacttcaagagtgtctattttatttacaagaataacatcacacaccgaaaacataagtggatactttagtggtttatcatcaccttctgggactgacaaaatcattatattacgatgtgctcctgtatcaaattcagccggacatacaagattaccaatgttttcaagaaacaatatatcaatatcatccacaccatattcacttattgcctctgctgtcatcgcagcatcaatatgacacaacccaccattatgaatctgcatagtctttacacctgttgcatcagcaacccttctggcatcaatatctgactcaatatcaacatccatttcacctattcttaaatcattcttaatcatattgataagtcttgacaacatagtagtcttgccgcttcctggcgatgacataatattaacgaagaatacattcttatcatttaacatacgacgtgtttcttccgcctgattatcattatgtgaataaacactttcatttaacttaataactctgacatctgacattttaatctccattcttgtacataattaaatataaattatttcttcaatatatttccaatctgattgcccatctgattctaaaagagaatcaatatattttctatatattaaaatgcgtcttttcataattcattctctatatatatttatcgttcttagatgaaatgttaacaagtccaaatgatattacaaacaatattacaacgaatattaaaaaataaaatccacctataacattctccatagttgctataaaatcatatgaaccatgtaaaagtgccggcattacaacgctgcatatcctgaatatcttagcactaaataactttccacgattatactgctttctggcaagaccatagaacacacccataaacacaccaaagcatgcatgtcctggaatagcagttaccgcccttactatagctgttgaaaagccatatgataacacatagttgatattttcccaaagtgcaaaaccgagtgcaacaaataccgcatatacaaccccatcatacttacagttaaactctggattatcccatgtctgtttctttaagaatatatacttggaactttcctctgctattgcaacgattacgaagtaaagaattatctgatatagccacgtattctcaggaacaaagcatgacaaaagccattctcccaccttttcttctactaatgcaagtaaagtagatataatacctgccacaacaagttttcttaaaaggtagccgctttccttttctatcctgtccgacctatataccttcaccataagaaataccgccggtataacagctgctaatattaatatccagttatacatcataataggttctaacaaaaaataaaacatatattcactccttaacatgtattctttcacagtaaactacttgtaatagccctgcagctctttaccatgaaatatgataaaagctaatcattctacctcataagtatatatctcacacttcctgttaacaagcccattcttaaacaccaacacatgttctttatatgtaattgagtcctttgagtacataaatggctcttctctatacaataaacactcatagcccgcttccttatagatattcatagccttaagagcctttttatgaacattctcatactgtgcttcttcttcactgccaaaccgcctgtttacatacttgtcagcctctttcctcacatccataataagcttatctacaaagctgctatgcacttttctatgaaacatagccgcaataatattacacttaaatatgtccggttttttcaaataactttcaagcatatatgccatgctcttatcaccaacatattccgctgtttctataagataactgactgccttcgaatatatattatccggatatggtacataatacttatccggaacagacttatacttcttaatcggaggaaagtcggcaagctgcataaatacaagctctttcttagtacatgagccactccccagatacctgtacttatcccttacatctgcaagctgatactcaagctgccttaaatactcatatcccttaacccagaaatgtcccatacagccataattaaaataataagtcctaatacgaagattagtaaatcttattgtaaatatattctctccaccctgattaactataagcatgtatccatctgcaagcttttctatccctgctatctggtcacagtcaatatccttatattcacctgtcattaccgaattctcaaatacgaaatagctttcaactgaatcattcataaggtaagctgcatatatatcatcctcaccttccatgtgaataggttcaaatacattaagttcaaacacctgtgccagctttacaaactcttctggcatatcatttgtcagtccatcaagatattccatataataatctatgttatcaatcattattaaatccacacctgtaacttaatataataatgtcatgattgcctcattgcttgcaattcacgcaatcatatcttaatagttactttttaataacttctatcagcaaaatacgcattttctatatatttcttaatatcgccaatattatcataatgtgcaagtgtccacataagcttcatagtcagcgcctctgttgtcatatcacctgacataatgacatttagtttggccattgtctgtcccacctcatatacattaaggtctattccctcatatatacactgtgttgttataacaactgcaacccctgcctgtataagttcataaatctttcctgctatgttattgttattaccttcatttggaattccacctatgccaaaactctctatgataacacctttatagttgtcttttatataatcaaatattcctgttcctattccaggaaacattttaagcagcataatatcctggcacatatccgtatccaggataagactgttatcaatgtcattatttagtttattcttatactttaaaggttccagtacttcattataagttattcttccatgcttaatatgtgcaataactggataattgatactcttaaatgcatcagcattccttgtttttactttcatcgcatgtgtaccattaataacgattccgtcaaataccacatatactcctctaatttcctcacatgcaaagcggatggcatctgataaatttttcttagcatctgtatacatagcttctataggtatctgcgagccagtaaatacaacaggtttagaaagattcttaagcatataggtaactgcagcagcactataagccattgtatctgttccatgtgctacaacaaagccgtcatagtatccataattatctgccactgttttagctatacttttcatcaatgctggtgtcatattggtactgtcaacattcataacagatattccatcaagcttacatactgtttttatatctggaatatacgaaagcaagctgttaacatccattgatggagcaagaccatcctgtgtttgtttcgatgcgattgtaccgcctgtagctattaataatattcttttcatatctaatttcttatattttccctttctattaatattgtgtcaggtaatgggcaaattaaatcaccacaccacagcaatggtcgatttcgtgttgtatgacttgtgccgtaaacccactatacttcccatgttgtggcttaaaattactatcaagataatcaacctctatctcatcatatcttatgcaaggtctgacaccatctaatgataaacaaccctcttccgtcttatattcaccagacttcttagttataacaggattaatcattgcaaactgaaatggacctgatgccacaactattattgacttattcacacctatcatatttgcagccattccaacacatatttccctatttgctcttaacgtatctatcaaatctgtcacaacctgcctgtctgcttctgttgcaggctgtgcctttcttgcaaatatctgctttccttttacaattttcttaaccataattatatcttccttccacagacatattaatcctaatattccttatcaatattgccttctattccatacatttctttaaatttttcgatatccgctagcgtttttacaagcataatatcttcaattttgccagtatgaatatccttaaatccagccacctgttcacccgtacatatgctggttttaattaccggtttcgtatgctctttatcatatgaatacacttttgttttctttttaaacaaacccatatgacttatcactcacattctctatatattttcgcttaatattttactgatattttcggtataatttgtttcattattacacttcacagaggctgtcacaatctaataaaattcagttatgcctaagacacacacctatcaatttatcaagtattgtcacattttaatgaaacttagctatatctgaaacacacacttattaattcatcaagtatagtcctattttaataaaatttagttatatccgaaacactctttctcttaggcatctgcgcatcctttgtgccatatccaactgcaataactgaaaccgcctgctcattttctggcagattaaagaactcccttattgcctcaccatcacgaattcccataatcagtgtatcaagtcctaattctttagctttaagaacgaaattctcgttttgcagtccaaggtcatagtaaccccagccgttggcacattcattaactggctctcctgataatctgtcaaatccaacacagttctttacaaatgttgttacaacaagagctgctccctctgaattgttctggttgaattctggcagacacttatgtctgaattcttcaattttttcatctgataatatgcagtaatatcttgatgtctgcaaattcttccacgaaggtgctaatatggcagcatttataatagtttcaagctgctcctttgtaaccttcctttcagcatcgtaacttctcatacttcttctgctattcaatacttcctgtaattccataataatcctcatttctacgcatatttttgtacataacgagtttgtgtcaagtgcgcacagacataaatctcgcgtgtgaaaaatctatttttcacaccaattcacttttatacaccatttttaataaaattttgtatcaagtgtatactgctgataaaacagcaaaaacaataaactatgatttatttcaaatattttttgatgattttacttcaatatcttcttaatctgcttttcagtcgcagacggatacaatatgttcatatgtgcaactattttctgccacgaagcttctggcttttccttataatcagaagtaacataatcatatccataaatatgttctattgatgaataaacagccacatcccagccatattcttcaccacgtttattaatacgcttcctaaaatcacagttacatatatacatctgcatcataagattagcaacagcaccatcaaatcctttttcaccatctttgccgtagccagcctgtttctttaattcattagaaaatatttcgttatctgcattctcttccataaaatgcttcataatctttttatgtttaagcggtgcttttccgtcctcgtataacgcatcaaaatcgtatccgtcacgcctgtaattagcaaatgcaggaacccattttcttgatataaaacctgccttttttccaaaaaactttccatagattatatcgtgctgtcttgctataaccgcacgccacagccacgggtcatattgctcatcatcacaccaccagtactcaggtgctgtccattcttccagagaaaatccttctatttcattcttaaacagaggcagaaaaccaacatcattaatgtgttcgattgctttctcaactgtatgtatacacgctggattgtcccactcaagtccgtgcataatccattcgcctgattcatttcccatatattttaccgcccagtattttcatatttatgatgtcagtgtaaaaattcattttattacacattttaaaataacttatcactctaactagctgatataaccttttgcaaaaattcttcgataatatccaacacatcatcactaaagaattcacttccaccgtggtcagctccctcaagcaaatataaattcacatctttattatatttctttaaagcctcatacacaacgacactgacctttggatttattgtacggtcctttgttccgtgaaacattaatattggtggcattgaaacattttcacttatattacactcaaccgacatagctctgcataactcagtattattacgcaggtcaacgccacccatttccatttcttcaggactgtctggctgatgatgatttagtgtacttggcataccatcctcaagcattacactcaatgcaccatacagtgatattatacctttgacactggcatcaacgtcaggatatatattcatatcggcagactctttaagataaatattaacattttcatcttcattaataagctgcgagaaaaatgccgtatgtccaccagaagaatctccggcaacaaacatctgattagcatctgccttgtactcttttgcgtgcagtttcatatatcttatagcatttcttgtatctatagcctgcgctggaaaaggagcaataccagaacgacgatattcaacaaccgcaatcacatatcccttttctgacaaccttgcaagcagaccaagctttgcattgatattctgcttcatccacgccgacccctgaacatacacgatacaaggatatacctcatcactttcttttgtatttcttgtctgtggcgtgataacctgcaaatgcagtgtcgttccatttatatgcgcatattcaacattagaatatatataagttcccttttcatacccgcttgtaggaattcttgtaactctgtctacaggcatatcaaaagaagggtattcttcatatgaccactcttttacttccataagttatattgcctccatttttttaatttactctaaaatctgcctgctgctatatccatttttcttaaaatctgaaaacaatacgtccattttcactggcattacacatataagattaagtggtgactccattttctttaacgtttctataggtattttcttaatcttggcgtgttcattatatttatcagaaaatggttctatcagttcagcttttcccataacctgtacactcttaagcctgccaaatccatcatatttatcgaaaatagcaagacatacattttcattcttctcaagaccgataaacttctctccaccctctgaaaacatccagaacttatcattatgatagctgtattcaatcggtgtacatcttacataatcgccagttcctgttgcgagcgcacaggtattgttagaagctatatattcttcaactgcttttttaagctcttctttgggcattgctgtcatttccttattcttccaataatcagctgcctttttaaattgttcgtgtgtcataaaaatacctcccaacataaataaaagagcgtgactattaatcacactccctcattatagcattattcaccaaaatcaatatctactgctccatttgcatatttcatatactcaaaaagcttaggcgctgaaagaagtgtaagcggatctctttcgtgctcatcatattcaaacatctctgccgcctgctttatttcttcattagaaagtgaattcatatactctcttaattccattactgtcatattaaaaagttcttcctgactcttcatcgtttaattctcctatcttatatatcacattcgggattattatacacattcccatctatacattaattataataacattgtacacaaaatatattatgcttcaaaactatgcatacatatattattaatctccataccccgtatatattaccttgccagtattccataactcagctgttttcttcgcagcttcaagcttgtcttcgtcattattatatctgaatgttgctgactggcatccacaatccaggcaagttacataaaaaccatggtctacttcctctaataaagaaggtcctaaacatcttggacaatcctgtaggtctatcatttcataaatttccattttataatacctctcttagctgttctgttatacttgattcaagctcagtaaataatattatatatgatattgggtgattttaaaagggtatctttattataaaatttctttttgaaaatttcttttgatgaatgcaaagtacttaatatccaataaaatctatcttaaaccatacaaaaaaccgccagtaaaaatgtcattcccaacatttccaccagcggttttataatttcaattcaaatctgactatcccacagcctattaataattaattctgcttatgaataatcttcttaggacacttctcagcacacttgccacagccaacgcacttagactggtcgatgtgtgcgatattgttctctacagtgatagcaccatactcgcactgctttgtacataacatacagccgatacatccaactgaacatacctgcataacatccttacccttgttctgtgaagaacagttaactgcgtaagatgccttgtatggaataagctcgataagatgtcttggacatgtagcaacacacttaccacaagccttacacttttccttatctactacagctacaccattaactacgtggatagcatcgaatggacaagccttaacgcatgaaccataacccatacatccataagtacatcccttaggaccaccattaggtgctatgttcatcatggtacaatcctgtacaccagaatatacatagttattcttagccttgtcacagtctccgccacacttaacgaatgctgtcatacgctcctggcttcctgcctcagcacccatgatagctgctatctttgctgctaccggagcaccaccaactggacatgcgccacagtcagcttcacctgctgcaatagcctttgcaagtgcatcacaacctgcgtatccacaaccaccacagttgttacctggaagctctgctcttacatctatttccttctggtcaacctcaactgcaaacttctttcccataaatccaaggaagagtccaagaagaagacctgttacacctacggcacaagccgcaataataatacctgtcattattcaatatcctccttagattattcctgaaaatccgaaaaatgcaattgacataagtcctgctgttaaaagaacgataggcattcccttaaaactttctggaacatcattgtcctctgtacgctcacgtacaccagccattattacgatagctattgtaaaaccaacagctgtaccaagaccacttacaaatgattcgattaagttgtatgaattctgtacatttgttaaagcgataccaagtacggcacagttagttgtgataagtggaaggtatacaccaagtgcctcatataaaggtggcatacacttcttaagtaccatttcaacgaactgaactaatgttgctattacaagaatgaatactactgtattcaggtatgtaagattaagtggtgttaatataaaatcatatataagactgcatatgattgatgatatagagataacaccgataactgcgccacccattccggcagctgtgtttattttctttgatacaccaaggaaaggacacagacctaagaactggcttaatacaacgttgttaacaagcgctgtgcttatagcgataactaataaattcatcttttactctcctcccttagttttctttttcttcatctgaaacatagtctggaacctcagcaggcttcattccatgctttctctttactctgttcataacagctacgcacatagcaagtacgaagaatgcaccaggtgcaaggataaatatactagctggtgtataaccaaagttagaaagatctacaagtgctgaactacctgttgaaaggattgttccgccaccaagtaactctctgattgcaccaaggattgtgatagcacatgtgaaaccaagtcccattccgataccatcaaacattgatggaagtgctggattcttagaagcatatgactctgcacgtcctaagataatacagttaacaacgataagcggtatgtagataccaagtgcatcgtatatagatggcacaaaaccctgtaataagaactgtattattgtaacaaatgatgcaacgatcacgatataagctggcattcttacgctgtctggaataacctttctaagtaatgaaatgaaaaggttagaaagcataagaactgctgttgtagaaagtcccattccgataccattgattgctgatgtagtaaccgcaagtgtaggacacataccaagtgttaaaaccagagtaggattctctttgataataccattataaagtctttcaacacatttattcaactgaaacacctcctactgtcttaacattagccttagcaaggtctgcatatacagctaatgctgcattaacaccctttgttatagccttagatgtaactgtagaaccaccgattgcatcaatagagctgtctgatgatgaacctgttccatctgttactaccttatattctgaagtcttagttccgttaaactgtgctaagaatgaaggatcctgcttagctctcataccaagacctgctgtttcacttattgtaagaatagatgttccaagatatgttccatctgttgaaagtccaacagagaacttgatatctccgccgtaaccatcatgtgcaataactgttactacgaaacctataatcttaccattcttaataccagcaactacctctgatacatcatccttagagaaatctgttgcagaagctgcaagtactgccttagctgtttctgccaccttatcagaagcataacttccatcaagtgcttcaaacttatcagcatcagcaataacctcctggtaagccttctgcttagccttctcgttctgctgtgcgatagggtctttagttacattatatacaagaccaagaaggatacctgcaacaagtgtaattgcgaataatatacacgcatcttttattatattcttcatcttatgcagcctcctttgcctttttttccggcttcttcttgccaaatgacttaggtactgtaactctttcgataagaggtactaagaggttacagaagatgattgcgtatgaaacgccttctgctgaaccaccaaacattctgaatatgaatgtaagtaaacctaagcagacaccgaatactaacttaccattaggtgtgataggtgatgtaacataatcagttgccataaagaaagcaccaagaataagaccaccaccacagatttcctgtaacatatacatagcatcaaactgatgtcctggtgcgaaaaggaatataagcactgcaaatgttccaatgtaagaaagtggaattcttaaagaaataatctttcttacaacaagatatatagcaccgataagaagacatataactgatgtctcaccgataacaccgcttgtcttaccaataaacatagtaagaagtgtaggggctgtctgtcctacaacctctgaacctggctttaatatagcaagaggtgtagctccagaatatgcatcacatacaaagttagtcattggacctgtatatgcaataagaaggaaacatcttgctgcaagtgcagggttcataaagttctgaccaattccgccaaacaactgcttaacaataataattgcaaatacacagccaacaatctcaaaaccaatgtttagagttgatggaatgttaagtgcaataagaagacctgtaacagcggcactaaggtccataactgttatcttcttatgcataaaatactcatatactgcttcagaagccatacacactacaataccaactatgatacgaataagtgcctgaactccgaagttataaataccaaatatactagcaggggctaacgctataagtacgtctctcataatagtctgagtagtatccttgctacgtacatgtggattagttgatacgttaaaaatctcgctcacttttaatcctcccttatttctttcttctgttagccagaacgatacttctcatagccttaatctgctgtgttaatggtctcttagctggacagacatatgaacagcttccgcacattacacactccataccatcaaacttaacgaaaccagcttcatcgttcttagctgcaaatgaagcaagcttagctggaagtaaatggcttggacatccttcaccacatcttccacaacggatacatgctgtctcttcaagcttagatacaacatcattctggaatacaagaagtgatgagcttccctttataactggtacatcgagactgtacatagcaaatcccatcataggaccacctgatatgtacttctctggttcgccaactacaccaccgactgcttcaagaagctgtctgtagttcatgccaagccatacatagaagttgcctggttctttaacaccatcacctgtaacagtaacgattctcttagtaagtggctttccttcaataacagccatatatatgctgtatattgtatctacgttatgtacgatacatcctgcatctgctggaagcatagttgagttgatgcttctgcctgttgtagcatagataagactacgctcaccaccctgaggatacttggtctttaaaaccttaacctcgatatctggctcagaggcaactgctgcctgcataactttgatagcttcaggcttattatcctcaataccaataatacccttagcgtgatcaaaaatgcttaatgcaacctttaagccgagtacaatcttgtctgactcttcaagaagtcttctgtaatcggatgtaaggtatggttcacattcagcaccatttactataatataatcaattccttctggattcttagggcttaactttacgttagtagggaagcctgcaccacccatacctactacacctgcatccttaattctttgtaatacttcttctttagaaagttcttctaacttcttaggagtatactcaacttccttaaattctccatcattctcaatgatgattgaattgcactttccacctgtggcaagcgttcttggctctatagccttaactgtaccagaaactgatgaatggatattagctgatacgaatccaccagcctcggcaatcaactgtccagcaaggacgtaatcacctttggcaactactggaactgccggcgcaccgatgtgctgtgaaagtgggaaaaccatctctcctacagcagggaacaactcttttataggcttatcctttgataattccttgccgtcatatggatgtattccacctttaaatgtacactttcccatgacatatttctccttataaaataatatatgttactgcttagcactatacttaatcagatagacaatcacaaaaaagaaaacttcttctgtatgattatttacctgattatgtgacagttcttaacagtaactaatatattaatataatatatcaataaggattaaaaatctacttttttttgcgtatatattcgtatataataaacaaaaactgatatttttttaacgtatttttagtatatatatcatttttgttaattactcaatcaatataatgtaagatgctaaaaacagaatattaaaagaaaaaggacaataattacatgaaaacaataacacagacaattgatattaatataaataaccagctctgtatcaaagataatcttttctttgatatagaaaccaccggcttttcaagaactggctgtttctgctatcttatcggagtttcattcaccgacggcagacacttcacagtaatccaatggcttgctgaaggtgcctctgatgagccattactgattcataagttctgtgaacttgcagaaaatttttcatcaatcatacatttcaatggtgacaattttgatatcccatttttaacaaaacgtgcagccattcataatataccgcttaatcttgataatatgagaagcattgatttgtttaagcacgctaaaggacttaagtccatcttaagacttgaaagttataatcagacaactgttgaacattttcttggaatacaccgcaacgatacatatactggtggcgaactcataaaggtatacaaagaatatataaaaaatgaccagcttccagctaaacacgctgacagagaaaagcttcttctgctccataattttgaagatatatgcggtcttataaagatttcttcaatagtaagttataataacatcataaacaagcatatatcttacaaagatatagagtatacacctgcctatgacattgcagatgaagctaagcagtctgataatatatccagtacagcttatataacactttctttttcattaccagaagaacttcctgtttctgtgttactaaaggatgaatattatgtattaagagccgaacattcaacattaaaacttagattgcctgttatcaccggcattttaaaatacttttatccaaactataaagactattattatcttccatacgaggacaccgccatgcacaaaagcattgccgcatatgtagattctgaatgtaggattaaagcaaccaaagaaacatgttacacaaaaaaacatggtacatttatcatgattccatcatattcaggtgatatgaccgtatttaaaaaagattataatgataaaaatgtatatcttatattagatcctgaatctacggataaaactgtatcagattatgacactgaggcaataaaaaatatgctgtccatggatatcatccatgaaacagcatatgcaataattacttttttctataaaagaacagttcattatactcataaccaagatccttatagttaataatctgttctgtattaccaacaaacaggcagccaccctgaacaagcgacttattaaacttcttatatatatcgagcttggcatcttctgtaaagtatataagaacattcctgcacactataagatgacagccctgtggatatgcatcctttaaaagattggactttttaaactcaacacattttttaatatcatctgatatcttataatacctgtcacccattttctcaaaatatttattcttatattcatctggcagtcctttaagactgttagctgaatatacgccatccttagccttctcaagcacctggtcatctatatctgttgcatatatcttaatatctctcattggaaccttctttgcaagcaccatagccagggaatatggctcatcacctgtagagcaggcagcactccatatcttaagtcttgttccgaatttatttataagttctggaagaattatatcctcaagctttttccacagtgcagggttcctgtagaattcagatacattaatagtaagataattcacgaattcgtcgagcagcttggaatcagattttatcgccttgatataactttcatatccatcatacttatttcttgctataagtgtatctattcttcttttcatctgtttttctttataagcattaagatctatacttgtaatactgaacacctgttttttaaagtcttcgtaattattaatcataatatattcctctgttctttccgcaactattcacgtatatattgctttaccttatattcgttaatagtttatcacactataataaatgtgtcaaagatagttgtacaatcaataaaaaatcaatagccaacaataataaatcaataataaatataaaaatatatttgtgcatttacagtttctattttaattattaaagtattatgatacagtattctacatggatgtaatgtaaagcacagaaaacagaaaggatttttactatgaatgaagaggacttgttaaaaagaaaaattttagacaccgctaatcaggcatttaatcataatatatatacatataccaactttcttagcataagtgagctttcagttgttaactcatttaaaaaagacttatcttttattgatcatgatatatatggtggcagtccgttatgcgaaaggcagcttattcgttttggttctccaaacttatatggctatgatgctggctatccgataacaaccttaaagattgaaccattgtctgtaaagtttgctgaaaagcttgaccatcgtgattatcttggtgctcttatgaaccttggaatagaacgggaactcataggtgatattattataaaggaaaccgatgcctacgtattctgtatttcacacatttctgattatatatgtgaccaccttgacaccgtacgtcacactcatatgcgttgttccgtctgcacacatgaagtactagctttaaagcctgaacttgaggacatacgtataatcgcagcttctccacgaatagatgctgttgtagcttctataacaaaactgtcaagaagcagttccggtgagttattttcctctaaaaaaatatatgtcaatggccagtgcatagaaaacaaaagcatgcatttgaaacccgatgatattcttgttatacgcggcaaaggaaaattcatatatgttggggatgaaagtgaaacaagaaaaggaagaacatatcttaccttaaaaaaatatgtataggcattttgtataggaatttataaacattcattttttataacatataatcaaaaaagattccaatagttataaaaccactggaatctttttatatacttattcgtattatttattattcttctgtctgaacttcttcctgctctgctgcatcatctgatactgccttcatgcttaagctgatcttcttctcagcttcgttaaggtctacaaccttagctgtgatttcctgaccaatctttaatacatcttctggcttgttgatgtgttctcttgaaatctgtgatacatgaagtaaagcatcaataccatcttcaagctgtacaaatgcaccaaagtctgtcattcttgctaccttaccagtaacaacattacctacagcatactttgtagatgcatcattccatggattctgatctggatacttaacagaaagagcaatcttatcaccattgatttccttaatgaagcacttaacagaatcaccaatcttgtataccttcttaggattctctgttctgccccatgacatttctgaaatatgaaggagtccatcaactccaccaagatcaataaatgcaccaaaatctgttacattcttaactgttccttcgattgtatcaccttcgtgaatcttagaaagtaattcttcctgagctgccttcttagctgcaacaataagctgcttgcaatctccgataacctttctgttcttaggatcatattctgttaatacaaatgttacttccttaccagcataatctgagaaatcctttacatatgaatctgaaacaaggcttgctggaataaatactcttgtttcatcaacaacaacttcaagaccacccttgataactcttgttactgttgctgttacaggctcattgttattaaacgcttcttcaagcttcttgcttccgttgtctgcgacaagctttctatatgtaagaagtacctgaccttctccatcgttaagcttaagtaccttagccttcatctcatcaccaacagaaacaactgttgtaagatcaagccctggctgtgatgtgtattcacttcttgtgataataccatcagccttatagcctatgttaagaacgatctgatcatctttaactgctattacagtgccatcaacaacttctcctgtatgaatttccttccactcttcgttagctaacatctctgcaaaattctctgacattagtataaacctcctcaatgatattgttcggggtagatgccccagctgtaatacctatgctgtttaccagattaagactttttaagtccagatcttttagagtttgaatgtaaaatgtattctcacattcgcctttacaaatctcatacagttttcttgtattggaactactcttgtcgccgataacaatcattgcatcaactttctgtgcaatatctcttgcctcagtctgacgttcttccgtggcattacaaatagtatttttaatggtaatattgtaccccttttcgtcgataatttcaactaattctttaaatttattgtaattaaatgtcgtttgtgatacaatcaccacttcttttttgttatccagctgcatattctttgctttttccactgtatctatcacaagaaccggactatgtgaccatcccattataccttcaacctccggatgcttctcattgccgattatgattatctgcttgccctttgcactttcttcttcaactattctgtggattttaagcacaaaaggacatgttgcatcaactatttcgtatttttttgccttaatactatcatacacattctttgatacgccatgtgaccttatgataactgtagcattatcattcatgccttcaatctcgtcaacatctgatattgcccttacgcctttgctttcaagatcctttacaacttcctcgttatgaataataggaccatacgtgtatacattttccttatctgtgcgttcatatactgtatcaactgctctatgtactccaaagcaaaaaccagctgatttcgcaagaataacttctatttttgacatatctgctaccttcattttattctcaattcttgcgctgtcttttgcgcatctcaagtttgtgcgtaagcacaaatcttgcgtgtgaaaaatcctatttttcacactattctcaactattaactatttttaatagctttatctataatatctctcattgctgcaacaacctgctctatattcatattggatgtatcaagcagtatggcatcatctgcctgtttaagtggtgatatttccctatgcatatcctgataatctcttttttcaatatcttcctttatatcattaatatcacattgctcacccttagcagccagttcatcatatcttctttttgccctcgcatcagagcttgctgtaagatatatctttacaaatgcgtctggaagcactgttgttccaatatctcttccatccataacaacatcagaagtctttgcaagctgtctttgaagctcaacaagcttgcttcttacttctttatacttagatgttcttgatgccatatttcctgtctcttcagttcttaaaagacctgtcacattctcgccattaagtattacctgctgttctccattctgatattcgatactgatatcaacattatctacagcagcattaatcgcattttcatcatcaggatcaatattattctttgtaaaatacacagccattgctctatacatagcacctgtatctacatatatgtatcccatttcctttgaaataagctttgctattgtacttttaccagctcctgctggtccgtctattgcaactgaatatgccataattcctctccttgtataaaaaatttttattctaaatgtgatgcagctgcatacgcacttgaccatgcaacctgcagattaaacccacctgtaacggcatcaacatcaagcacctctcctgcaaaatatacattttgtacaaacttggactccatagttgatggatttatttcctttacattaacacctccctgggtgataatagcttcgttaaatcctcttgtgccagtaacagtcatctcaagattctttataagatgaaccagccccagtctttcctgctttgtgatttcatttaccttcttatctttatttatatcactaagccttactataaccggaataagttttttgggaagtaatttatctaaagaattcttatatgctttattcttctcttctgaaaaatcccttaatattctttcatccaactgttcctctgataatgctggtttaagatcaactataagctttagcggtcttttccttaatatagctgttgtatagctgcttgcgctaagtataaccggaccacttacaccaaaatgtgtgaaaagcatctcgccaaaatcgctatatacttctttcttattatcaagaatactgatagaaatattcctaagactaagtcccataagctcagatgcccattcttccctgattgtaagtggaacaagtgcaggaataacaggtgtaactgtatgtgacatattccttgcaaatctatatccatcacctgttgaacccgtacttgaataagagttgccacctgttgctataatacaatagtcagcctttaacagacgttttttatccgaagttgtctctttatactcaaccccaccaaatctcttagttccatcctctatatcttctgtaagcacgtcaaggacctctgtgttaagcatgatattcactttaagcttacgcatttctcttacgagtgctgatataacatctgatgaatgatcagactctggaaagcatctgtttcctctttctatcttgaacttaagtcccagttcatcaaaaaagcccataacatcatagttggaaaagcccttaaatgcgctgtacataaacttgggattggttacaacactctgtcttatatcttcttcatcaccggcattggtaaagttacatctgcctttacctgtaataaaaagctttttcccaggcttttcgtttttttccataagtgtaacagtatgcccatttctggctgctattatagcagccatcatgccggcagcaccaccacctattattattacactgctcatatatatcctttctttttaaggaaatcatgcctgttcattttcattctgaacaagaagctccttgaaatatggaagttccaaagcccagtcacaaaatgtatgccattcagcaagcttatgatttcttcttgaataatacatacccgcaagattctcataattaaatgtacatgttctcatctggttatagctttctggcaatagctgaatcatactgtaccatagattcttatcctttgtttctacaaactcctgacgtattgtttcaagaaaatctatatttttctgcatcatatcaagtgctgcctctgtacaatggtcaacactgaaatcactcatttcaaatggcttgctgtgaattttgtgcattgtacttgttgagttggcaactgttccaaccttatatgtgtcatattccttccaccagtatattggtgctgttatatctaccgttacaaatatctgtctaatgaactttctatggtctgaacccgccttacatagtctttttgcaaggtctaagtcattaggaccaaatgtaaatacaccattctctgttttgctgtccattcttgcccagctgttaagagggtttcttgcacctctcatagcattttcaaaattcatgacttcatatctttctaacttaatcatctaaacatactccattattccgctatgtcattatgctggtcaccccaaaacattatgtcatagcagaatttcttttattttattatgatgacagggactaatgaattccatccccggatgctgcctacgaggtattctctctttattattttttcctcaagcactactcattacttatggccatcctgtatagtgactagattacagaaggttctttctaagctctgctccgtccttagcactaagatatgcaggtgcaatatcaaatactgtcttgcagccgctctgaccttccttataaagacgataagctgctcttgcatatgctacgataacgcaggatgtgaattccgggttagaatcaagctttaagctgtattctataacgtggctgttttcattattccagcctgtctttcctgtgcggataacgaaacctccatgtggaattccactgtggtttttctttaattcttcttcactgataaaatgaactgttgtatcataatcagcaaagtaattaggcatgttcttgattgtttcctcaacctttgcagcatcagcaccttcctctaatactacaaaacattctcttgtatgtttctgtcttgttgtaagatctggattctcaccgtttcttactgcctctagagctgcctctacaggaatcgtgtactgcttgccatccttaacgccttcaacacggcggatagcatctgaatgtccctgacttacacccttgccccagaatgtataatccttgccatctggtaatatagcattggcatacatacggttcaaagagaacattcctggatcccagcctactgatataattccgatatgtccgctcttcttagcagcggcatcaacattgtcaaaatgttctggaattcttgcatgtgtatcaaagctgtcaacgacattaaacatctctgcaaaccttggtgtctgaactggtaaatctgttgcacttccaccgcaaagaatcattacatcaatcttatccttccactgctctatatcttctaccgagcaaactacagcttccttagttaatatagaaacactttctggtgaacgtctcgtaaatactgctgctaactccatatccggattctgcttaatagcgcactccacacctctgcctaagttaccatatccaataatacctattctcatatcattcctccattttatatattctaactatgtatttcatctaattagtgcacgcaaacacttatctaatattactttttgatagctcatatgtcaactgtcattttaatgtaaacttaatatcatatgtgttctcctaatcttctttactacatcaaaaatgagatgattactatatattatacaatacataataatcatctcataattatttatcaatattaaaccagttatgctattaaactggatatgccttattagctgtatcagccttagctgggtcaaccttcttctgctgtgcttctctatacttgaagaactctgtagcaactgctgggaataatgcgtatgaaagcacatcctcatcctgctgcttgtactgctgtacaactgggtcattcttgaacttctcaagctgtggctcaataaggtctgctggacggcatgtgataggtgtagcatcacctatagccttcttctgtacttctgggttaaatggcttgattgtctgtccgaattcacccataagaaccttcttagattccttagtaatcatcttataacgctcgccctgtaatacattaagaacagcctgtgtaccaacaatctgtgatgatggtgtaacaagaggtggttcaccaaagtccttacgaaccttaggaatttcctcaaggactgcctgatacttatcttctgcaccagcttccttaagctgtgatacaaggttagaaagcataccaccaggtacctgatataataatgtcttgatattaacgccaagaaccttagtattcataagacctgactttaacgcttcttctctcattggctggaagtaagcagctatctctgcaagaaggttctggtcaagacctgtatcgtactctgtacccttaaatgcctctaccataacttctgtagctggctgtgatgttcccattgagaatggtgacatagctgtatctatgatatctgcaccagcttcaactgccttcatatatgtcattgaagcaacaccagatgtataatgtgtatgcatctggataggaagtgaagaaccatcctttaatgcctgtacaagctctgtagccttagcaggaacaagtaaacctgccatatccttgatacagatagaatctgcacccatatcctcaattctcttagctgtttctttccagtagtcaagagtatatgcatcaccaagtgtatagcaaagtgctatctgtgcgtgagcattaggattttccttcttaacaagcttaactgcctcaactgatgacttaagatttcttaaatcattgaaacagtcaaatattctgattatatcaataccattagcaatagacttctgcacgaaatattctacaacgtcatctgcataatgattgtatccgaggatattctgtcctctgaataacatctgtaactttgtattcttaaaaccatctcttaacttacgaagtctttcccaaggatcttccttaaggaaacgaagtgatgcatcaaatgtagcaccgccccagcactcaactgaatgataaccaaccttatccatcttgtctatgattggaagcatctgctcagttgtcattctagtagcaataagtgactgatgagcatctcttaatacagtttcagttatctttaatggtttcttaacctgatctgccatcttaaactcctcctatatatttctatatataaagtaataaattgattatgagagggtcttagccctcaaaatctgcaacattatagaagttgccattgcaacttctaatgaatttagaaggtcttagtctgcataaccacaagcagctttaaccctctggaagttgcgatagcaacttcttacggacttagagtgtcttagctcgcgtattctgcgagcttagagcctcttagtccgtttttacatgacaccaaacatcgccataaatgtacccgctgcaaccgctgtaccaataactccggcaacattaggtcccatagcatgcatcagaaggaagttagaaggatctgcctcagtaccaaccttctgtgaaactctggctgccataggaaccgcagatacacctgctgaaccgataagtggattaaccttaccatgtgtagctttacacataatcttaccaaatacaacaccagctgctgtaccaaagcagaaagcaataagaccaagtgcaacaatctttaaagtatcaagattaaggaatgcttctgcacttgttgtagcgcctactgatgtaccaagtataataactacgatatacataagtgcattagaggctgtttctgtaagctgcttaacaacacctgattctctgaataagttaccaagcataagcatacctacaagtggtgctgttgttggaagaataagtacaacaactattgtaactacaatagggaaaagaatcttttcaagcttagatacaggtcttaactgttccatcttgacttctctttctttcttagtagttaataacttcataataggtggctgtataataggtactaaagacatatatgaatatgctgcaaccgcaataggtcccatatacttagtctgaccaagcttacctgcaaggaagattgatgtaggaccatcagctccaccgataatagatatagctgcggctgccttatctgggaatcccataaatatagccattatatatgctgcgaatataccgaactgtgccgcagctcctaaaaggaagctcttagggttggcaataagaggaccgaagtctgtcattgcaccaactccaaggaaaataagtgatggaagaatactccattcatctaataaataaaagtaatgtaataaaccacctactccgttacttgaatcttcaatagataacattatatcagggaaaagattaacaagtaacataccaaaagaaataggtactaaaagcagaggttcatattcttttttaatcgctaaatacatgaaaaacagtgcaaccagaaccatcagatagttaccccatgtgaggttaaagaatgctgtctggtgtacgaggtttcccaatgttgataaaatatattccattttttacctccgtatattatttctacacttctagattgatatatatatcaattagttcatagaaactaatactttacctgactctacagaatcaccagctgcacattcaactgttgcaactgtaccatcctgtggtgcacaaatttcattttccatcttcatagcttcaaggataactaatacgtcacccttctttacagctgcgcctgctgctgcgttaaccttaagaatcttgcctggcataggtgcattaaccttaactgcaccctgtgcgcctgctggtgccgctgcctttggtgcagcctttggagctgctttaggtgctgctgcctttgctgctggtgcaccatttcctgttccttcttctacagtaacatcatatacattaccattaactgttattgtataattcttcataattatttcctcctgctattaacctttctgattgaacgaacaacaagtccgtctgtagatgtattctctgatgctgcaatagctgctgttataactgcaacaagttcaaggtcatcaacctcttcatcctgttcttcattagaaacaatctgggctattgcattattaacaccctgagcatctgctgatgcgttattcttagctttattcttattctcccaaacacttatatacttgaataagccgattatgaatgaaataaatataagcacgataaatactgtacccatacctataattgtgttcataactgccttatacattttctgtcctgttgtatatgatggattgatagcaccattttcaagtgagaaatcatcatttataacaaattcaaaagatactttatcattcttctcataagctgtatcgactgttatagtacataacttaccagtatccttgttaagtgctatattgatagttccaatactcttaagtgcaccaagttctcctcttgtactattccagctgttataaaagccaatagtctttgctgtaagaccttcctgatccacaatatactgcttgccattaaccaatgcaagtggtaatgctgactctgcatcagatgttatcttagctgaatcattctggtcaagatatgtaatcatatcagttgtccagtcttccaaatatgactgatacacctggataatcatattcttacgttctaactttgcacttgttgttgatatagtaccattagatgaatcgcaggctgtcatgcagaatacacatacaagcagtgaaaataacactaagaactttttgatattaactttcttcatattatcacctctttattatactgtaccatgcttcttatctgcacgaacctctcttttatcaaacaacatttcaaatgctgctacaacatactttcttgtgtcttcaggattaataatagtatcaacatagcctcttgctgctgcctggtcaacacttgactgtaaagctgcatattctgctgccttttcgttaatagttgatgtaacatccttagaagctgcgatatcatcagcgtacataatcttagctgccaatgaagcatccatcatgccaatactagcctgtggccatgcatataccatatctgcacctattgattttgaattcatagctacataagcactaccataagcttcacctgtaataatattaaccttaggtacatctgcattagaaaatgcatatacaagcttagctgctgctttagctattgttctttctgacttaactgtagcttcaaagcccttaacattagtaagtgtaagaactggtatttcaaatgcattacagaatgtaacaaactcagctgccttataagcacctgctgttgtaagtactggtgcaaattcttctgccttttcaccattctcatcataaagagctgttctgttagctactgcaccaactgtaacgccatcaacaagaatgaatcctgtaaccatctctttagcatattctgccttagcttcaacaaatacaccatcatctgaaatatctgtaagtgcaagtgcaggatcagctatttctgcttccatatcctggcatactctgttaagatcatcctgattatcagtacatactgtaccctcagcattattagatggaagcatagatacaagttgtcttactccgttagcgatagtttcttcatctccaacaaaatcaacaacacctgcttctgccataaacttagcacttgatgtatcaagctttgactcataattgccatctaatgcattaggactgttaacgaataacttagcctttttttcttcaacaaatacgaaatctgaaagttctgcaagaacggcaagacctccaccacattcgccataaacagctgtaatctgtggaataattcctgaagcaagtgacatattcttatagatttcaccaaaaccattaagtgcatctgttgcttcctgaagtcttaaacctgcgcagtcaatcagacctaccacaggagctcccattttcattgccttctcataaaggctggcaatcttcttagcatgcatttcaccgatagttccgcctaaaacagaagcatcctggctatatacatacacaagatttccattaacaactccataacctgttattacaccatcagatggagctttcttttcctgcatgttaaaatctgtagctctggctgtaactctggctccgatttcaacaaaactgctgtcatcaagaatagcttcgattcttgataaagcctgtgtagtattactcattatcgagacctcctctttaatatatattgcttagtgcaaacaaccattgtttattttataacaatcaaccatttatttcaagtaaatatttgtatcattccttgtgatttttaatgttttttttagatttttcattaattttgcacagttttaatctgtcgtttcaaatatagcagccaaccccttatggattattatagaagcctcatcattttcaatctcattgctctgacatatactaagtccctgctttaaaatgtatttgttaaggcaatatttaaaaccttcaagtgttataacaacctcttcactcatcggaacaatagaaacatattttccatactgttcctttttctttattaagtgcatgccagtgtcattatttacaagatatatacaattatatttatcaactatgtggcagttcactcctgagtccagtgcagctttcatatttccgatattagtcattgtatgatccatccttgttcctatcgcaccaagtatatatatatcagaagccccattttgtacagccgtcattattgcaagatgagtatcagtataatccttttcacatggatatacttcaaaatcaaccttttttttatatctttcaagcacacgttcatcgaccgaatcataatcacctagtaaaaagtcaatatccagtccaagtctgtcagcatacataaggcctctgtctgccgctatacaatagtcgaattttttatctgcaagccattcttttgcccattggatatctacataaccacctgttaatatcaaaactttattcatatccgtcatcttaaaccttccttattctttgttttctctttattattttgctttgaaatatttttcatatttcatttatgttctttaatttttcacatttatattctataataaatcaaacatgtagtaaaacattttatactttactaaacaactaaacaaggaggacattatgagtgaacataacattcattctgatgatgagattgaattaaaaaaagagactgcgggtattgatgacagtgtaacaggcattaacgaacttggaagcaacgaagcagaaggaaatgaacttcttatgcactctgccaatctttacgaaagcactgaggacaaatacaaagacaacttatcatcagccattacatttttcgtatgtggtgcagccggtataataatacttatacttaacgatattggtattcttaaactagtcgtaaagggaagctccaacttcatacttattaatattgttctgggattactttttattggctttatagctattggcttctggtctttaaagtattctaaaaacatcaagagcaaggctgctattgaaagcagggatactgatactatcttagcatggcttaaggataacgtaagcaaggatgatatagaagcttcttatcttgacgacattcctgaggaaatgaaatatttcaacagaagcgactatatcaaaaaggctatcagtaaaagctttcctgatacaagcgatgatctcttagatacaattgcagacaaatatattgacaacttatttaacgaataaataataagcgggaacacatatcttatgcatgtgttcccgcttaactttatttacaatcagtttaaagttttaatatattattacttattagaaagatattcatcaataccctttgcagctgctttaccagcacccatagcaagaataactgtcgctgcacctgtaacagcatctccaccagcatatactgcttcctttgatgtctgtccattatcttcttctgcaacaatacactttctcttattaatatcaagtcccttagttgttgatgaaataagtgggttaggtgatgtaccaagtgacatgataactgcatcaagttccataacgaactcagaacctggtatctcaacaggctttcttctgcctgaggcatctggttcaccaagttccatctttacgcacttaattcctgtaacattgcccttctcatctgtgagaacttctgttgggttagtaagaaggtcaaatataataccttcttctttagcatgatgtacttcctcagctcttgctggaagttcttcctcgcttcttctgtatacaatatgtacttctgctccaagtcttaaagctgttcttgcagcatccatagcaacattaccgccacctacaactgcaactttcttaaacttcgcaataggtgtatcataatcatccctgaatgccttcataagattgcttcttgtaagatactcattagctgagaatacttcgtttgcattttcacctggaatacccataaatctaggaagacctgctcctgaaccaataaatactgcatcgaagccttcttcattaagaagctggtctatagtcattgatttacctataactacgttagtttctatcttaacaccaagctttttaacattttcaacttctgatgcaactactgtcttctttggaagacggaactcaggaataccatatactaatactccgccaggttcatgaagtgcttcaaatatagttacttcatatcccatctttgcaagatctcctgcgcatgtaagtcctgaaggaccagaacctattacagctaccttcttgcctttcttttctgttggcatctcaggtgcaacattgttttctctagcccagtcagctacgaatctttcaagctttccaatagatacagcctcacccttaatacctcttacgcactgtccttcacactgtgtttcctgtggacatacacggccacatacagctggaagtgctgaagactttccaataaccttatatgcttctgcaaaattaccttcttttacattatgaatgaactcaggtatgtttattgatactggacatccctgaacacatcttgcattcttacaattaagacaacgagttgcctcttcctgtgcctcttctgcattatatccgaggcaaacctcatcaaaattcttatttcttacatctggagcctgttcccttacaggaacctttttcataacatccattattatacctcttttccatcgattaatcgcgtcactgttcacaagtatataatcaaacagtaaccatgcttcttaatgaataccaacaattaattacagtttccacatccaccatgatgagtttcaccctcaagagcagcaagcatagctctgccctcttctgttttatatgtctgctgacgtttcatagcctgatcaaaatctacaagatgtccatcaaactctggtccatcaacacaagcgaacttaatctcatcaccaacctgaagtctgcatgctccacacattccagttccatcaaccataataggattcatacttacaactgtaggaatacccagttccttagttaacagacagacaaacttcatcataatcaatggtccgatagctatacacttatcatacttcttgccctgtgcataaaggtctttaagtacatctgtacccataccttttcttacatagcttccatcatctgttgttatatagagattgccggcaacagccttcatctcatcttcaagcagaataagatctttattcttagcaccaacaataacatctgcatcaactccatgctcatgaagccacttaacctgtggataaactggagctgttccaacaccacctgctatgaatactatcttctgcttctttaattcttcaatatcctcatggattaattctgaagggcatcctaaaggtcctacaaaatcactaaatgcatctcctgccttaagatgtgacatcttttctgttgatgctccgactatctggaatacaatagtaattgttccagcctctctgtcataatcacagattgtaagaggaattctttcccctttttcatccattttaacaataatgaactggccaggttcacagtgtttagcaactcttggtgcttcaacatccataagaaaaatcttttctgctaatttttcagccttaagaatcttgtacattataatacccctttcagtgttatattatatctgaagtgctaatcacacatcaaaacctatttatagctattagtcctcttacgttatttaaccattaatattcagaagaactgtaagagccgtttgaattagttactttgtaacatgttccattcttgattcctattccataatacccttcagtagatgtctttgatttatctgtaacatcaaaccttacgatatacatctcaaccgaatcaactgttgcttttggctgatatacaaaagtcacctttctgccatcactggtcgtattaccatctgacttaagtacaccatccgcaataagtctgttttttaatatttcaaggcactcattatatgaaaatgtttttgccttatttatcacataatttcttttgactacagaacttgcctgattatgtgaatctattattacaactgatattacattgttgccttcaggaatatcaaagggttctgtatactcttccgagcctgctgttggtgtcgagccatccagtgtgtaatatgctttacttccaactgggatattgcttatagtcacctgctgtccctctgcatatgttccagattccggactaaccgttggtgttgatggcttcttgtagtcaacaacatactgaagctcaacaacatcactatatactcctattgaattaacagctactgctttgatagtagttgttccattcttaatctctatcgtatcaccattatattttgtacttttttcagttggctcagatttatcctgcgtataatatattgttgaagaagagctttctgtaaattgcagcttaacctcatcatcataagttcctgcttcaaccgatggtttaggattctcaacaacataatccgaaagatacttataaccttctttgtttttatacgactttatcagtgtattaagtgcattgccatcctttttttgttcatatatagatgcaagctcctgtattgacttctgattattctcatcataagacaggatatctttaagtgtttctatctgcttatctgtattattctcttctttatagcactcatataatgtatacttaagctctgtgtttttcttaccttcattgagcttagctgcctttgaaagatacttcacagccgaatcataatcattattcttatagctttccatacctttttcataattatatttatatgattctttacttctgttatgaataactacaccggtaataatacctataagtaccagaagtgccgctataccgcatgaaactcctattatgattttcttttttttatcatcactggcagttccaccagccacatgtttatctgaatcagcatgcttatctgaatcaatatcagaactaacatctgaattaacatctaaatcaacatccaaattaacaccagaatctgaattcttaaccgggatatttctaatattatctctcacttcatcaacgttatatacacctgttttctgaacatcatcatcagatttcgtgagcatatctgttgtaactttaggtataaccttagtcttacccatctcaatgtctgtatcttgtgaatcttttgcagctgtgttttctgcagatgactctttctgattatcaacaaatgctttagcgacactggtttcttcttctacaagtctttccaatgatttcactaactcatcatccaattcatctttattatcaattcccatatagacattcccatcctttatattttaacgtataaattctaacatattgatattcaataatcaataaattaaaaaactaaacttgcaaagttttgcagcctttattttacattattttattttctttatttttattgtttttattattctttcataaattgtacatactttgcacacaaatattgaatatactaataatcagatagtaagttaattctttctatctccccctcatattaaaataaagaacagctgtcagcttattggttggcagctgtttctttattttaataatatgatgtcatgagcaaaagtaaattctgccactcactgatgttaccggattgcttggcaataaagctatcatgacacatcagttatatcagttatatataacagctatctataaaaaagcagcagccatattatcatagctgctgctttttgtttatttattatcttatattagtaactgtaaccacacaacttaaagtcttattgttaactgtagctgtaacagttgttgtacctgctcttctacctataacttctccagaagaagatactgtacacactcttggattactgcttctccatgtgattttatcttctgtacctataacatcaagattatatctgtcatactgttcaattcttatattagatgtactcattgcaagtgaatggactgtacaagaagcctcaacaccgctgttattacttattacaaacacgtctgctgtaccaggtccaactgtagttatgactccatcctgatcaacctgaacaattcctgtatctgtcgaataccactcatatgaatcattattaacaactggtctgactataactgatagctgtcttgctcttcctgttaacatgtatatttccttagagttaatcctgagtgatgatatattaacaactggtgttacatatacccagcatgttcctgtaatattgttaccatcctgtgatgtagctgttaccttacacttaccagtgccaactgcaaatatctctcctgattcatctaccactgctacagattcattagatgatttccatgttacatctttaatcgtagcttcatcaggtgtaatcaccgctgtcgcccttactgaatcaccaataagaagtcttactgtatctggttcaacatataaacctgttacaggattaataacccttactatgcaggaagcacttactccacttccatcaaccgctgtagctgtaataactgcactgccaacgccattggcacttatattgccttcctggtcaacataacatacatcattatttgatgatgaccatgttaaatttttgtttgttgctgtatctgaaccaactttagctataagcgttcctgttgcaccaatgttcatcagcttatcagtttcactaagttcaatagttgaaacatattccttaacatctatagtacatgccgctgtaagcttattgacctctgtagtgacctctataacacatgaaccacccttaagagctgtaacaacaccgttctcatctaccgatgcaacctcagggtcacttgacatataagttacgttcttattctcagcatcatatggttcaacagtaggaataattgcatatttagctccaacccacagctgctgataatcagaattaagcttaatacctgttacaggctgtgttactgtaacaacacagaatgctgtaagtccggtatctacattagttgcgataatagatgttgtacctgctcctactgcagtaaccttaccatcactttcaaccttacataccttctcatcacggctttcccatgtaactatcttgttatctgcattctcaggaagacaagttgcattcagccagaatacctgtccctgtcttactgttatatctgttgtattaagaaccacctgagttaccggctgtttaacatatatgttacacatcgctgtaaagttaccatcaagtgatttacaaagaatagtacagcttcctgttccaactgcctcaacaagaccattagagtcaactatacatacattcgtattggaagattcccataaaactgttctatctgatgctgttactggtaacacctcagcagttattcttaatcttccacctatactcattatttcatcagtataatcaagctttatagtttctactggtatattaataataaaattacaggttgctataaatgcaccatcagttgtcttacatacaatagtacaatatcctggctttacaaacttaacaagaccattatcatctactgttgcaacagatgtatcagaagatgtccatgtgacatttctgttaacgccttcacctgatggcaatatagttgctacaagctgatactgtccgagtgccatggatgccctgactgttgtttcattaagctggattccagtaaccggttctcttacatatacttcacaggttgctaccttaagcccatcttctgaaataactgtgatagttgtagagccacccgatataccatttatggtagctgtatagctatcaccttcaacagttgctatatctggattagatgaagaccataataccttgttgttagttggtcctgccggattaaatataacctgtacagtttcagatgagcctctgtctatctgcacacttgatgggttaatactaatctctccaacaggtgttgttatatatacaacacaagtagccttctttataacaccattaatattctgcgaaactgtaacatgtgcaatacctggtgccacaccctttatatcaaatgacttaccatcatcagactgtttaacttcaataagtgtatctgtaggaactaccccggcagcatctggctggttagtaaccgtatatgtaatatcttttttatctggtgaattagtaacaagtgcttcaagagtcttcgtttctcctatgttaacactcattgatgtaagacttattccaaaaccatctataactgtaatatcatatgtgatctggtttttctgcttatatacagtagataactcatcttctactctttgtgcaattatagttgcatgtcctgcacctgtagcagtaacaagtcctgttgtctgatctacctgtacaacactgttatctgttgttgaccatgttatttcagttggattagctgttgtttttaactgaattgtatcaccaacattcatgttgctcacatctttaccaagctttttaaatggaacgataacattaacctcatcatggttagcccatgtcatgtttccgttcatatcaagtgcacctacacctgcgtaagcctttgcaacacctgcatatattcctttaacgctgccatcttttttatatgtcattatatctgtattatccgaaatatatgtaacaccagaagtagctggatattttacatttgatggtatctgctcatctgtaaactcttcaaaattcttagttgataagacaaaatactttgtgccatctgcaagcttctgcactgaatttccctgttcgtttgctttgccttctgtatattcaacctttgaaacaatagaatattttgctgtaagctgcgaaataccatctccatctgctgttcttacagtaagattagtttttccgcctccgacaatcttaagtgttacctttgatgcatcagatgaaaccttttcaacaataccatcctttaacagattgcctgtcttatcattatctgtttcaacaaaaagcttattagtttcacatgtgttagacgaaatctctataatatcgcccacatgatattcattcttctgctcatctgtaagctctactccgttacgtgttgctttaaatttaacactcaatggtactatcacatcaaccgaatcacttccaagagcttgctgatatgtaatgcttccatcaggaccatatatcttcgtataatatgttgcagtcaatgttgccttacctgctttataagcacggataagtggtgatttaacaccatcagctgtatctgctggtttaactcctgcactgtcacttactataaacttgactacattggaatctgatacagtccatttaagatttctctctgtaggcttgtagttatcaggcgaatcctgtccaactatgttgttttcatctcttcctgtcatatctgctacaacatcattgctatcctctcctggattaagaatggtcttatagctttttactgtaaccgttacgctcgaatcagcatttgcaaataccatatatccgctgaatgcccctaaaactacaagtactgataacaatatcttccactgtaccctaagccttctaaattttttaataccactcatatgtatgcctcatttcattaatatataatatatcataattatttacacattatagttttatttaattctacattattttccagaagttttcaacaagtatatcgtcatattccaacaaaatttcagcagattttctttatttttatatattttttcaatataatgatataagtgtcaaaaatataaaaagacgtttctgcctgcagaaaaagacttttttacttaagacacgctaaacaccgaataaaaaggagtattaatatgatctctgtaagtatgtgtatgattgttaaaaacgaacagtctatattaaaaagatgtcttgactcatatgccggcatttacgatgagctgattattgtagataccggctcaacggacaacactaaagaaatcgcagcacaatacactgataaggtatatgactttgcatggtgtgatgattttgctgcagcaagaaattttgctttttcaaaagccagctgtgactatatattaagcgttgatgcagatgaagagctggattttcataataacactgccctacgcagcctcaaagaagctattctgcctgaaattgacattgtacagatgtactacgttaacgaatcggatttcaattctgtatacaatgtccacaaagaattgcgtccaaagcttttcagacgaatacggacattcaactggatttcgcctatacatgaaaccattcgtgtaaaccctgtaatatacgacagcgatattgaaatcatgcacaaaccaacgagcgatcacagcaaaagggatttttccatatattttaaggcactggacaaaggtattgttttagaagattacgttgtcacaatgctttgcaaggaactttttatatcaggagaagcttctgatttcatatcatttaaaaatgcttttgaaaatgtatttccctatgaaaacagaagtgaaaacactttggaggatattaattgtatacttgcacgcatatacaatatcacaggtgaacaggataaattcttcaaaatcgccttgaagtctgtggcagataatccttcatctgaaatgtgctacacgcttggtctttattattttgcccacaaggattacaacgaggctgccatatggctttataatgccgcatttgaaacaaaaagtattcttgatatatcaagtagtggcaaaaagcctctttatcttcttagcgaatgctataagctgctttcacaacaatgtgaagatgattatgaaaaaatacaatacttagaaatgtcaaatgattataaatcacaggcagatagatggtgtatgcctgaattataagttttattgttctttattgtattttattctacagaatattgcatttttccttaaaactttgactaaacttatggattaaatcttatttatatgctaaaatacataagtaataaaatattttggaggtatctaaaaaaatgaaattaaatttaagaccagctgaagagtgtacatttgatgctgtatcattaggtgaagttatgcttcgtcttgatccaggtgaaggaagaatccgtacagcaagaagctttagagcatgggaaggtggcggagaatataacgttatccgtggtcttcacaagtgcttcggtatgaacacagctgttatcacagctttcgctgataacgaagtaggtcttcttatgaaagacttcatcgagcagggtggtgtttcaacagatcttatctgctggaagaagacagatggtatcggacgtctttgcagaaatggtctcaacttcacagaaagaggatttggtatccgtggcgctaagggttgctcagatagagctaacacagctatttctcaggctactccagaagatttcgattttgattacatcttcaagaacaagagcgatggtggtttaggcgttcgttggttacatacaggtggtatctatgctgctctttctgaacaggcttgtgaaactgttatcgcagcttgtaaggcagctaagaagtacggtacaatcgtatcttacgatcttaactacagaccatctatgtgggaagctatcggcggtttagctaaggctcaggaggttaacaaggaagttgctaagtatgttgatgttatgattggtaacgaagaagacttcactgcctgccttggtttcgaaatcgaaggtaacgatgagaaccttaagactcttaaccttgatggttacaagaagatgattaacgaagctgctgctacataccctaacttcaaggctgttgctacaactcttcgtcaggttaagacagctacagttaacgattggtcagcaatctgctgggctgatggtgaaatctacaaggctgctcagtatgatggtcttgagatcatggatagagttggtggcggagattcattcgcttcaggtcttgtatatggtcttatgacattcgaggatgctgaaaaggctgttaactatggtgctgctcatggtgcattagctatgacaactcctggtgatacaactatggcttctcttaaggaagttgaaggtatcgttggcggtgctggtgccagagttcagagataataataatatttattagtaaatcattattaactattatttattatcattgatttaattcagtatttgggttcaaccaaattaacaacaaaaagagttgtccggtggttatccgggcaactcttatattttatgctttttttattcagctgttttattatctgttttttcacatacaaattatgcttcaacttgctttatagatttacttataagatattgtaaacactattttatcagaatataaacctgcatatgcattatcccactcagacttgttaatagatactgtcaatggcgtgctgttaccacttgcaagataacttgctgatgtgaattcactgttaccattcataagcttatatgaaatagttttagatgaatccttgctgttctttaactttccacttgcatctgctgatacccatatgctcttatcaggttcaagccttgcattgtcaagtgtaacatttcctatactactttcagctgtaccacttgctattgttgtacttgcaggtatggtaactgtatatgtcggatcaatcgacacatttattgttgtctgtcttgtttcctgcgcacatactggaataacacttcctattataagcatggctccaagtgcaactgcgctaaattttctcataatatcctcatttctgcacactttaggtaaagaactggtccacgtgtgccataatgccagttcaatatgcaaaagctgatatttttcgcatatattttctttatataaatttctttataaactatagtcctgtaaactgttaataattctttaaatcaatcactaaatcgagttacttagctactatcgttgtttctacattcgctccattcatggcagttccatctgtaagtgatgatgtgctaatctttataacagctttgtactcacctgctgataaactatgattgagctttacgttagatatagctttacctggttcaaccatagctgacttatatatcgattcaccagtatcacttaacactatctcgaatgtgaagtagcatggattaccttcaggattcataagattcatagttacatcttcttttccagctgctattgttattgatggatatcctggaatccttatgctctgctggcttcctgtcgtagccttatccgaattactatcacctgcatttgcatctagtgaaggtgtaaatgcattatcattattgttatttttattattttttccaactaccatgtatataacaagtcctgcaacaactgcacataatgctataatcaccgctatcattatcttatttttagatattttcattaaaattcctcctttttagctggcttttgtatttagtttgtaatgatattattccccgtatcaatgctgcttcactattcagttataaccccacggcaatatgcttcgaatactgattattgcatgcaacactacatgttgtatgtataatatacgattattctctatttgtgggataatttgcatgaattacagctttttcgacatgaacgacaaaaaattttatagaattttaatctgattcaatatataataatatcagttgtaaagggcttatcgtgaataccgtggatatactggtaatatctgcccttgtctttaataactaattatcatttattaatttatataaacatcaacggagataaaaacaccatgaaaatagcagtatgtgacgacagtcttaacgaattagagttaataagaaattttcttgatatatacaggtctgatagcatacagacatttacagtaaaatactttgaaagcagcgtagagcttgcttctacccttagattcgaaaaattcgatatatatattcttgatataatcatgcctgtaatggatggtcttgcacttgcaaaggaaatcaggacatttgacaaagctgctcctataatctttcttacaacttctcccgagttcgctgtggacagctatactgtgaaagccttcaactatcttttaaaaccggtagttaaagaacgcctgtattctacacttgatgatattatcgaaacctttcaccaggaaagtactgattacataatcataaagaatagtaccggaattcacaagatacatacatgcgacataatctatgccgaagctcttaacagaaaagtaattatatacctaaagaacggcgagcagataacatccacagatgtattctcttctatatgtgatacattgactgcccataatgaatttcttcttccgcatcgttctttcatagttaacatgaactacataaaaaccataaacacaaccgaaatatgcctgattaacaacaaatcaattccacttgcacaacgacgtgtaagtgaaatcaaaaaacagtatctgacttttcagatggaaggttaataactaagaaagagggaatatctatggacgaactatctgcaatgctaaatcttatcaattatgtttttgtacttatatttggaatagttgtatctttttacttcgctgatatcacatgggaagataacaaaaaaacaatcatatttacacttgtagcttttgcacttctccaggcaatctgctatgttcttcttggcgaacgcatactttacaaaagctatccatttattatacatattcctctgattcttgttataagatatgtatgtcataaaaacatatatatatcaactattgctgtcttatcagcatatcttatgtgtacaccacgcaaatggtttggtacggttgctgcttatattttcaaggatattcctatgatatcagatattgtaaccattattattacaatacctcttttattcatagtaatcaaatacatttcaccttatataataagacttgagaatgagtcaaagactattatatttatattctttttcctgcctcttacctattatatatcagaatacgcctttactgtatacacagaccttttataccgtggagaagcaattgttatagaatttatggacagctttatcgttatactgtactttttattatctatcgttacacttactattttgaacaggaaaaatgcagctgaaagagagaatattatcctgcttgcttctgctgcacaggcagaaaaagagatttcacagctgtatgaatatcaaagacaggctgccatatatcgtcatgatcttaggcatcatatgaactttttacagaactgcctgaatgaaaacaaatatgcacaagcacaggattatataaaagaaatctgtaccaatcttgataacagccgtataacaagatactgcgataacgaagctgtcaatctcatattatcttcatatattgacagtgctaacgaatataatataactacgcatgtgtctgttactgctggcaatctttcagactacaagcctacagacctttgcagcctattagcaaatgcacttgaaaatgccataaacgcatgtaagcttgtacagactgctccagctgctattaattcaaatcgtattatcacagtaaaggtgtttgataagaataacaaattatgtattaacatcaccaatacttatgctgttgaacccgtatttgttaataatgctcctgtatcggataaagccggccatggtattggtatcagaagcataatatctgtgattgagaaatataacggtgtatatgatttctttactgaggatggagtgttttattttcaggcgtgcatataaatataaaccaacataaaaaggactatcacactgaggtgacccctcaaagttcactcctcaaagttatttatggtgacagtcctttttcattatattaattggttttcaatagttacaagcaccattttcttcttcccataaatctacattagcatacttagacaatgaacctcttgctgaaccccgttatttcttggtatttcatcaataaattcatccaaaaccgttattatcaccttttgatttttcttagcattaattttttccaatgtcttaacagaacttccatcataatatccctgtaatgcaagcataatcagcaccctctttctttatatactaataattatatatatatattacacccacaaaatatctttacagcaactaccaaattagtgaaacaatattgtattctttaatatgaaaaaggttatttactagaaaccattaactacatctcttccggacattccatacctaataaaccgcatgcctcacacaagattttctgtaccatatctgtcaaaatcaaacgtgcgtttttctcttttccttctgcctgcaaaatagtgcaatcatgataaaacttattaaaagctgttgctaacgatattacataccttgcaactacagacggttcatttttctctgccgcattaataactgcatcctcgtaaccagctaatacttttaccaaattataagtcacatcatctgttaaagcctcaaaatcaacttcactaacctctaccattttacccgctttacgcaacacgctctttgcgcgtgcataagtatattgtgcatatggtccggtagttccatcaaagttcaaaacttccttccacgagaaatcaacattcttgattcgctgattaaataaatcatggaaaataattgctcccacgccaacttttttcgcaatttcttctttatccgtcaacgagggattcttttctattatcgcattataagcacgctctattgcctctttcaaaatatcttctgcataaataatattaccaccacgtgttgaaagtttttctcctgcaagactaaccaatccatatggaacatgaatcaatccatcccaccaatcatatcccatcacttcaatagctgtaaaaatttgtttgaaatgaagagattgttctagccctgtcacatataagcacttttcaaaatcatatgtttccttacgataaagaattgcagcaatatcacgggagtgataagtggttcctccatcacttttagtaattaaacaagggggcatatcatatttctccaaatcaattacttgcgccccttgactctcaactagcaaatccatttctttcaatttctccactaatgtcggcaccttgtcacgatagaaactttcacccaaataagaatcaaatgatattcctagcaagtcataaatacgttcaaattcaaccatactgatgtccttgaaccaattccagatttctaatgcttcaaaatcattttgctccatttttacaaaccattctcgtgcctctacaattaagttctcattagtttctgattcatcattaaacttcacataaatacgcagtaattcctctattcccttttcttttaccagttcttcactgctccacaatttgtatgcaacaatcaatttaccaaactgagttccccagtcacctaaatgattgattcgtaccacatcatatcctaacttttgataaatcttatataaagagtttccaattactgttgtacgcaaatgtcccacatgaaagttctttgcaatatttggcgatgaatagtccatacacaccgtttttccgctaccaatctgcgacactccgtgcttgtctttttgcaacgactcaaagcactttttgacaaataaagcacgtttcaagtgaatattacaatatgcccctacgctctctactttttcaattcccaattcagctttctgttcattcaagttttctaccagctcagctgcaatctgcataggatttttacgcattttcttagccattgaaaaacaaggcaaagctaaatctcccattttttcttccggcggaatctccattgtcttcatcaattcctcttccgacatttctactaatacttttgataaatactgacaaatcttctttttcatagtaacctccattaattctgatatttgtaaatagataaaaaaagaaccgcaatggaattagctttttgctaaatctattacggttctgtatctacaacatttataaacagcaaccgcacagaaacaagacgtacacccttgtaaccatgcggaaataaacaatgattacaagagcttacgtcttctttctctacgtcttatactgttcatacaaaatgtgttcatacttttatcctctttaaatttgatatttacgataatagcacatagctcatatgattgcaatacttttctatttttcataatattgcatatcctcattgatatctgaacataattatgcaataattgtgtcaaagaaaggggtgaatatcatgccacttattatgcctattaaagatttacgcaatacaaccgagatttctaatatcgcacacaaagaacaggagcctatttttattaccaaaaacggatatagcgacttggttgttatgagcagtgaactatatgataaattcgcaagaatgaatcacaccgaccaagcaatcttcgagtctgagcaggaaattgctaacggagcagaagcagtcgacgcagaaacagtttttgcagaattggagaaaaaacattttgaataaatacaacgtaaaggtcaaccctagagcaatccatgaattagactgcatttacgagtatatcgcaaacgagaaattggctcctgaaaatgccaaaggacaagctgaccgaattaaaaaagccattttaagcttagatacatttcctcaatcccaccaagagcgaaacgaaggcagatatgccggaaaaggctaccgacagttactgattgataactacatggctatttttcgcatcgacgaaccacacaaaaccgtttatgtagtaacaatacagtatcagggacggaatctataaagaaaacaccaaatgacgctacaaatcatttggtgctttctctgagtcaaaaattatttaccataattctaacgaattctccgcatcaatccacatttgcatagtcccatcaagatacagccttgcataaagtcataatcgactatatatctatcctctatcggataaagccggtcacggtattggtatcagaagcataatatctgtgattgagaattctccatatttttctttatttttcaacaaattcagaaccattaaaataaaaatgtataacttgatttcataacatttcgctttctttaaactctgataatgaagcttctgtatcaccggctgataaaggagcttctgtaccttggtcagttacagtaaattcttgtaccaattactccacacccttaaatatcacatttctcaccggattaagtgcgaataaaagcaacattccaataataccacacacaatgaattcgcttgctccgattgtcacaaagaacatagcaaatatcccctctgaaccataagcatattttaatacaaatggaacaatgagtgtattggcgataattggtggtaagggtgcaagccacttattctttcttaacgcatacgttcctattgcgccgataagtgtagcaatacttccaaatattatatcccatatagctgctccacctaatatattagataacagacagcctacgaacaatcccggtatcgccgctggtgtgaaataaggcaggattgtaagtgcctctgctattctgaactgtataggtccgaagctgcaatagttaaacataataacaagcacaacataaagtgccgcaatcacagccgcctgtgtaataaaggcaaccttaaactgtgtgcttttaatatttctattactactattatttttgctattacttttattatcattttcaggaatacttctatctgtaccctctttatccttaaataatatactcatttttatactcctttagttttgttttttgtgtggaaggtttcgaacacacattattataatcactggatatatgagacatatccactaataaaattccgtatataccacaatctaagacacattataagacggacagaagtgtatatatctgcccgccctaatcttatattatatctttctttatcaaaataatatttattatatattaaagagttacaccctgcttaaatatagctaaatcgtggaagccggcgatttcagcttttaccttcttaccagaagcaacatctaatacaagctggaagagctccttagctgcatcttcaagtggaaggtcatcagttacaattcttcctgcgttgaagtctatccagttgctcttattgccagcgagtcttgagttagtggcaatctttactgtaggcactggtgatgcaaatggtgttccacgtcctgttgtgaaaagaaccatctgtgctcctgctgctgcacaggctgttgaagcaacaaggtcattaccaggtgcactaagaaggttaagtcccttatcagatactctttcaccataagctaatacacccttaacaagtgatgaaccagacttctgtgtacatccaagtgacttatcttcaagtgttgtgataccaccatccttgtttcctggtgatggattctcatagatttcctgaccattcttgatgaagtattccttaaagtcattgataaggtgaactgtcttctcgaaaagttccttgttagcacatctgttcataaggatagtctctgcaccgaacatttctggaacctctgtaaggatagttgtaccgcccttagatacgagcatatctgagaaaagacctactgttgggttggctgtgatacctgataaaccatcagaaccgccacacttcataccaacgataaggtgcttagcactaaccttttctctcttaaatgtagcagcgtaagacataagctccttcataatgccctcagcagcttcctgctcattctctacatcctgaacctgtaagaatttaactctgtctgggttaacttcaccgatataatccttaagaacctcaatacggctgttctcgcagccaagaccaagtacaagtactgcaccggcattaggatggtttataaggtcagcaagtacatgtcttgtgttctcctgatcctctgttacctgtgaacatccgtatggatgtgggaaagcaacaacttcatcaacaccttctggcttgttagctcttgctgtagcttcgattgctcttgctattgaattaacacagccaactgttgggataatccatacttcatttcttacaccaactgtaccattttcacgcatatatccatcgaaaaatgcttcttctgttggctcaacgtccttatgtccttctggattgtatgtgtattcaagaagttcaccgagagctgtctttaagttgtgtgtatgaacccatccaccaacttcaatatcagcctgtgcgaaaccgattctgaaaccatactttataactgcatcacccttcttgataggcttgataacaaacttatgtccctgagggatatcttctattgtagtaacttctgtaccagcaacattaagtgttgtgcccttagcgattggcttaagagctactgcaacattatcatctttattaatcttaataaaatcctgcataactacctcctgtaattaatataatctctatgtaccattaaccacgtacatcatagaattatgaaattcaatgattacattcacatcataacatttttattataacaataaaagggtataaatacacaatacctcttacataacttaagggcggatgaaaaagaacacccgcccttattaatgctttaaaatacgatataaatcaatgccgaaacttatattcagctaaggcttataaatactctgctgcaaactgccaacgcaattatgctaacttttcatcatcaagagctaaatcgttaactacagctctcatacctctttctctgatatctgcaatatatcctgtgataacttcttcaaggtcaagaaccttagtaaggtcttcgccaccgaagaacttagtattgcttaagtaagcatgtgtgaattctgcaggtgtcttaccagagttatctctgaagaaatcaagtacagccttatcatctgtgatgttgtactcttcaccgtttctgtcaccctttaatacaataccgccgttgaactcagcttctgtctgtgatgtatagaagctcataagtgctgcgatagagaatgtaaggtacttaggaagcttattaaacttcttaatatatcctaagaatgaaggaagacatctagcttcccacttagatacagagttaagtgaaatgcttaataatctgtgatctacgaatgggttaaggaatctatcgataacagccttagcgaattcttcacaatcttccttagaaagtgaaagtgtaggaataacttcattgtaaagtgtttcttccatatactttctgataactggatccttcatagagttctctacgttatcgttaccagcaaggaatgatgctaatacgaatgatgtatgtgaaccattaaggattcttacctttctttccttatatggatgatgatcctttgtaaatactacattaagtccagcttccttgaatgggagttccttctcaagctgttcaagtggaaggttagaatcactttctacaacccagagaccgaacacttctgctctgtcgataagctgatcttcatagccccactcttcgcaaagcttagcagcatcttctcttggataacctggaacaattctatcaacaagtgttgggcagaatgagcagtaattgttaacccaatccttgaatccatcttcaaggccccagagttctataaacttcataatgcacttctttaattcgataccattatcagcgataagctcgcaaggaagtaagataagtcccttatctgctgctccgttgaacttctggtatctcttgtagaggagctgtgtaagcttaccaggatatgtcttaggaggacgagcattaggatcgttatctgtctcgtcaaatacgatacctgcttctgttgtgttagaaacgataaatctaagtgtttcacttgtaccatattcaatgtacttgtcataatcttcgatagctgctacagcatcaacaacagatgtaatctgacgtgtgatttccttaggctgtccatctacgaaacctcttaactgaagtgtgtactggcattcctgatcgtggaatctttcaagtgtaccaaactcgattggcttaacgataacaacaccaccgttgaaatctgtcttttcgttagtaacatcgaagatataatctacgaatgctctaaggaagttaccttcaccaaactgcataacctttacaggtctgtcaactgcatgtgtaatactcttgtttaatctctgcatattaaatctcctttttctacagggtatcttatccctgattattaaccagtaaatggtatcttaaagtgcatgtaagcgctttcataatctttcaataactatgatatacttaaatatgactttcgtcaataattatttttgtatacatgattagcgtatacatgattaacgacataaatggtcatatggctaaagtacaataaaaatacacttacatacttgcttttataataataccattgtataatcaaattatcaatatgtaagtgcttacatttaacatttatgcacccacaggagtcggatatgaatatatatgatgtttccaagaaagctggtgtttccattgccactgtttcaagagttcttaacggcaacgccaaggtatcttcaaaaacaaaagataaggttcttgctgctattaaagagcttgattacacacctaacgtatttgcaagaggcttaggtcttaatacaatgaaaaccattggtatcatgtgtattgattcatcagatatttatcttgccaatgcagtatattatcttgaacaggaattaagaaaatatggatatgattccatactctgctgtacaggtaaagattatagtaataagaagaaatatcttgagcttctcttaagtaaacgtgttgatggtgttattcttactggttcacagtttgttgaaaacactggttcacacaccaatgattatattattgaagctgctagagatatcccgatagttcttgccaacggataccttgatgcccctaatatatattctgttatgtgcaatgatgaaattgcgatttataacgcaacaaaactcttgattaataacggacatcgtaatatagtctacttatatacaagcaggtcatatagtggaatgaacaagtattccggttatatgaaagctttaaaagaagctgctatcagtctgccacaccaatacaaccatctatgtggaaaaaacatttcacatgcgaaagaatatcttaatgagctttatgatagcaatattccttttgatgctgtagtaacctctgatgactcacttgcagctggcgcagttaaatatgcacacgcccactctatcagtgttcctgatgagcttgagattattggttataacaactcggttctttccatatgcactgaaccagagcttacatctattgacagccacgttgaacagctttcaactaaagcagtagatgttcttatgaaggtattgtgcggtgaatctgctgataaacacagcattatcactgctgatattataaaacgcaatacaacacatttttaattcacaggaggattaagaactatgaaacaattcatggacaaagactttttactttcaacacctacagcacagcatctcttccacgactatgctgacaagatgcctatcgttgattatcactgtcatatcaaccctaaggaaatcgcagaagacagaaagttcgagaatattacacaggtatggctcggcggtgaccactataagtggcgtcagatgagaactaatggtgttgatgagaagtatatcacaggtgatgcttctgatcgtgaaaagttccagaaatgggctgaaacacttgaaatggctatcggtaaccctctttaccactggagccaccttgagcttcagagatacttcggttacaacggtatcttaaacggtgatacagctgaagaagtatggaatctttgcaacgctaagttacaggaagattctatgtcagtaagaaaccttatcaaacagtctaacgttaagttaatctgtacaactgatgatcctgttgattcactcgaatggcataaggtattagctgctgatgatacatttgatgtaaaggttcttccagcatggagacctgacaagcctatgaacattgaaaagcctgaatatcttgactatcttaacacattatcagatgtaagcggaatcaaggttaactctttcgcttctcttatggatgctttaagaaacagaatgcagttctttgattcaatgggctgttcagtatctgaccacgctcttgaatatgttatgtataagccttacacagatgcagaaatcgaagctatatttgctaagagattatcaggtgaagctatcacaacagaagaaatgaacaagttcaagacagccttcatggtatctgttggaaaggaatacaacaagcttaactgggtaatgcagatacattatggtacaatccgtgataacaatgtattcagatacaatcagttaggtcctgatacaggttttgactgcatcaacacatatgactgttcagcagagatggctcagttcctcaatgctcttaacagcacagatgaacttcctaagactatcatctactcacttaacccatcagttaatgctgctattggtactgttattggatgtttccaggattctaaggctgttggtaagattcagcagggttcagcatggtggttcaatgatcataaggttggtatgactaatcagatgacaagccttgctaacttaagcttacttggtaacttcatcggtatgcttacagattcaagaagcttcttatcttacacaagacatgaatacttcagaagaatcatgtgtgaactcatcggtggatgggttgagaacggtgaataccctaacgatgaaaaggctcttaagaagattgttgaaggtatctcttacaacaatgcagttcgttactttggttttgacttataatcagcagtctgacagactagtaataacataaaaggataagtgataatgctgctattcagcttatcacttatccttttttagcattttcttactttcatacattttcttatcagccctgcttctggttgattcgaaatctccatccttctcgttgtcatattctgcatatccacaggctatatgtacattaaaaccaactattccaagcttatcggttatctgcttttcacgccatctaagacgttttttatatttttctatatcaaaccgcttatttttcctgattatagcacagaattcatctcctcctatacgataacattttccgtactttccaaatatctccctgataagctttgcagatgcttctatataaacatcacctgccgcatgtccaatattatcattacagtattttagattattaagatcaaacgtaacaatagcatatccgttataatctttcgtattctgctcccattgttcaaacgctgacctgttataaagacctgtcatggcatctttttcagccatttctttataaaacgctgctttctgtccatcccttatcatttcaagtacctcagatacaatttcatatccaagaagaactataaatataagtacaccaaacttacctatcacatctatttcctgcacatgcctatagtacgcatataaatccacaagcatagaactactcaatgcagctacagctataatattcgactttacttttctgtcaaagccattttttataattctgtcaacaacaaccccacaaaaatataataaagcaataataagcattatatgtataaacaaaacagttcttttaaactctgccattcctgtaatatgtagtataatgagcacaatatccattaatgaaaatatagtacataatgcattgctcactgttgctgtatgtatatgaaagaaattcttttcagcctgaacaaaaggtattggaagcatcataagcagcacataacccataagtgaagccagctttctgtctgctataaaaagcatggcaatacttgtttcattgagcgaccatgcacctatcagaatcgcaaatataccaaaataaagcagtgcctgtgtctgtgaaatcctcttattacatataatccacaacataatcatagctataccaacaagtatgattagtgcacttaacaccgctggtaaaaaagcctcagagattaattcttttaatatacatgcttcatcaccatattcaaatgttgtttctttttgtttaacaccttcatacacattagtaagttttactttcacatcggttgtatatgatggtatgttaacaatcgaataattagttcctgttgttgtaccatataccgacttatgtgcttttacataatatataagattatcattagcatatacttctatctcctggtgcctgctgataaaatatatagccatgttatcgcttgatgcagtacttaacttcagactatattcgactgttccatctcctatgtattcttttttatctggttctatcaccatctttatcttgtcatccgctggtgtcttaatatctactttgctaaatataaaacctgaaaaaagataaaacaaaaagccaaaaagaaaaaacaaatacataattctgttaaccatttttatgttcttcatatataatcctctctgaaggcattattctattatccttaaaatctatattctatgatactttaaatcggctttatttttaatttttctttaattttcttcaattttattcaatttctttcaattttacttaatttcattcaacattatgcatgtttaataagactgtcaacattaaataaactagacttcaaagtcagctgatgtattgataaaatcgaaatcaacaatcaatacgtagaataccaaaccataattctcgctatgtactaatctgccataatcaaggacattcttatattcaccacttttagtagccatcctgtatctgacataatcatttactttattgtcattaatcgatatctgttcccatatacgcttttcaacacccttaaaatcatcaggatgaacaagaccattaaaatgctttcctgaaaattcaaagaaatcatctaaatcatcgcatcctgcaagtcttagcatttcattgttagcatataaaatctgttcatcacttttatcagccttatatatgaaaaatgcccccggaagattgtttgaaatatcattaagcttaaaaccaagctgtgaacgcttagaatctgatacacgataacttgccctatatggaaggcatccatgctttccacgcagcttaacctcatataatgctatatctgcataccttaacaattcagaacccttgtgtgcatatgtaggatactccacataacctaaagagatgctatacttatattctttccctttatgctggaacgtacgttttttcattgtaaagccttctatcagattctttgcctcatcctcattacaatcctttataagcatgcaaaactcatcgccaccatttcttccaatgacagcattttctggaaactcttttttcatgtccgttgccagttgaataagcacctgatctcctacctcatgaccatgtacatcattaataaacttaaaattatccacatctagtaatattgcgatgcacttctttgattcattattatttaaatacttctcaacctgctcattaaatccgattctgttaagcagtcctgtaagtccatctgtcaaagacatcttcctgaacttttttctttgtttttccatattcatgaatgcaaataccagaacctccagcaatactattatgataacacttacaattataacaggactgctattgttatcgtttttccatccattcactggtgaaacatcaagctgccacttgcagccaccaagcccaaatttgtatgaaaccggattatctaattcctgttttgaaccagctatcactttataatctgacgataaaggcgactctgttttagatagaatataatcatatccaaaactctccagtgcattcaccgaatcattaaaaatctccggagccttgattataactatcgccaacccccagaaatagcgttctccatattcattataaagataaaccggtttacgtatagcaatcccatcgcctccctgattaagcgtaaaaggaccctgcataacaacaatatcgttttctattccatacctgacaatcgctcctcttttttcatcattaacaaggtttatcttacccgcttcgtttccctcttctggatatatttcattaacaacaccatctggtgctaactgaatactttgtacataatctgccatcatactactagcgattgtactgaacttattgaccacaccattctcacttataaggagctgttcaatagaatatgttattccagctcctaaattaagattgtttatcatacggtcagcatatgtaacagcattcagacttgctttagttcttgtcttctcatattccattctgttaatttccgcaactatagcatgtaatattattataccacatattaacactactaatggtaatatacgccacctgttaccagaatatttttttgttccatactccataatcatacattcctaaatcaatctatattctaatacaattcccactatgtattcccttatatattgatatcatgattaacaaaatacgcttaactttgttttttattctttctataacatataaaaaagaaaatttattatttaccaatcactaagtatgtattatagtacacgataataatcatatcaactaaaatttttatttttgcgttgtttgcgtgttaaaataacaccccttttgcagtttctttttaagtctacaacaatctgaagtctgcaaaaaaaattttgtagacgtgacgtggacttgatggtgatattataagtccacattgatttttcaaactaaaaagaggactcttagaaaatatctaaaagtcctcaaaaccgcttatttactatcttttaattaaaacttgccttcatcagcagcctgctgtacagaaacagcaacagcaactgtagcaccaaccatagggttgttacccataccgataagacccatcatttctacgtgggcaggaactgaagatgaaccagcaaactgggcatctgagtgcatacgtcccatagtatctgtcataccataagaagcaggacctgctgccatgttatctgggtgaagtgtacgacctgtaccaccacctgaagctactgaaaagtacttcttgccagcttcaagtctttccttcttgtatgtacctgcaactggatgctggaatcttgtagggtttgttgagttacctgtgatagagatatcaacattttccttccacatgattgcaacaccttctgttacgtcattagcaccatagcagttaaccttagaacgaagtccatcagaatatgcgattctttcgatttccttaacttcgcctgtagcataatccatctctgtctcaacgaatgtgaatccgttaattcttgagataatcttagcagcatccttaccgagaccgttaaggataactctaagaggtttctgtctaaccttgttagccttctctgcgataccaatagcaccctcagcagcagcgaatgattcgtgacctgctaagaaagcgaaacattctgtatcttcttcaagaagcatcttaccaaggttaccatgtccaagaccaacctttctctggtcagcaactgaacctggaatacagaatgcctgaagaccttcaccaatagctgcagcagcttctgaagcctttctagcacccttcttgattgcgatagctgcacctacgatgtaagcccagcaagcgttttcaaaacagataggctgaatgccctttaccatgttgtatacatctaaaccagcatctttagtaatcttctcagcttcttctatagatgagataccatagctgttaagtacagcgttgatctggtcaattcttctctcatatgattcaaataatgccattatattcgtcctccttacttaacctcttcatctgttctaggatcaataatcttaactgcatcagcaacacgaccatactgtccagctgccttctcatatgctgtgttaggatcatcacccttcttaatgaagtctgtcatcttaccaaggttaacgaacttataaccaataatctgatcatccttatcaagagcgatacctgttacatatccctctgccatctctaagtaacgtggtccctttgcaagagtaccatacatagtaccaacctgtgaacgaagtcccttaccaagatcctcaagaccagcaccaactgctaaaccgccttctgagaaagcactctgtgttctgccatatacaatctgtaagaataattctctcatagctgtgttaatagcatcacatactaagtctgtatttaaagcttccataacagttaagcctggtaagatttcagctgccatagctgctgaatgtgtcatacctgaacatccgattgtttcaactaaagcttcctgaatgataccttccttaacgtttaatgtaagcttacatgcaccctgctgaggagcacaccagccaacaccatgtgtaaaacctgaaatgttcttaacttccttattctgtacccactttccttctgtaggaactggagcagcgccatgatgaacgccctgtgctactggacacatgttttcaacttcctgtgtataaatcatcttattactcctttcgttagttaagggattcatacataattatgaacccctttatcacttgtgttattttctcacatcacaatgcttaagtcaattatgattgtgcaaaaaatatcaaaaattatgaaaaatgtaattacatcataaatattatataactaaaaccattaaagttcaaacttatcaatagcctctgtaagatgtgaagctatatcatcaagttcaactgtaaactggttaagtgtatgcatagtagcattaacctcttctgctgaagctgatacttcttctgaagctgctgctgtttctgtagatacagaagctacatcctccatgctcttaactacattctcacggcttgcatccatctgctcattaagcgaagctatattgtcaagtccttccttaagcgcattgacagcatctgatatatgtccgaagagctccttggctgcattgatagacttattctgttcatcaataatctcaacactttcatccatagttttttctgccactactgacttagctgagatttcctttacaatctgcttaatctcatcggttgatgcttgtgactgttctgcaagctttcttatctcatctgctactactgcaaaacctcttccgctctcaccagctcttgctgcctcgatgcttgcattaagcgaaagcagattagtctgctctgtaatctctgttatcgcatctgatataaagttaatcttttctatgctttcaatcatctcattaactacattctttgagaatcttgagttatccttagacttctcgcccttatctataagatcatcaactattgtaatacccttatcactaagtgtcttagtctcaactgacatatcgtttatatcgcttacataagccttagtttcatgaagcttagatgcaagaagttctacttcagatgttgccttctgtgtactttctgcctgaccagaagcaccaatagacacactctgaatagcctcagatacctgattaacagtctcagttgttgactcacttacctgtgatatcttcttagatgcatctataaggacacctgacttttcctcaactcccttgataagaccagctatctgatctgccatatcattgtagtttttctcaacctgtccgaattcgtccttcctctttacttctattctgtgtgtaagatcaccatcagccatcttacccatagcagtgttaatcttcttaagctctttagagattgaccttgctgttataagagcaatagcaacacctattatgattcctattattgaaagaagcattgtcctgtttctgatgctgtctacaattgtctgtgtctctgactcgcttataaatcccataagagtccagcctgtaactgcatccttagacgttacaatatgaaggctttcaccatttactttttcatcaaaagaaaatgttgtatcaagcttgtcatcaccaagtccctttatagtattccagcattcaagcttagtaacatcatctacatatgtattcttgtcattattaacaagaatcttgccttccttattaacgaggaggacataacctgtatcaagaagacctatatttcttacataatcttcaacctctgagaagtcaatattaaggcctaccgctccatagttactgttatctgtatactttatttcctgggacacagtaaatatagtctttccagattttgaatccttatatggatctgaaaatactgaatatatagaattccttgcctttgaacctatacatgctttataccatgactggttcgtatcattaacatctcttgttaatccacccttgttgcttgtcttacctgtatctggattaatctctgtccagccatctactctaagacctgttttagtagtaaaaaatgcaagctcagctccattagttacctttactgatgcaacaagtgaatccttgattgctgttacattggtatcaatatcgcctctgtcttcgagatgctttatctcattcttacgcgtaagaagatcaactggctgtgaaagagtctttaaatatgttgtaaacccttcctgtgctgcctcaagtgtctgctcactagtcactttagtatttccgttaatagctgttcttgtcttatttagagaaccaagcgatacaagaattattgatacgcatatcgctactacaaaagataatacaagctgagcaccaatccctttgaaagttttcatacttttacctcactatccttatcctttaatattaaccataataaatgatactttgattaattatatggttaaccatgtaatacttttttgcaaaataactatacttttgcatatctactatactatgatagcataaattatttattttacaaggggtgtttctgtatgttattatattaacatttttaatattttttaatgatatcaccctgttttttgtagattgaacctgctggaacaaagcctcttacacttgaaagcggatatatattactctcttttcctactattgttcctggattaagaacgcttccgcatccaacctcgacataatcgccaagaaaagcacctatcttcttaattccagtatccacgtttccatctggtcctttaatggttataagcttcttatctgatttaacattagatgttattgagcctgctcccatatgtgctttatagccaagtattgaatcacctacatagttataatgtggaacctgtacgccatcgaataatattacatttttaagttctgtcgagttacctactactgcaccttcaccaactatagcttttcctcttataaatgcacaatgtcttatctgtgcgcctttacatattattgccggacctgcaatatatgcggattcaaacacatctgcttctttatgaatccatacatttccatcttttttaatatattcatcctccggaagggttctgccaagttctactatatagtctcctatctttgacagtacctcccatggatatatgcatccatcaaaaacagatgctgctattgtcctgtcaagactatatagctcctttatagttatagactcattcatgatatcaatcctcttttctttatatttataatgatgccatgtacaatggttctaagtctactccactgtaacactctttgcaagattccttggcttatctacatcattgcccttaagaactgctgtgtaatatgctataagctgaagtggaactgctgccgtcataggcataaatatttgttgagtatctggaaggcttattattatatctgcaactccttcttctatctccacctctgagcctgcaacaagaataacaaatgcccctcttgccctggcttctttaatattacttatagttttttcaacaagatccatctgtgtagccacagcaataactggcatattctctgtaataagagaaatagttccatgctttaactcaccagcagcatatgattctgaatgaatatatgatatttctttaagcttcagcgagccttccatacttgatgcataatcaagtcctcttcctatatataaaagactgtctgcgttcatcagcttagaggctgcatactggcacttttccttaagagtaatagcctcctcaagaacagctggcatattttcaagatattctgtatatttttcacattcttctttcgttattttgtttcttgcaaatgccatctcaaatgctataaggtacattatagctatctgtaccatatatgcctttgttgaggcaacagatatttcaggaccagcgtgtgtatacacaaccatatcagcctctcttgctatagatgagcctttgacattaacaatagccatagtatctgcccccctctgctttgcaagctccaaagcagcctttgtgtcagcagtttctcccgactgtgatataactatcataagatcaccttcacctataagcggatccctatatctaaattctgatgcaatatcaacaacaactggaacccttacaagcttctctataacatactttccaaccattccagcatgcatagctgttccacaggctactatgtatatattcttataatcctttaatttttccttatcaaaaccttctgctgtaaaatcaggcatatgattctgtattcttggtgtaatagttgttttaacagctgtaggctgctcatgaatctctttaagcataaaatgctcgtatccacccttttctgcggcgtcaacatcccagtcagctgtatttatttccttaaaaacttcatttccatgaacatcaaaaaatcttattgaatccttctttacttctgctatatcattcgtatcaagaagataataatttcttgtataatgaataatagctggcacatcagatgctataaagttttcattttctcctgcacctactataagcgggctgtcttttcttacagcatataatgtgtcaggaaaatccctgaacagtatgccaagagcatatgaacccttaatctcccctataaccttagatatagttgtaagtggatttccatcataataataatcaagaagctttgccactgtttcagtgtcagtctcactcacaaagctatatccttcacctataagaaactcctttatctgtttataattctcaataatgccattgtgtactattgacactcttttatttccatgtggatgtgaattaatatctgatggttctccatgtgttgcccatcttgtatgaccaattccacagtgtccaacaggcttgccatccctcgccattttatcaacaagattagaaagtcttcccttacatttttctactttaatagttccatgttcaaaaacagcaattcctgctgaatcatatcctctatattccagctttgaaagtgcatctataagtacatctgcacaatccctgtcacctacataccctgtaatcccgcacataacaatcctccatattattcttctttataagcccgttatatcaccagtatgtatatatcaacatctgcattatacaatcagactgtttaatattaagttatatattaaattatatgtcttccctgcattatacacgactcagccccttatgggcaatattaatctcaacttattttaccaaagcccattataaacaatgacatatatcatctcttgtaatttctggctgaatcattaaataatgttataagctgtgcctggttgttaagtcctttcacagcaacagttcttcttgtcacaaaacctgacagcttctgcatatattcatcagaagttatacttccctctgctacgtatgtaagtcctttctcccagcttgccgtaagctccggatttagcagctgcctgattgaattatcaactacatcatatataatttcgccaagaagtgttggcgtaattatctgtgtttttgaattaataaatatgtatttattaacattaagcttttttaatatttctgcccttgttgcacttgttcctattccgcttcccttaatctgtgcccttagctcctcatcttctatgagctgtcctgcattctccattgcaagaataatcgaaccggaattatatcttttaggtggagaagtttctccctcttttatatcaaaccctgtaaatgttatctctgaacctttttttaacagcttaagactttcaagcaattctgcatctgtcttatctgatgaattatcagtaacatctttcacttttcctgtcttatcctttgaatctgccagttgtatatttttatttttagcaaatgaattattcgtaactttcagataaccttcgtttacaagcaccttaaatgttgcatacatattttcattctttaccgatgtggttatgcttactttctgatacaccgctgccggataaaatatacttaagaatctccttactattatctcataagtccgctgtgcagtaactgataaagcagccagattgttaagtccctgtccggttggaataatagcataatgatctgttatagctttatcgttacaatatcttgttttttctataccatcataaagcttattttccataacctctaaagctatatccttaacatgcacataactccttagcccgcctatatttttatatatttctttacatactgcacttgataatactcttgcatctgttctcggatacgtaacaagctttttttcatataattcctgtatgatgttaagtgtctgatccggacttatcttaaacagcttactacattcattctgtatttcagcaagattatataataatggaggattttttgtttccttctttctttcaacctgctttacaattccacaagctgggagcggatctgataatattcttacaagctcttcagccttttttctttccttaaagccattatccttatacagataaggtgttccataatatctgctctgctcacacactctccattcagcatcaaatgttttatcgttaatcgatgcacctccaataaccttaaaaaatggtgttttaacaaagcttcgtatttctctttctcttcttacaaccatgccaagaacacacgtcataactcttccgacagaaactacagctctatcctcatgaagataattagctatatttcttccgtattttaatgtaagaactcttgaaaaattaatacccataagataatcttctttagctctaagatacgcagctgaactcaggttatcatactctgatatatcctttgcattctttatgcctttaagtatctcttcctcagtctgtgaatctatccatactcttctttcgttcttaccagtaacatgagcctcctgccttacaagtctgtatatatattctccctcacgtcccgaatcggtacatacatatattgtttcaacatcatccctgttaagtatatttttcactatatcaaactgtttttttacagctggtataacttcatatttaaactgtcccggaataaatggcaatgtatcaaaccgccacttttttagattctcatcatatgcctcaggataactcatagttataagatgacctacacaccatgttacaatatgctcatcagcttccagatatccatcttttcttttaaaatttacatgaagtgcttttgcaaactcctgcgcaacacttggcttttccgctatatatacggattttcccatacaatcattctccaatctgtcattatgatatacatgtttttatatatcataatttgtcatatctttatattataaattatatcatagtaaaatgcaaagaatataaatccaaatgcaaatgcaaaaaatgcaaaaagtaaaatgctctaacacacaaaaagcagcaacgccgtcatcttttgatgtacgcactgctgctttcctttatttaatgtgaggtcaacgttaatctaaccacctgctgatatatccaagctgtcatattactttgctgttatatatccctgtgccttaagaagctctgcacaaagaactgctccacctgctgctcctcttaatgtgttatgtgaaagtccgacaaacttataatcaaatacgctgtcttctcttaatcttccaagtgaaacacccataccatgctcatagttaacatcaagcttaacctgtggacgatcatcctcttcaagatactggatgaactgctttggtgcagatggaagatttaattcctgaggtactcccctgaagcttctccacttctctataatctgttcctttgtaggcttcttgccaaagttaacaaatacagctgctgtatgtccatcaagaacaggtactcttaagcactggcatgttataactggctctgtagctggaactatctctccattctctactgtaccaagaattctaagtggttccttttcagacttttcttcttcaccgccaatataagggataatgttttcaaccatttctggccactgttcaaatgtcttaccagcacctgaaatagcctgatatgttgtagcaacaacaagctttggttcaaactccttaagagctgcaagagctggtgcataactctgaatagaacagttaggcttaacagctatgaatcctcttgttgttccaagtctcttcttctgtgcttctataaccttagtatgctctggattaacctctggaagaatcataggaacatctggtgtccaacggttagcactattgttagatactactggaacctctgctttggcatatctttcctctaacgccttaatttcattctttggcatgtttacagcacagaatacgaaatcaacttttgatactatttcatcaaaatccttatccatatcgtaaacagacattttcttaacgaactctggcattggagtctgcatcttccaacgtccttcaacagcttcctcataaagtctgcctgctgaacggccgcttgcagctactaacacaacatcaaaccatggatggttttcaagtaatgtaataaatctctgacctaccatacctgtaccaccaagaataccaacctttaacttctcgctcattataatcctccattcttacgcttatcacatattatgtaaaatatacatttacaccttacattttatttttcttaattttttctaaaaacaaatgccgctttttgtctttctgtgacgtacatttgtttttcagtgctttgaacatactatcacacataattatatattgcaagcacttttcaccacttttctatattattatagcaaattatgcaaaagaacagcacacatatttctacatgtactgttcttttaacatttttatcttaaaaataatgaattatgctttacgctttttatcaaaaaatacatatgcagatgcaactaaagccattgcaactgctatcacagcataaaaccatatcactgtgttatcagatgtctgcactgactcgccttcactctgtactgcacttgaattttctgatgatgctgaatcattaccagagaaactggtttcatcttctttagtcgcagactgtgtaactgttgttgtctgttcgttagttgctggctctgtaactgttgttgcctgttcgttagttgctggctgcgttactgttgttgcctgttcattagttgctggctgcgttactgttgttgcctgttcattatcctttgtagtctgctggctgttatcttgttcatatgcaagataatacagattcgctttatcgccctttgtaatcttatgagttcccgcatttacagtcatctcaattattccattctttacagcacatttactgccatcaagcttcactttgccgttaaaatcttcattaaacaccatgactatctttgcatttgtctgtgtattaaatgaaatctcagtacttgtttccatcttaagacacttagtatatgttttacctttatatgtcacagtgcccttatctttagcaatatttcctttgatattaaagaatgtattatcggtacttccgttttcaaaatcaacagcaataacttttccagctgtacccgttgttggctgctgtgctgttgttgtttgctgaactgtcgttgactgctgtgctgttgttgttgacactgtagttgactgctgttctgtcgttggttgtaccgctgttggctgctgtgatgttgtagcctgtgttgcatcagaagctgttgtattctgagttggctgtgctgttgttttttcatcagagttggatgtttcctgtgaagctgttgtattctcttctgacttagttgtctcctctgtatgtcctgttttgtccacttttcctccaacactgataagtgctgtattcttataagctgtaaccgcctcttttaacttttcatctattgcatatgaagaattgtctgcatcagtgaagttccatggtataacgccgccaccctggcttccagataaagctttaaccttatttttcacatctgctgcagctgtaatatcagcttcagtcacacccatatcaacagatacatcagtatcaaaattactgtatgtagttgaacctgataatgtcttatatgaacctgcaacctgctcatttctttcagctgcaagataagcatcaaagctagctgcattggcagcaccatatgatgaatctgcattagcatacacaactccggcagcaccagatattatattattatatgctttaatcattccacctttttcgtttgagaatatgcttttacccttggcatctgaaccctgaagtgacgacatcataggatatttgcagttttcaaacacattggcttcaacaaacgctgatgaacctgatgtaactcctactccatactttgaattaccatcatagtagttgttgtatacatgtatattatgtccgtttcttatacgtggatgacgtgaatccgaatgatcaaaccagttgtggtgatatgtaagataatctgaataccctgaatctgctggtgttgcatctacaagtccacattttccactgtcaaaaaagtgattatatgctattgtacagtactgtgacttcttgacatctatagagccatcaccctttttctggtcgctgtctgagccagcctgtccataatatatatcaagattatgaacccagatattacagttgcttgtgtctattgatattccatcatccatgaaattaagcactgaaagatttcttatttcaacatttgctgcatttctcacaagaataccgaagtcttttatacaggcatcgctgccgacaccctctattgtaagcttcatatcagaataagcactttttcccttaacctgaagtccttctgaactgctgcttatcttatcaagatcattctttgtcactgttcctataatacggatatcaacaggtcttgtttccttgcctttctgaagggcatcaataatattctggatgccaacacattcagtagtcttattcgtatcagtctttactgtcatagtaacagttttagcagtatcttttgttacatacagtacaactgcatcctgttttaatgttccatcatcattataagcacctgaacctgtcttatatttagaatcagatgagaacgcaaagccacttctatcatgtgaagctacggctatttcttctgtttcaagagcctttgaagctacttcttttccatcctttacaggaacaaccttcataatatatgttccctctttaagaccaagtgcatcagctctgtaatagtctttatcagtcttataatgtctgataagttcatcatcaagctttacatactctccattcttttctttaacatatgcattatagctgtcagctttataatctgttgaccattctacatacgctgattccagccagcctgttgcttctattttttctggctttacaacatctgctttagcagatttaactgatacaggcactattatgcttactgccataacaacagccagtaaacatgcccatatactcttagatgattttttaaatatagctttcatcttaaacccctttcaagttttgtgcatttttcacaagtataatatcaacatatgaaaatattattattattctaccaaaaacaaatgttatgatatatggtattatagtaccatatatcataacctcttttataacctctatgcataaccactgttatgaatcagaaccagagcctttcaaaatatatttatcaggatactcaaacacatatctgtcatatccattgattattattgtatctttatattctctctctcttttattctccaccgaataattcagatgtacatgaccatgaataaaatatttcggtttatacttatccagtatatcaacaaatgcttcaaaccctttatgtggattatcttcaccatctcctattccaaacgctggtgaatgtgtcagaagaatatctattcctttttttatttttatctttggccacattctcgcagtccttcttttcatctgactctgtgtgtattgattagcacctgctttatatcttatagaaccgcccagtcccataatacggattcctttgtacacatatattttatcctctatacatatacatccttctggttctttaaatgcataattatcatcatgattgccacgcacatataatataggtacttttgaaaacgaagcaagaaatgaaaggtattccgcacgtaaatcaccacatgataatataaggtctataccatcaagtttttctttttcaaaatagtcccacagatatttcgactcaacatctgctaacacaagtattttcataattttcactcatttcaattattcattaacatctataattccctgatttataacaaggagcttatattcttcacttagttcatcatactctggtatccttccaacaatattgtccataagccaatccatctctatgatttcatctggatcaagagtttcacctgccttattcatgatatttccttcctgatttcttaactcaccagaaaaaggatggaattcaccttttataatagattctctgataaggtcaactatttttttagtttcattattcaggcctccaccatatataatatcaacagcccctgatgacattccccaccaatagtttagtgctgataccttatcgccttcctcttctttcttccatgaaccacttagtatgctttgtataagcttttcatagaacacaccccagtgccataccggcatagcaaggtgtcttatattaccatcgtcatttatatataacccaaattttcttgatgattttttcggcgtaatcatatcctggtccgatatacaattaatcccaagctccttaaacctggcttcaacatcattgtctttgataccattccattccacatacaccttagcatcaggattaacagcctttacccccatagcaaacgcattaacatttgccatgacaccataaagaggacaacttgcaacatatcctattctgtcactctttgacataacgccagctataagtcctgtcagatacttagcttcatgaattcttgtatagtaggttcttatatacttatgcgatatattcagtgaacagttaagtatcttagcctttggatgtgctatggcctgcttcaggctcgcatacatcatggctgaagatgtcacaaatataagatctgtattttcatctataagcttttgtatagcatcataatcatcgattttaggtcttacattcgttatacttactgtttctatctgttttccaaatgtctcatctatatactgtcttccaagttcatgcgcataacaccattccgatgtctgtggtgtcttttcatatataaatccaaccttcagctttttgttactatctcctcctgatattggaagcagatagcttagtatattctttttggctggttctatctttgccgggtccatttttaattcaaccccgctgttatctgataaaagttcaaactcttcccatgtcttagccacattcttatccatctcatcagatgtcatgtgcttgacattatcatatccatgaatatgaataaatcttagatacgcatctccgacaggaaaatcaaatctgtctcctccccttgattcatatgccgttctgaaattaagatagcttgaaacaagatcctttttggcatcttcatccataacttttcccggttctataccaaccagatccataagtgtcgtaaagctgccttctttgctgaaatatatatcattaagcttagttgctttataaaaatccatgaattcataatatattttaacatctggatcatcggattttttaggaatctttcgtataacctgtgcattgacagtaactgccttaaagtactttaaaacactcacccttttgttaccttcaagcacatagaacttattcatgtattcatatacctttataggatctcttataccttcattcacctggctgtcactaagtgatgcccattttgctgaaaactcacttccccactccaatataggcatccagttatctgcaaacgcatttgttcttccagctgtacatgttcctaccacaagtcttaatggtatctgatcaatcccaagactcacctcagaatcaatactcttttcctccatcatattctccataacaggaaggtatggatattttcctttattaacacatgcatgatattctttttttcctaattttaaggcactcatataatcctgtactgacatactaacctccattcctgcacagatatacttaaaaactgtgcacttttaatgcccataacccttttaccattctttcctaattaaacttaacatattttataatataaataaagcaaaaatgctggctgataaaactattatgtataccagtcagcattttattacatttcggtgtcctgcttttaaagaacacttgtaactatcttagtcagtgtcataatatagttcttatcagattcattccacctgaagcttttattgaaagtgtcatagaacataactatattatcgccttcgtcattcttaaaataactatatatcatgccacctatattacaggctataaccgcatcgtacatttctttatagaacgactctatattagaggtataaaccacagtcacgtaattcctgttttcgaatttttccataaatttgtcagtttttatgagttcaagtatatctggcaatccagaatattctccataatagtctataagttcgcctttagtcgcgttatatacgcgtataccatctatctctaacgccttgcatgcacgtggcagcgctctttttaccgcctcttttccattcctaattatatcaatagccatatctgctacttctaacgaaagattctcaccttttttaataggagccatagaaaagccttttcttcccatatcctcaagaaaatccccatgcttagcagggtcatatattatatatctgtttttacctttattcttagctatatataaacatttatcagccttgtttacaagcgtgtcataatcacttccgttatccggatactgacacacacctatagaaagagtaactatacagccattctctccctgactcatttcatcccttactttctgtttaatagatgtaagaatagatctcaactggctttctgtattaatccagtttgtaaatatgaagaactcatctccaccaaacctgccaactattccccttccgtttaatgtactgtttataatagaggcaacttttaatataaccttgtcaccatacaaatgtccatatgtatcattaatattcttaaaatcatctatatcaatcatagcaacataatgcatgtctttgttagaagatattgcatccgatacatattccttacatgctcttttgttaagcagccctgtaaagaaatccttgccttcctgtgtcgcataatatgcttcctctgtctgtgcaccaagtgacttgataatcccaataaccaccttgcttcgattgtacttgtatattatacggcaatccactttatataatccaagcttcgatgaatctgttataagcggacatgtaatctctgcattaaacccttcgtttgcgttacgcagcttatacatgaaatcgcgaaaatcctgtttatgtctggcattattaaagaatgtcataatatacttttcaaaatcatcaatatgcatttttttaatcatggttgctttcatgcttctataaacatatatagaaataatccctgtagctatatcataatcaaacagataatcattgtacatagaaaggaattttttatatttatcggcatcatcatgaagcttgaaatatttctttcctgtgttaaacacattgtatacctcagcctcaataacgctgttatcctcaatcacatgacccgtatttgataacaatatatgaacaagagtatatgtatcatctttacctttcatgtatgcaatcattctctgtgattcaccctctttaagactttcacatatattcgtaaactcttccttaaaatcaggatgaatataatctgttatagatatattaattaactttcctacataattgtagaaataatcatctgcaaccataaccagataattatgtgtaaatgttgcagaacaatataacatatttgatttattattatatatattatctgatattaacataatgcccccacgtccgctttgttatttttgcactttatttcaattaataatatcacgttttttataaaatgtaaacaaaccacgtacttttactagtactttttctctacattctgcatattacatagtttcattatgaactattatgaacttgcattatatctgaatcaggttatattattattgattgacatattaaaatgtacattattgaaaggacacaaatatatgaacgctttaccaaaagaccccgttatgcttcttagctttgtaaacatgcagctgcgtgataactacagttcacttgatgaattctgcaagtcgtttatggttgataaaaatgccattaatgataagcttggcatgataaattatatttatgatgaaaacagcaatcaatttaaatagggagattgagtacatagtactcaatctccctttatattccatatttacttagatgcttttgcgacaagtccattattttcacagtcgattactatattatctcctgtagatacattgcctgcaagtataagcttagctgcaagtgtctcaactgacttctgtacatatctcttaagtggtcttgcaccatacattggatcgaagccatgctcaactatgaaatccttagctgaatccgtaagcacaaccttaagttccttatcctcaagtcttctgttaacatcattaataagaagattaataatacttcctatattctccttattaagtggcttaaacatgataatctcatcaagtctgttaaggaattccggtctgaagctgtttcttaaatcgcccattaccagctcctccactccttctttaatattgcctttatcatcaataccatcaagaagatatgttgaaccaatattacttgtaagaataattatggtattcttaaagtcaactgtacgaccctgtgaatcagttatccgtccatcatcaagtacctgaagaagtacattgaacacatcaggatgtgccttttcaacttcatcaaaaagcacgactgaatatggctttcttcttactgcttcggtaagctgacctccttcatcatatcctacatatccaggaggcgctcctataagtctggatactgaatatttctccatgtactccgacatatcaagtcttataatattattctcatcatcaaacaggctttcggcaagtgccttagcaagctctgttttacctacaccagttggtcctaaaaacagaaatgagccaataggctttgttggatccttaatacctgctttagatcttatgatagcctctgtaactttagtaactgcttcgttctgtccaaccactctcttatgaagtgtttcatcaagattaagtgtcttctgtctttctgattcactaagcttagctaccgggatacctgtccatcttgatataatcttggcaatctcttcctctgtaacactttcatgcacaagagattctccattgccagactctttagctttagcttctgcctcttctatctgcttctgaactgctggaagctttccatactgaagctctgctgccttttcaagattatattctctcttagcctgtgctatctgattgttaatattttcaagttcttccttcagcttgcttatattatcaacctttgtcttatctgcatcccactttgacttctgaataccgaattcctcgcgtaaatctgaaagttcttttctaagtgcctcaagacgttccttgctaagattatctgtttccttctttaatgctgcttcttcaatctcaagctgcatgatcttacgctgcatttcatcaagctcggctggcatagaatccagttctgtcttaatcatcgcacatgcttcatctacaagatcaatagccttatctggaagaaatctatctgttatatatctgtctgatagaactgctgcacttactaatgcaccatctgttatcttaacaccatggaacacctcatatctgtctttaagacctcttaaaatagatattgtatcttcgacagtaggctcatccaccataactggctggaaacgacgctcaagtgccggatccttttcaatatactgtctatgttcatcaagtgttgttgcacctatacaatgaagctcacctcttgcaagcattggcttaagcatattacctgcatccatagcaccttctgttttaccagcacctactatagtgtgaatttcatctatgaaaagaataatctgaccttctgacttcttaacctcatcaagaacagccttaagtctttcctcgaattcacctctgtactttgcaccagcaacaagtgctcccatatcaagtgcaaaaagtttcttatcctttaagctttctggcacatcgccttttacaatacgttgtgcaagtccctcaacaactgctgtcttaccaacaccaggttcacctatgagaaccggattgttctttgttttacgtgaaagaatccttataacatttcttatctcctgatctctgcctataacaggatccatcttgccatctgcagctctttgtacaagatctgtggcatatttactaagggtatcataagtagcttccggattatcagaattaactgtctgattcccccttactgtcgcaagcacagaaagaaaactctccctatttataccgtatgtcttaaaaagctgctttatggctctgttaggagatgctataagagcaagcataagatgttctactgatacataagaatcccccatacgctttgcttcttcctcagcattaataagcactttattaagatcattacttatatacagctttacatcaccagatactttattcttctggttaagcagctgttctatattctttaaaaaaacatccttatcaatattcatcttttctataagacttgcaataaggctgtcgtctatagtcatcaggctatacaggaaatgttcctggtcaatctcctgatttccataatcatatgctattttttcacaattgttaatcgcctcgactgacttctgtgtaaacttttgaatattcatacaactcacctctttcattacccgtgaattaatagttcaatagaaaatgctttattcactttctgataattgttatatcatccactgttagccaagtcaagaggtgagtgctaatttattataaactttttataaagcgtagtgtttatgctggtttgaggggtattgaaattggtgaaaaaattgatttttactgttttaatcgtccccttcctgatttgactgataagcatattttttcttacaacgtaatatttcacccaagtgctacatccagaatcatcatcaaactaaacccaaatgcaaagaaaatcgtaccaatattagagtgctgtccctgtgacatttctggaatcaattcttcgaccacgacatataacatagctcctgctgcaaagctaagtaaatatggtaatgctgggattaccagctgtgcagctagaatagtcagcacagccccaatcggttcaaccactcctgaaagtacacctccaagaaacgcctttcccttactttcgccctctgccctaagaggcattgatataatagccccttccggaaaattctgaatagcaattccaagagataaagcaagtgcactagctgctgtaatctgtgcattttcagcaagaaatcctgcatacattacaccaaccgccataccttcaggaatgttatgtagtgtaactgccaacaccatcattgtagtacggctaagcttgcttttaggtccttctgcctgaacacttccaacatgaagatgcggaatcaaatgatcgagcgcaagtaaaaacaatatccctatccagaacccagcaactgccggaacaaatgataaataacccatattctcagattgtttaatagctggaatcagaagactccagattgaagcagcaaccattatgcctgctgcgaaccctgtaagtgcacgttgcactgacgtgttaagtgtttttctcataaaaaacacgcatgttgcaccaagtgttgtcccaacaaacgggatcagtatacctttaaaaatattcaatagcattacattttccttccataatctaaaatttttcttatataataaaaagatttttctacaacggtatcgtaacagttttgtagcttgttgattatattttctaaaatctattatagtataatctttcttgacaatcctgctgataccgtgttagttataactaacttcacatcatacatcataaaccattatcccttcagatgtcaacaaatgctttaagaaggataatcactttattcttttaaatgtacttataaaatctgttgaaaaaaagatgactcctctagtattaatatctgataacatcatatttttctcatttatttcaaaaagtgcttcaaaataaattttatttgtttacttttctatataatattgttataattcagttaataaagtttggaggttatgtataatgaaacaattaaatgaaaaagttgctatcgttacgggagctggccagggcatcggaaaaggaattgccctttgccttgctaaaagaggtgttaaggttatagcaacaggccgccgcccagatcctattaaccagacaatcgcagagattaaagaagctggtggggaaggttttgctatgacttgcgactctgcagacagagaacgtgtagatgaagttgttaagactgccgttgaaaaatatggtactgttgatgttattgttaacaacgcccaggccattgttccatctgctccggttgaagaaacttcttatgacaatatgcttaaagcctggcagagtggtgttatcggttctcttaactatatgcaggcagcctttccttatatgaaagaacagcatgaaggcagaatcattaactttgcttctgcaacgggaatgtttggtatcgccggtcagttagcatatggttctaacaaagaagccttaagaggcttaaccaaaatcgctgccaaggaatggggacaatatggaatctgtgttaatattgttcttcctggagctgaatctcctgctgcaaaagcctgggctgaaaaattcccagaagaatatgccaagcaggttaacttaaaccctatgaaacgttttggtgatccagaaaatgatattgcaccagttattgcattcttagctggtcctgattcatgctattattctggacaaagtgtaatagtagatggcgctaattcaattatgccataacaccataaaagatggagccggattaacacatctgactccatcttttatattaccaaattacgtattaactgcaaacaatccaatcaatagcaatatctataaattcatattataaatcccttaacatatccgacttcttcataacaggccttaatgccagatatattatagatgccacaacaacagctataacagcattaacagatgttgtaactgcacctacctttgcaagagcctttgcaagatcctgaggcactcctaaaagatatgtcttatagaaatatccaactataggatctgctacaacattaaataacataccacatacgcttgatactacagttgctatagtaacatactttacagagtgttccttagacagcttaaaaagcctgtgtgcaacaaaacctactataagtcctatgcacagctttaagaaaaatgtcttaggtgcacttgttacatatgctgttgtaaggtcacttattgtcattccaacagctcctgcaagaccaccccatgtaccaccaagaagaagtgctgcaagaacgcagaatacattaccaaaatggaacattgttctttctgttcctaccggaatatctattttaataaatgttgcaccaacataacataatgcagcacataatgcagcctgtgctataacctttgcatctataggcttcttttcgttttttgaaaacagactatataaacctgatataagtataactgcacctacaatcgctgtaagtaaagacaccgcatatgctttgtttcctttaacaacatatgtattaatgcataatactatacctgcgataaggataactaagcctgccactgtctgaataatactaccttttttctctttcatagcctttcatatcttatacacttattcagaatatcagaatagcatttaagatattacctcctttacataatctattgcttaataagatatatttaccttattgcatgaaagaataatgcaaaacaggtattattaaaagtgtcaatctgatattttttaataatgtcagattggcacttttacatcacaaacaaatattattttcattttactgataatcacgaactaaaaacataggttttatagtaacgatttcatcatattcatcctgttcaacagcaacactcgaattcaatgctcttaaatcattctttaatacagcaagtgcttcatccacctcaactgctcttccttcttctatgatatctatcatcctttttattacaactggatgtgcataccaggctggtaccggaaaatcaggatactttgctatgtaatcctgcatttcatctacagccattttaagatgcgattctatatatcttttattattccttgcagttggaagcacattggcacttgagaaaaagaagattgctgccataccaaacaaaagaaaatatatagagaatcctgcatgtattataagcgaatatataccgtatataagtgaagctgctccaagtaatgttataaaaagtgcaacccacttgtacgctggattactcctatcgtacactctctttcttttggctcccgcactaagattgagacttaattcctctttgttatcaagataatcaaggcaattgttaagcacagcaatgttctcctttgccttaggtgataataccttgactttctttttagccatcaggcgttccttttccttgagtcttttttcagcttctgcactatgaattcttatatatggatagttctgttttatatatgataaaagcatatcaacattctcttcaaacttaaaattacactgtttttcctgtccattatcatattccacaacaagatatggtatagatgcaaacaagccttttccagtaaatccacccttactcatagcaattcttttatatattctcttaacagaagaaagcggtatataatatctcctgtcaaaataaaagctattaagatatatagccttctcaccaaccccacatggtccgaactttctacagttctttttatccttgattaattcttcttttgtcagtgaagtctgtgatatacatctaggtttaaatatcatattccttactcccttcgttacattattacatcatatcatccttaaatatactccggaaaaaatactttggaaaaagctccgaaaaaaacactttgggaccagtcatatgtatacttaacagcaactagtaaatcatttcaaaaacgatgtactagtgcttcatataacatttaactggcccagagttatcattaagattattaggattagtatgtttatttaaatagtttaattagcagctttagtttgctttcttgttgcatacataaatattccaaagaataccgctgcaataataatacctgctggataagctacctttgtaccaagattcagacattcttttgcatagaagaaatatgtcatagacacagcactcataaatgttgctggaactgctgtaatccagtaattcttcttttccttgaacaggaacatgctagctgtccataatactatcatagcaagtgtctggtttgtccaactgaagtatctccatatgatagtataatcaagatgtcctacaaatgcaccaactgcaagtaaaggtacacagagaataagtctttttgtaaacttaccctgatcaatgccaaaccagtctgcgagtgtaagtcttgcacttctaaaggctgtatcacctgatgtgatagggcatacaataacaccaatcatagcaagtgctacgccaacaccacccattgtcttagaacatacatcatatatagcagctgactgtccattagcaagtattgcactaagtcctgtgcttaagccatctgttacttcatatatagagcatcctgctgctgcccatataagagctataacaccttctgcaaccatggcaccataaaatacgaaatgtccctgtttctctgacttcatacaacgtgccataagaggtgactgtgtagcatggaagcctgatatagcaccacacgctactgtaatgaacataacactccagataggtgttgccttaggatgcatgttagtaaagttactccagatttctggtatctgatattctgaatgagtaaaaataccaatagcaacaccaagtgccataattataagacatataccaaatattggataaatacgtccgataatcttatcaatagaaataaatgttgcaataaagtagtaagcaagaataatccataaccagaactcagtgtttgctactacaccagttacgccaccattcttaaacaaagttacgataagtcctgccggaccaactgcaaatacggtacctaccataacgagtaatacaacactgaaaattctcattacatttttcataaatccgccaagatatataccgcagacttctgaaatagaagctccgttattacgttctgagagcattcctgagaagtaatcatgaacaccaccggcaaatatagtaccaaatgtaatccaaagaaaaacaactggtccccaaagagcaccctgcatagcaccaaatattggtccaagacctgcaatattaagaagctgtactaaaaacaacttccactgtggcataacaacataatctacaccatcattaatcttaactgctggtgtctctctgtcatcaggtgcgaatgtgttctctacaactttaccatagacgaagtatccacctatcagaagagccagacaaataaaaaaactaatcatagctttttcctcctcgtttgattgaattgaattcgatgtaaacttaaaatatagctgcatcttttttatttaattattacagtactgttttatactttaattataaacattttataaaaaatttcaactttcaaagttaaaaaaatgtaccgaaaatcttcggcacattttgttcatattgtatatttttatatcacttcgcatatatgtttttagaatttttaaacaataaaacaaatcaatgctttattacatctgattaagaaatggaagtatatcttctactttttcaagtatataatctgctcctacattctctaactcatccttttctgcaaagccatatcttaatccaactgactcaatacctgcttccttagctccaagcacatcatcttttctgtcaccgatcatgattgaatctgctttaactgatactatatctgattcgcttatgtccttttttttcataatctgcttcagtacttcttctataacatcatctttatgtcttctttttcctccctcaagttcacttcctactgcgaaatcaaaatactgttctatatcaaaatgcttaagtatcgttggaacatatatctcaggcttacatgtagctaatgcaacaacatatccttcttttttcagtcctgaaagaaaatctgttattccatcaaacagcctgttttcatatattccctttacagcatatctttctctataatatgcaacggcctttagtgaagcttcatcatccattccatgaaaccttgtaaagctctcattaagcggtggtcctatatatttttttaagactgccatatcattttcttctattcccattttttcaagagcatactgcacacttttagttattccttcgcctgaatctgttatagttccatcaagatctagtaatatgtatttttttctcatataattattccttccagatatattgttaaaatgtaagaaatgggtgtcaaaaccctgaatataataagaattctgacaccctgatattaagtattatactattggattgtaatttatcaactaagattccttattgtttatagtaatattagaaactccttccattccatcaactgatatattcctatctgtcttagcctggattgtgtttgctttcataacatctgttatatcaaagccggtagtttccttgatagattctattgtctttgcaagaactgaaggaacatatcctcccatctgtccgactccagaaccattagctgtatcaccactgtcaataattgtaactttatctatgctctgaagtggcttagcaacctgttctgccatctgaggaagtaccttgacaagcatctccatcatagcagcctggccatacttctcataggcttctgctttcttctccatagcctctgcttctgctatacctttagccttagttgcctctgcctctgctataccagtctttgatatggcatctgcttctgcctgtgcttttatggcaatagcctctgcttctgcctgcgcttctacctttcttgactcagcacgggcctgtgcttccgctatctttctatacttttcagcatctgcatctgccatctgctttgctttttcagcgttagcaggttctactattgttactcttaagctttccttagttctttcagcctgcttctgggcaagttctatgttcttctgctctgatgcaatctgaacctggatctgtgcctctgctatttctttttgtctctgctgtttaagaagttcagcatccatctgtgcctgtataacatccttctgtgttatgttcgactggatatcatgtgcaagctctgccttagcctgtgctgtctgctgttcctgcatataattagcctcaaggacagctttatcctttgctgcctgggctatatctgcctctgcctttaacttggctgactcaccctcctgacgtgcctgtgatgtcttaatctgcatatctcttgcagcctcagccttctgaatttcagcatccttctttctctgggcaatcataccatcaccaagtgcctttatatatccgttctcatcagatatatctgtgatagtgaagttttttacttcaagtcccatatttccaagctcagttccaactacctcctgaactcttgatgagaattcctctctcttctgatacagctcttcaactgtcattgtagcaataatctctcgaagcttaccttcaagtacagcaatagctgttccctggatattatcgataatttctttctcgtttcgtcctgtaaattgctcaatagcagttaatatactgttcttttcatttcttaccttaataaccgctgttgttataacactgattggtacaccctgacttgaaagactgcttcttgttgccacactgagtggaatatttccaagtgatatataatcaattctttcaaatactggtataacaagtccaccaccaccagtgataactctttttttcataccggttacaacgcctgccttatcctgcggaacctttttccacattcttaagactacagtaagaatcagtacaattccaatgactgctgctacaattcctacaatgctggattctgctccatatcccatgtctgcctcccatttccggttgtgcacattatgcctcaaccatatccttaattaatagttactttctgatttactcctgaggtcgtttctttacttaattcttttccccaggtatatcagaatatttatcttcgagatatgaggtactttgcactattacatagtcaccatcaaatcttaagatattaacctctttatcctgctttatagctttgccatctattgatctggcaggatatgatacattagtacctgtacttaactgtacacttattgcacctactccattctcaggtatcgtattacttacaataccttttcttaaaagcagttcttctttatcagctgcaaaattctcaatttttttaagtcttttgattgctgactgaagtgccactgcacatatatatccggctataaatcctattattatgatcgtagtttctgacaatctgccatcaagtataagtcctaagcagccaaatataagtgaccataggcacaggctgtttattgaaaagggcaaaaagtccaatatcatatcctgtccaaactctagctgtaatacatctattgatacaaaatccacaaagccatcaaacaaattaagcacaatactgcaaaacggtatcaggattcctattattatacatgcaatacatatagtatgaaacatatcccctccccctttcatatacattaatacaagtatccatgaatactgcaataccggaatatatcatattccacctatattccagttaatttcaaatattacttaaaatattatttaaaatctgttatatgtattagtctgcatgttttctgtaagctttgttatgtaagctgaatatttttcattaagtacatttgatgcaattgtttcatccttgcttccatcatatgatttatttataaaatataatatataataacaatgtgatgatgtattctctataactgtaacatccccactcttacgctcatctgaaagaagccattctgatgttcctttatccatgccagtacttgtaatctttgaatgaagtgaaccctcatcagtatcatattttgtttcaccatcagcagcatttctcttacacagctctataaaagacttttcatctgatactcctgccacaaactcatccgcttttgccttagcctgctgcatttcaccatctgtagaatctatagctgttattgtaaactctctgtaatcaacctggtcatatgtatctttgtgttcatcataatattccttgacttcatcatccgtggctgtcatattctctgtaagcttactctggtatgcattagccttaagatactccataacatattttttaacattcttttctgtcgcatactgtccaaaactctgcttataataatcagcaacactcttacctgattcagaagctgcatcacttatctgttttgtaaaatccgcataatcatcatcaccagttgtataatcaaaaccgctgttatctgcatctttaataagtgccttatattccttaattgttgttaatgcattatctgcaaagtattcataccatgtttttcctgtctgtgagttagtctggctcttatcattctctgaacttttatatcccatatatgaatagtaatcagccattgtcgtgttgccatagaaggattgtgacatagccgcattcttagacacattataatacatatcaaattctatctggcttatattatcaccatcaacacctataaatctgttatgtatcttataatatctcatactgcatatgaccactgctgctataaggatacctgctataataccagctgttacagccctgaatattatcttttctctctgtaatcttttctcttcttcttttcttttagcgacttttctgtcatatttagtcatcacttttccattatttgtattctgtgaattattaattgatttattagcattattaccagccatgttatcttaatcctccaacataccttcttttattttatcaagctttcttatccatgctgcactacttgcatcactaggcatcctcagatctcctcttggtgaaactgcaactgacccaacctttggtccgtctggcagacatgaccttttaaactgctgtgcaaaaaatctccatataaatgtgcggagccatttatatatcgttttttcatcatactcaccagcaaatgcaagctttgcaattctgaacaacttttcaggaccaacaccaaatcttaatatatggtacataaaaaagtcatgaagctcatatggtccaacaagatcttctgttttctgctgtatagttccatcctcattaggtggaagaagctctggacttacaggtgtatcaagcacatctgttaaaacatccgatagttccttgttttcacatgtatcagcataatatcttacaaggtgccttacaagtgttttaggcactgatgcattcactccgtacatagacatgtgatcaccattgtatgttgcccagccaagggcaagctctgacatatcacctgtacctataaccatgccatttgtctggtttgctatatccataagtatctgggttctttcccttgcctgtccattttcataggtgacatcatgcactgcttcgtcatgtccgatatcttcaaaatgttgtttgactgactttcttatattgatttctcttaatgttgcgccaagcttttcactcatctttatagcattattataagttctgtctgttgttccaaagcatggcatcgtaacacatgttattccttttctgtctagtcctgacaaatcaaatgccctgactgtaacaagcagtgcaagcgttgaatccagtccaccagatataccaataacagcactcttacagccagtatgttcaagtcttttcttaagaccatatgtctggatatcaagaatctcctcacatcttgcctctctttcgttcttgtcatatggcacaaatggcgctttgtcaaagaatctgtcaagcttaagttccctgcttataagctgcggacacctcacacatgtataaccttcagccgctgccttgtcttcatccacaacaaatgtagacattcttcttctctctgaacatattctatctatatctatatctgcataaactgactcatttgcgaacttttcagcctctgcaagaagtgagccattctcacttatcatattatgtgcaccaaaaactatatcctgtgttgattctccttcacctgaacttgaatatacataaccacacacaagtcttgcagactgtcctataacaagctgttttctatacgctgccttacctatagtttcattacttgccgaagcatttacgataagtgtggctccgttaagcgcgtgtcttatacttggtggctgtggtgtccacaaatcttcgcatatttctacagctaccttcaacttcggataattatcaaagctatatattatgcttcctccaaagactacttcatctttatcaagcttaactgtcacattacttttaaagccctctgtaaactgtcttctttcataaaactcaccataattgggtataaacatcttaggcacaagtccctgtatatgtccatccataactgcggcggcaacattataaagctttccacgatgcatatatggaagacctgcaataacaagcattcctttataatctgatgtataatctcttatatctaataatacactcatcgcttcatctataagtgtatcctgtaaaaataagtcattacaggtatatcctgttatacataattctggaaatactgctactgctgtatctttgttataagcctctttaataagagccttaatctgctcaccattatatacacagtcacccacttttatcttcggtgtcagtgctgcaactctgatatatccgtctttcactgcaattctcccttataaaatcattttctatcagtatatcaaatccacaagacatttacaataaaaaacagttatccggcaaccttatattgctggataactgttataaaatactcttacgtattataataatcttaatactattttgaaaatgctgatgaaacctctgtcgccatttcttttattccatctttggctgtttccatcatatccttggcacctgttgccgcatctgttgctatttccttaatacctgttgccgcatctgttgctatctcttttgcccctgtagctgcatctgtcatgatattttctacagtgtttttactattgctgcctgcaccagtattactcccgctttccgaatccgtcttggaaccgcagcctacaagtacagatacaatagtgataaacataactccggctacaaaccatttaaacttatgcatataatatatcctcctttaacattcatagcattatattatctgcatatatttaaattgtattcatgacataaaactatgcctttagctgatgactcagatacttatataaaatcactgttaaagttccatctataagtgcctttattatgttaaaaggtgcaacggcaagtgcaacaaatgaaaacacatctttaatagatgcatttacttttgttcccatagctataagtacatccataggcatgccataaagttctgaatacttaggaagcaggtaccatgcattaagaagcattcctgccacaacaagtatagcaccacctgcaacaagtgatattattgccatttttcttgttttctttgtgtgatatatgatagatgctggaacaacatacatacatcctaatataaaattagcaaaatcaccaacaaaagctgttgttgtccctttcatacaaaaatgtaatataaccttgacagcttctattataacaccagcacatggtcctaacataaaagaacctatgagcacaggtatttcactaaaatcaagcttataaaatcccggtgctaaaaatggtataggaaagtcaaaatacataagtattactgctattgctgaaagcattgccataattacggttttattaactttagttttttcagatgtaaatctgacacctgtcttcttttcaataagtatttcactgcctcttgccacggcaaacactataaccataagtaagattgatattcctacgaattcaatattcttctggattgtttctaataatccctgcattttttctccatcctgttagtttaaactggaaacattgccgacacttacacgcagcactctatgtccttcaagaagcttgttctctattcttataaatacgacaactcttatcttttcaccagtctttgtcttaaaaaaatgttcataacatgcatatctctggtcgataaatgtctcacgaagttctgatattatactttcataatcaatatcaggcacaatatccttgaatacaagaccattcttcatatcttcttctgtatatccaagcatctttacaaaaccatcatcaatctcaattatcttaccacttctcatctccatggcaaaacgtgtaaatgggagttttttcataaattctgctgccataacttatctcctttcaatatgcgggagtactattactcccgctcttactttaggtacattataattacttagaaagtgtcttaagtctttcttcaacctgtgcaagcatatcagaatacttctcaagtttagctttttcttcatcaatcttagcctgtggagcctttgatgtaaacttttcattgttaagcattccgttacatcttgctatttccttgtgtaatttatctttttctttattaagtctttcgatttccttatcgatatcaacaagttctgcaaatggtatataaataactgcacccggaataacagttgatacagcatcatctggtatgccgctcttatcagcctggactttaacatcacttgcatagccaagtgttgcaaagaataccctgccattatcaaatatatttcttatctcttcgttctctgaaacaacatatacaagtgccttacggctaggtgctacattcatctcagctcttacatttctgatattacggacagctgtcttaattgtttcaatagcattttcatcttctgaataatcattgtcctctgtgtatacaggccatgaacttatcataatagactcttcttcatcctgtatattacagaatatttcttctgttatgaatggcatatatggatgaagcagcttaagtgcatctataagaaccttctttaatgtccatatagcagctgttttagttgtatcctcatcgttataaagacgtggcttaaccatctcaatataccagtcgcagaattcttcccagataaagtcattaagcttggcaactgctataccaagatcgtacttttccatattatctgtaacttctttaataagcgaattcatctttgataatatccacttatctgctgctgtaagattagctggtttctcgtctgtagcctttatcttattgtctgggtcgttcatcattatgaatcttgaagcattccataccttattagcaaagttacggcttgcctcaactctttcccagtagaaacgcatatcatttccaggtgcattacctgtgataagtgtgtatcttaaagcatctgcaccatacttatctataacctcaagtggatcaataccatttccaagtgacttactcatcttacgtccctgtgaatctcttacaagtccgtggaataatacctttccaaatggcttcttacccatctgctcatatcctgagaatatcattctgataacccagaagaatataatgtcatatcctgttacaagtacatctgtaggatagaagtagtcaagctcaggtgtattatctggccagccaagtgttgagaaaggccagagtgctgatgagaaccatgtatcaagtgtatccggatcctgctccacgttagtgcttttacactttggacatgtacataccttatccttagatactaccatttctccacaatccttacagtagtaagctggtattctgtgtccccaccataactgtcttgatatacaccagtctcttatattatctgtccagttaaagtaagtcttgtccatagaagctggaacaagttcaatgtcaccattcttaacaccttcaactgcaggcttaataagctcgtccatcttaacaaaccactgctgcttaatcataggttcaactgttgtcttacatctgtcatgtgtacctacattatgaacatggtcttcaaccttaactaaaagtccctgtgcctcaaggtctgctaccatagcctttcttgcttcgtatctatccataccagcatattttccaccaagcttgtttatagtagcatcatcattaagtatattaatctctggaagattatgtctcttacccacctcaaaatcgttaggatcgtgagctggcgtaatcttaacaacaccagttccgaattccttatcaacatagctgtctgcgataataggtatctttctgtctgtaagtggcagatatacttcttttccaataaggtctgtgtatctttcatcatctggattaacagcaagtgctgaatcaccaagaagtgtttccggacgtgtagtagctatctctacgtatcttccttcttcaccaactacaggataattgatatgccagaaatgtcctgcctgctcttcatgttcaacctcagcatcagatatggatgtgttacataccggacaccagtttacaatccttgagcccttgtatataagacctttttcatataacttgcagaatacttcaagaactgccttagaacagccatcatccattgtaaatctttctctgtcccagtcacaagacgaaccaatcttctttaactggcttgtgatagttccgccatattctttcttccattcccatgttcttttaagaaagccctctcttccaagctcgtgcttatcgattccctcttcctttaatgcattagtaaccttaacttctgtagaaatacttgcatggtcagttcctggaacccataatgcttcatatccctgcattcttttaaaacgtataataatatcctgcattgtgttatcaagtgcatgccccatatgcagcttacctgttatattaggtggtggcataacaatagtaaatggttttttgcttctgtcaacttctgcatgaaaatactttttatcaagccacttctgatacaatctgtcttcaatttctgaaggattgtaattcttctctaattccttactcatggtaatgattcctttctatatcctaagaaaatagtttttccaggtaactcctatagttatcgcccgcaaagcattttaatttacagacaacatggtatataacttatgctcatccctgatatattattttcttataatctcaatctgtttaatcataatattacaagcggaaaatgtcaacacgcctctatttctttgatattaaattcactaccacgtaaaagatatgtatgcctgctcccacattttggacagatttttccatatttcactgtttcatattcagacttgcagtcttcacaataagtaactgcatttatcttttctatgacaagctccgaatcttttaacaattcttctttttttattgcccatttccagcaatctgtcaggtatgaatctatcaccgttgacacttcaccaagttccagtacaactttagttatctcagttatttcattgtccacggctacttccttcaaatcatctattatgtgaaatacaacgcctaattcgtgcatattttcaatcctttcaatccttttaattctttcggtcctttcaatctgataaatcgtaaaatattgttgtttagcaaacattcggttggcgaactgacgacataatataagtgaaaatcggtgctgcacatacatcatcgatgccagaagcttcaattgtatatttctaagacttttcatatacgtaattgtagtttccgctaccgttcgatacgggacatccatgtcccatatctcacttccacagacatccgtgtctgtggatagctgggtaattaaggaaaagtctaagaactatcacaattgaacttcaagtgcatctcacgatgtatgcgcagcgccaatttttacttatattatgtctggttgtggcttaatttacgaaaaatgaatgtggatttaattgaatattcagtattgcattatgccgtaacacagacaaatataagctacaggcagtcctgcatactatgcgaaatgcacttgaagtttgattgtgatagttcttagtctttcccttagtaaaccagctagcttcgtacacggatgtacgaagcagcgaagccgcgccatggacggcgcgtctgagcggtagcgtcagttatcatagtttatatggaaaga

SEQ ID NO: 370 - DNA, 21355 bp, Unknown
  gut microbiota DNA sequence
agccgcctgtagcttatatttgtcgtccgttcgtcaccaactaatattcaattaaacaactatttatttttctttcccgcaaactttatcttaatagcctgcttagctccataaggaagaatatacttaagcttatcttcactctttctcatagtactgcattctggaagttctctgttaaggtgtatggcatcgaattcgcactttgtagtacatataccacatccgatacacttgttaggatctactactgatgctccacatccaagacatcttgctgtttccttcttaacctgttcttccgtgaatgtaagctttgcatccttaaacgacttcttatggttaaatgaagtatctgttcctggcacctgtctgctgctgttatcatagctttctatgctgatattattcttatcaagctctatgaactctcttctgttacgtcctatagtaagcgaactatgtggctgtacgtatctgtgaatagatattgcagcttccttacccgctgcaatagcatctatggcaaatcttggtcctgtatacacatcaccaccgataaatatatctggatctgttgtctggtatgtaagcttatctgcttttactctcactccatcaacctgaaccttagtacctttaagaagctctccccatatagtagactgacctatacttaaaaatacatgacgacagtttattgtttttaaatcgttctcatcatactgtggattaaaccttccatccgcatcttttacagatatacatctcttaagaactattcctgttacatgtccatcctctgtgagtatttctttaggtccccagccacagtcaagcttaacgccttcttcgagtgcttcttctacttcttcctctgatgccggcataccttttctatcctcaagacagaacatagatacattataatcaccaactcttgtacttgttcttgcaacatcaatagcaacattaccaccaccgattacaacaacatcaccttcaagtggatattcgtgagtataaccagcctgctttaagaaatcaacagcagatacaacaccatcggcatcttctcctggtattccagcctttcttgagccctgacatccaatagctatataaaaagccttatagccctgtttctttaactcgtctattgtaatatccttaccgacttcaacacctgttttaatatcaacgcccatcttatgtataacatctatctctgcttcaacaatatccttttcaagcttaaatgatggaataccatacacaagcataccacctgctttttcatttttctcaaaaactgttggcttataacctttttctgcaagatagaatgcacatgaaagtcctgccggtccacctccaattatagcaactttttcatcaaagctgccctttgttgatggcacaaccttcttaggtatataacgtgtatccgccttaagatcctgcatagctatgaatttcttaacttcatctatagcaatagcctcatctatagttcctcttgtacacgcatcttcacatctcctgttacatacatgtccacatactgcaggaaacggattttcttttttgataagcgcaagtgcatccataaacctgccctgtgcagccatcttaagatagccctggactgctatatgtgctggacaggctgttttacaaggtgctgtacctgtatcataacagttaatcctgttcttatccctgtagtcctcagaccacatatgtggtccccatttctgttctgatggaagcggcatcttaggatactttacttcttcccctgctttagtacataacttctgtccaagcttcactgcaccagcaggacaatactctacacaccttccacaggcaacacagttttcctttgtaacctctgccacatatgccgaacgtgacatattaggcgtgttaaatagctgtgatgttctaagtgcataacatacgttaacattacagttgcatatggcaaatattttatcctgtccatctatgttggtaatctgatgaacaaaaccattatcctctgccttcttaaatatctcaagtgcttcttccttagtgatgtatcttccacccttacctgtttcaacaacataatctgccatatcacctactgctatacaccagtctgcaggatcatcagcacatccctcatcatatgtttttcttgacttacggcatgaacatggacttgccgcatattttccatcatacttgtctaaccagtaggatatcttttcaagcgaaacagcctggttattcatatcaatagctttctcaactggtataacatgcatgcctatacctgctcctcctggtggcaccataggagttatcttttcaagtggaagacggctcatgcgttcaaagaatcttcccatctcaggatgttcttcaagcactgttgaattcatattggtaaactctgcacttccgggtacaaacattggaagtacatactgcttctcatgttcgggattctcccagttatactctaacaacccattaaaagacatctgttcaagctgcttttcaagttctttttcatccatgcctgttatcttaaccatctgtttaagagttttaggcttacgcacccccatctttaaggctatttctgcctgctcatctgtacatataggtgcgagtccccaatattccggactatctgctgtcagtttttcaaagcctaactttataggcactctgtctgttatcattttgccaagtcttaaaactggctctcttaccggaagttccggatgcggatttttaaattcttctttactcataaatatcctttcctcctaatatacttctaaatacttatatatgcttctattattgtttccactcagctacatgtttcttcagccattcagtccattccttcatgccttcgcccgttttagcagatataggaataacctccgcctttggatttctcattgctatatattctttacacttatcaatatcaaaatcaaaataagacataacatcaatcttgttaataagaacaacatcacatactgagaacataagtggatatttaagtggtttatcataaccttctggtactgaaagtatcatgacattctttaccgctcctgtatcaaactccgccgggcatacaagatttcccacgttttctaatataacaagatcaacatcacttatatcaagctcttctattccctgtcttgccatatccgcatcaagatgacacattccaccagtatgaagctgtatagctttggcacctgtatctgcaatagtcttcgcatcaacatctgagtcaatatctgcttccatgacacctatccttatatcctcctttaacagctctatagtttttgttaaagtggtagtctttccagaaccaggagatgacatcagattcaaaaaaaacactccttttttcttaagttcttctcttaaaagtgcagcacgcctgtcattgctttcaaaagcactttttttaacctcgataactcttacgtccttcaccatatacctccacagcatattataagatatagtatacatcttttacataaaaaaagccagcacatatgacaatgctggctttataacctgtgttataactaactttattaatatactggcatattatgatgtcaggatcaaaagcccccgactttaatacctacgaattgttccgtgctacgcactcccacaattctccccaatattcgcatatcgtgggattatcatcccacttttatgctcatatcggggcgggtcccaaggtctttcacccacctattagcaagctcatgtgagtttagaccttttgaccctggtatcatattataatacagaaaggtaattatccatctcttctgttatctgttcataatccttttccatagcctctgatatctcaccatacaaaagctttctagcagtagtaagcattctgctgtctgccgacttcatacgtcttagttctttagctctgtcattttttatgttaaataatgctcttacaagatgcataagctgtacaagatcctgtgacttaaccatctcatcatatttcataggatgaaccttttcattaagttcttcatcttccctacagtgctttgccctttcaataagcttcttacaggcatccttatcaataatacctctgatcatgaccttggtactgtcaacaggagaatatataattcctttactgtcataaacaggctgaagaaaataataatccttatcaatacctttaataggcggctttccaatattctcaatctcacacacacctactacaccataaacaactttatcattgatctcaaacatatcattacacctctcatatgcataacgcaaaacttattaaatcatctcttatatctgggtgtaattatacatcaattcgacatttttttcaaaatgatattaaaaaaaacataaaaaatacaaaaagcagattattgtatatgccttattacatacacataatctgctttataattaattattttatgtatatatcagtccaataaacagcctgctgatatattaataaagatctacttttccagcaagattaccattagctacataatagcatgcattatcttctggcttaagatacattttaagatcttttatttcaacattctggctctttacatcttctgttattcttgcaacaagtgtctcttcatctacctgcttaccatcaaactggaaaaacagctcttttttaaatgtcttcttcgctgctgtttttcttgtagtctttgctgctgacttggcagttgtttcttttttagcttctgctgctttcttagcagctgttgtctttgtggatgctgttgtcttctttgctgctggctttcttcctggtttcttctttgcagtctctgctttaacttcttctacaactgctttgacctctccccttttttcttccagatctgatttcacttcactaagcttagccgcgatatcttctgtcttctttactgcagcttccttaactggtttcttctctgttgcctttttagccgttttcttagtctctttaacctctgtgctagcagcagcctgattatctactgctgatgtactaccaaatatgtcctttgtttccaccttagttctcatgattcaatcctccctaatcattcactacatgttaaaaagtttctaatagcatctgcagcttcattctcatcactgccatcagcgatcactttaacttcgatgccttcttttaaaccaaatgccataatccccataagacttttggcattgatattttttccttcgccctcaatctcaatatgactatcatatttacatgctatctgaacaagctcagctattggattcttatgtgtcttatcaatgtctgcaaccttaaccaattctgtcatcgttaacatccacctatctttcattaattaattacatttgtaaaatataccgcatacatacgaataagtcaatacccaactcaagtctcacaatacattctataatcaggctttatgtttgttttctgctaacgatacaagaatctgtgatatttaccgacgtatatttatcatcttacctgatagttttatctgcatatcccatatgatacagttcattcatctgttcgtcaaactcaggttttaattcataatcaccaagtattttaatcagctgcttaacctttttatcatcagtagttactttgtaaacattatccataacctctttataaatgctttcaagctctgttacctggtctttctcatcaagcccttcaatataacttaaaaggcctagtgagtaagcacactcgtaatttccagtcatccctgcattatcataaagacattttgcagccacggcagtcttaacaagttctgtaaccataattaaatattcatctccttcttgaacgtctgtatataatctttaactgcttttgtatcgtagttattctctttcataagctttataaaatgtgaacctacgatagcaccatctataatatcacaaagtggttctacatctttagctgttcttataccaaagcccatcataacaggaactgaactgttctttttaacatccaaaagatactctcttatcttcttatggaaattagccccctttcctgtgactcccatctgtgaaacacaataaataaatccttttgcatcctttgtaagcataggaatacgctcttttgataccggcgatacaagctgtattaatataggtgctcctgataccttttcaagtgcggtctttaactcgccctgctcttcatatggaaggtctggtataataagtccatcaacaccacattctgcacacatggctgcaaatgcatccagaccataatgatatactgtattataatacatcatgaaaacaactggtgtactaagcccttcatttcttacctttttcataagttcaaaaacctttgcaagagtagctccgttttgtatagcttcatatgaagcattctgtataaccggtccgtctgcaactggatctgaaaaaggaacaccaagctccattacatcgatacccgcttcctgttgtgcatgcataatctttgctgttgtatccatatcaggaagtcctgctgttgtatatgttataaatgccttcctgccttctgccttaagtgcagccatcttttcttctattctgttcattacttgtttgtctcctctccattaatatatttttgaactgtatgaacgtccttatctcctcgtcctgacagacacataacaatagtcttgcccttatattcgccctgtgccatctttaacacatgtgcaagagcatgcgcactttctatagctggtattataccctcttccttgcacagctccataaatgcatccatacactcagaatctgttatagacacatattgcgctctgccagaatctcttaaataagcatgttctggtcctacacctggataatcaagacctgctgatatagaatgtgcaagctttatatttccatcttcatcctgtaaaagatatgacttcattccatgaagtacacctggctcaccaagcgccattgcagatgcatgcttacctgtttcaactccaagaccaccagcctcgactcctatcagttcaacatccttatcatctataaaatctgcaaacatacctatagaattagaaccaccgcctacacaggcaacaacagcatctggaagtcttccctcttttttaagaatctgtcttcttgcctctgttgatattattctctggaactcttttaccatcttgggatatggatgtggcccaactgcggagcctattacatagaatgtatcttctgccttttctgcccatgttcttatagcttcattagtagcatccttaagtgttgaacttcctgtagttacaggctgtacttttgctccaagaagttccattttaaacacattaagtgcctgtctttctatatcctcagcgcccatatatactgtacattccatgccaaaaagcgctgctcctgttgcagttgcaacaccatgctggcctgctcctgtttctgctataacctttgtttttcccatccttttagctaacagaatctgacctattacattatttatcttatgagctcccgtatgattaagatcttctcttttaagatatatctttgcaccatattttttactgagtttttcggcataatataaaggattttctcttcctacatactccttaagataatatttatactcctttatgaattcaggatccttcattgcctcatcaaatgccttctccagctcattaagtgtattcataagtgattctgaaacatactgtccgccaaattgtccataatatctgttatcctgcattattactcctcttttcttttactgctctttatttattctttatttatattccttatcttctttaactgttcttaaatgaatctgatgttttcactttcgtgcatttaatatgaattcttttacctttttttcatcttttccctttatcaatatgtcatcatattcaactccagtgcttatatcaactacatctggcattgcacatttaacagcagctgcaacatttaaactgttaagtcctccagcaagaaacaatttcttttcttttaattcaagctcttttacgctattccagtcaaatgttttacccgatcccggaatacccgcatcaagaagtatacctacaatcttttccttatgtgctgcctctgatatactttttttaatatcatccatgttgtcatttttgccaatattaacagcccttatgattggaattctgctctcattatatacatcctcataaagctcaccatgtatctgtatatagtcaaaaccattatcctgtatctgcctaagcttgtctgtatcaggagatacagttacagctaccgtttttatgtctgattctttcaacatcttagcaagctttcctgcctcatcgattgttatgtcccttttacttttaggataaaaaacaaccattcctccataatctgctccatactttataagaagtctggcatctgcttcacttgttatcccacatattttcacttctgttttttttccattttcatccagttcttctttttcacattcattgtcatatatacatttaaactctgatataagctcgcatggattttcagcctccataagcacagttcctataagaagtgcatctgcacggctttttgcaagaagcttaatatcatctgtatcagaaacaccgctctcggatacaagaagcatccctgcttttctcatatcatctgtcaccatgtctgatagtttcttcgtggtttcaagattcacctcgaaagttttaagattacggttattaattcctattatcttaacatcaagtgcaagcattcttttcatttcctcttcatcatgcacctcacataacacatcaagtccaaggctgtatgcaagctcatacaactctttaaacttatcatcatctaatatagctgctataaggagtatggcatccgcaccaataaccctggcctcatacacctgatatggatctattataaaatctttcctgatgatcggaagctgtgtcatgtttcttatctgtttaagatattctgtgcttccattaaaatgatcttcttcggtaagacaggatattgcatctgcactttcgctatattgtctgattctttcaacaagctcaattttattattcattaacccatgacttggtgaagcttttttaaattcacctatgactgataatccatctttttttattgcttcataaaagctgttaattttccttgtagaagaaagtgcaagctctttcatcttttcttcgcttattcttttcttatgttcaggaagtctttttaatttatcttctactattacatcaagtatcatacttagtttcctttcctgatattaagcaatatattagttaacttatacgctcattatatcctgccattaacgaaattttctatcattctttttccatgctctgtatatatggattccgggtggaactgaagtcctacaaccggatattccttatgttttacagccattatctctccatcctctgttcttgctatgacttcaagcacatcgggaagtgtatcttctataaccgcaagggaatgataccttgcaaccttcacaggtgaagggattccttcaaatatactcttaccattatgcgttacatctgactgttttccgtgcatgagctttttcgcatatgaaactgttgccccgaatgcctcacctatactctgatgtcctagacatattccaagtattggcttcttacctgcaaaatactttattgcctctacacttattcctgcctctttaggacttttaggccctggagagattactattgattccggattaagctgttctatttcttctatcgttatcttatcatttcttacaacctttatatcattattaaatattcctataaactgatacaggttatatgtaaacgaatcataattatctattaacagaatcataacttttcctccttaacaagggtctttgcaagtgccataaccttgttacaacactcctggtattcaagctccggctttgaatctgcaacaattcctgcacctgcctgaagatataccttgtcaccttttttaatcattgtcctgatagttatgcagaagttcatattgcctccgaaatcaagatagcctgtagcgcctccatacaatcctcttctgactgtttccagttcatctatgatttccattgcccttatctttggtgctccacttagcgttcctgcaggaagaaatgatgacacaagatcaagcggatgatattctccgttttttcttccttcaacaagtgaaacgatatgcattacatgtgagtatctttgtacattcataaactgtgatactcttactgatcccagctcacttatctttccgcagtcgtttcttgcaagatcaacaagcataacatgttccgccctttccttctcatctgcaagaagctcttcttctaaggctaaatcctctgccttgtttttacctcttcttcttgttcctgctataggacatgtatatactttagaatcagtctgcttgactatcatctccggcgaacttcctattatctcaaaatcgccaaaattataataataaagataaggcgatggattaagttctcttagcttttcatataactcaaagcctgtctgttttgtttcaatcgtccatctttgcgataaaactgtctggaatatatgtccatcttttatgtactgttttatcttttcaaccttttggctatattcatcaagcgtgtctgattttttcaatatatgtccatctaaatccatattcactttttcatcgtgatatttatctatgcctgttcttgcctgtctgataagctgttctgcttcctttagggctctttttcttccagcctcattatcctcatcaagcactactgctgtgaatgtttctgcctcatggtcaatagctataaaccttgaagcaagcataagctgtatagtttctattccaatctcatcagggttatcatctggcagtttctcagtgtatcttatatagtcataaccaagacttccaacaagacctcccataaattcaagttcttttgcatcttttattatcttgaattcatcaaaatattcctttaaccgttcaagtggattgccatatcttatatctttcgtcccatcagctcttgttataacaagactatctttatctgactggataatctcttccggatcaacccccataaatgtatatctgccgttttctttatcattgctttccataagaaagcccttatgctctctgccaagacccttgtatagttctatcgctgtttcatcaactatactgactgttttcttataagcctttaatactctcatacattcaatcctccagttaattatgctgcaaaatcaaaaaagtccctgacaggattctttcctgtcagggacgaataatcatatatcgtggtgccacccttattcataaatgtatgtctgattaatccacatattatcatatatgcatcatctatgtatatgataacaaccaggataagccaaattacatcaaaatacaatactaaccagcttaccaatatcaaaccaataatacacttaccttttcccggatactaatatatcctgcctctataacgtgaggacacgtcacaaactacttaatccataaccagaatctttaatatgtgaatctcccaagcccattcctttaagactcccataccggctttccagcaccgccggctctctgtgatgttcattcataaagtactatcttgttcattgactttaatatattaaattgttgaagtaataatatcaccatcattttaaaaggtcaagcattatttttcttttgcattattattttgtattattttctaattttcttacttaatctttgtttctttccagcttacttcctgtctgtcatattcatcctcttcccacttcacattattgcaatcatgctttttacagctacctttttcttccatagctttttttctcgtatccggaagttttttatatgcattagtctttctgaattcagaatacacatcctcatatgccgcctgaagttctttttttgcaggatcatcttctcctatccttgacatatttgtaagatacatatctgaagcttcttccttactcttcgcattttccaactgttttttaaaggcttccctcattgtctgtactcttgcagcctttgcataagtcacaggatcattcatgcgaagatattgcatctcatcagctgtcaacttttttccactctccagttttctataaagcttttcaacaaactttttcttctgttcttctgtcatgcctgttgttggatcaaatatactatccactgcttcttttaaatgcaatcctatagttgctgtatcagcttcattctgtgtctttgtctcttcattgcctacgctatatttcttaaatatattaccggctgttctcataaccttgccctgattgttcatactgcttttataaatagcagtcctgcagctattaactgcgttattatatgttttttcctgtgtattcatactttttctccattcagaattaagttttacatatcgtatatccacttgtctaaccggaataataaatgcaaaaagactacggacagcagtattcatcattcatcaacgaacttatcactgctctccgtagccttgtttacttttctacatccatgtactatatacatcgtatgaatatatatttttcttaacccttaatgctttataaacattgaaatactaaacatcacaatacaaaacatcacaataatcacatctgttaaaatgcgattacttaaatcaaatcatagaagaatattctttaattcttcaaatgaatcaatctttgcaatataatctttattacttacttctccaaaaccatacgctgcatatataaagtcaatttctgcatcctttgctgactgtgcatcaccagatgtatcaccgacatatacaggagtattaagtttattcctttcaatcagtatcttattgctcacacctttagatgcccttgttcttccccagcactcagtgtcttcaaatatatccgaaaaatgatgtgcctttataaatgcctctatatagccatcctggcaattgctgactataaacaatctgtatttttccttaagctgctctaatgtttctctcagctttggaaaaaggacacctcctttttcttcaagatatccattttcaaattcacataattcatccataagtgcatttcttacattttctttttcttgtggaaaaagcttagctgctatgtcatacataggaagccccatgcagcctccaagttcctctattgttattggttttcttgttatttctttatgtcttttaagtataatattccatgcctcacatataggttttgatgagttccatagtgttccatcaagatcaaatattatactgtcatatttatcttttatattcatactttccacctttcaggtatattttaaattgtcacaatttctcttcattcatactgtgccagacaatccgttttattgtgcttcttccttaaggcagctgtcaagctctgctatcagaccttcaagctgctgctcattggttatatcatacactatcataaagcagtcctttgcaagtctgtattccttatcctgaagcatcagttcacctactctgtatattatacctattgtctttgagtctggaccaggttcaacatgctccttatcaaacatttcctgcatctgctttattgtatacttctgcccgttttcattcacttcttcctttgttatgacatcctcatctttatctatactgtctttattctcattatttttagctgctgccagtgcattttttatgtattcaagctcagaatcggcattatctgtatgataatatatattgctgtatgtatagcatgcctctgccatatctgtattgtatgatgaaagataataaaagcccatatttctatagaatctcgccatcgtagctcttgtacaacaaaatctgtatgcctgttttgtcatatcaagatatcttgttatcatattcagatatttataacattctgcaagtccaagatatgaatctaagtcaaccggattccagcacagtgcatttttatatgcatcctctgctcttttatacttctgcagcttaacacaaagttctgcataagttctgtaatattcagctatcgggagctcaggcatcttcacatccatttccggttcaaaatagcatgcatatatataatattccataatatgattagtacacagccatatctgaccatctccttctgactttctgataacaagctccttgtctatcattccagcctttcttacgcctttatattcttcctctattacatcaagcacattaccaagtatgtctgctgccttatcgtaatctcctgacttaaacacctcttcataattgccatatcttttttttagctcattaagcttattgtaatccatgaaatctatctgacctttcattttttgtttttagatgcttttttcttcacatccatagtagtttttctttccggatactctccaataagaaccgccatgctccttggaggcataacaacttttctcttttcactatcaatatatatattttcctttttatcacaggactttaagacaacctcaaaaccattcctgccctcaatcttaggcagtgccaatgcatagttttcccaatgcatattataggcaacatatatgagctttcttgattctttgtcagaatacgtatcagaatacattattcctatctgtctgcagtaattatacatatctgcataccacgcgttaagtccatgaaacgatacatccggataaccagatgacaaactgtcactttgtgtcagtctgtatctgctgtgcagtattccgtatttttttcttatacttataagctgctttgtccagtttaatatctctgttgaatcattgttattcttccagttcacccatgatatttcgttatctatacaatatgggttattattaccctgctgactgtttgtaaactcatcgcctgcaagtataagcggagttccctgcgcaagaagaatcattgcaagagcatttttcatctgtctgatccttaactgtcttactctttgttttcttgttgttccctcttccccacagttccagctatagttaaaattctcaccatccctgttattctcaccatttgcttcgttatgcttcctgtcataacatacaagatcatacaaggtaaaaccgttatttgtcgttacgtaattaattattgcggcattatcagggttgttaagctgcatatctgcaaatgctttcaacatatcctcatcgcctttaagataacgtcttataatattctggacatcattgttgtagcttgccatatgcctgtatacacctttatttttattccagtatatagtcataatctttgtatcagccagctgtgcatcatttgcaagtgcattaagcgatacctcatcgcaatatatgtgaaccccgtctatatggtattccttaacccagtatcttacacattctaatatatacgctgttgtgacatccttaaaaaagaactccataacaacttctattcccatactatgaagagatttaaccatatctttaaattcagtagtataatccacatattcacccgcatttctttcagctttataactataagctgctttaggtgcaaaataaaacccgttagtatacccccagtagttaaccttaacttctctatcatatatattcttaacatatgtactatgtttcatatatatgtatcgtgataaagtctccttatccataaactgtgtgaatctgcccatctcatcatattcgtaagctggcataagctctatcgtggttattcccagcgttttaagatactctgctttttcaacaattccggcaaatgttccctttgcttttacctttgaggttttgcttttggtataacctctcacattaagcttgtacataatacattcatcataaggaatatgcagctgtctgtcatcttcccagttgtaatcagcaagcttaactggacttgtatgtatagtatcttttttttctatgccaaatatttcacattctgttaccgctttagcatatggatcaactatatattcttcattttctttaaaacaataaaagcagtcatctatattaatacctgttatgaatatcgaataaactatccccatcgttttgtgtaattcaagttcataaaaaggctctgtatcattccttttaaagatacatacatacactgctgtatcactatgcattgctgcatagctgctggcatatgcgaaattatatccaccgttaactatattgcagcccatcatacacgggctgcctatttcatatttcataaactcctcctgtttaaaaaaagaaaatatagtttatatcatataagacctgtaaaatcaaaatcaggaataaagctttcctttgctgtatccccttcctggataaacccattagttactcctatatctatagcgtaatccacgacttcatcatactctttatgagttacttttctatacaattctttatattcctttacatgttcaagtggcgtatactggttcataatgcttatgtatatatcatccttataggtatcataaagataacctataaccgctttagagtccttagtacagcccggaagtacaagatgtcttactataacccctcttttcataactccgtcttcaacatagccactctgtacaagctcatcctcatcactatacatacaagggcttccaacctgtcttaccatctcattcaacgcgctttttgccacctccgggtaatcctctgcatgtgaatatttcaaagcaagactactgtccatatacttaaaatccggaagataaacatcaacaagtccatccagtcttttaagagtttctatattctcatatgcacttgtattgtatacaaccggtattctaagcccattatccctcgccttagtaagcgcctgtgctatatgtaaagcataatgtgttggtgtaacaagattaatgttgttagcatgtttatcctgtaatcttaacataatatcagctaatccgtctactgttatatattttccaactgctgccgcagctattttatagttctgacagaacacacaccttaatgtacatccgctaaagaatatagcaccacttccatgttcaccggatatacatggctcctcccacatatgcagtgcagcccttgccacctttatcctgtctggcatcaggcaatatcccatccccgtatgtctgtttacctgacacatacggggacacaattggcagcttatattatcagccgtatacttttttatttcttctgtgtccataataatctccattcatatatccggtttatttacatcatacttttaagcttactaaaagcttcctttattccaccagtttcatttatcagtcctatttttacagcctcttttcctactagtattgttccaagatcctttgtcagcattttggtattcatcatcatggcttctatgtcagcttcacctgttttactatgatgtgctataaacgacactatccttttctgtatcctttcaaaataatcatatgtctgtcttgcccctataatattaccactcatgcgtacaggatgtattatcatagttgctgtaggcactataaatgaatagtctgcactaactgcaagtggaacggctatactatgtgaatcgccaataacaagcgatactgtcggcttactcatggatgctatcatctctgcaagcgcaagtcctgcactgacatcgcctcctactgtattcataagaaataatacaccacttatactatcatcattctcaatagctgccagctgtggaagaatatgctcatacttggtagttttacttgtcgctggaagaatatcatgtccttctatctcacctattattgttataagtttaaccgcattgccatcattatcccccttaagtgtcacctgtccgtcacacatatctgtcttgacattttcatcatcgttcatatcataccatccttttgataagtttctacagaatatctgtataccttatagtctgctgatattaaccatattattcatcataattctccattcttgcgtgtgaaaaatcttatttttcatgctaatcactttatcactatctggaatctatccaccttacgtccatatattcctgcatatccatcctgtccgtcatttctttcattatctgtctgatatggaaaatagtcatttcctgttgtacttaccctgtaatatgcgtatttgtaaccattctctgtaaatgcctggtaatggggtccttcattatataacagcgtgtctggtgtgtaataatatacttcaaccgcctctatactatatccgtttccggcataaccattataataatctgaaatatctgaattgcggctatcaacataagcaagccatcttccattagaatatactctgtatactgcatatcctatatctgttgataaagttattcctgttatatttctgcctcttattccagcatagtcttcatcgttaatcacctgcggaagccagtaatctccgtctatctgtgcctgatatatcacattagcctttcttcctgcctgtgcactggtttctatataagcatctttatatggcgatgaataatctgcataatatatatttccatcaaattcatgatcacctatcctgtatgctccaaactgccacatcatgcagtccatatccggctcttctacatcccaatgtgcaagccacatgttaaagccctcagtcatataaagacgattagtatccaatacatttttataatagtcataattagcatatacgcctgttatataacctcttgaatgcatttcctctatgaatctaatacagatatctgtaagcagtgtcctgtcttcttcactatatacatccattccgtgatttttcttgtattcatccgcatcctccatatcaaaccatacaccacgaaccgggttacgtcctttaagcatccgcaatgtgtgggatatttcagactctgtttcctgcatcgtcattgcataactatatatatatactccatatggaataccaagcctttcacattcatccatgttttgtacagcctgcttatcatcctgatatgcataatcatcaccatatccaatgcgtattatcacaccctctatgtgttcctttgcactatcccagtcaataaggccatcatgaccacttacatcaataacaacagccatagctgcattattcattgtaaccgccattatacagctaaggataatcacgaaaaacatttttaatatgcttttatatttatatttaccacgcaccatcaaacctcctttttagaattaaagaatataagcattgttacaatgtctgggaaacaatgctatattcttaatttatcttattctaaaaagcaggcttatgttctatatattcactcctgacccttattattctcatgtatgcgcccaagcagatataaaagctgtttaaatatatcctcattattcagtactattatacacagctgttctctggctcttgtgacaacctgataaaaaaacttttcaattatgtcatcgttatctccttcataatctgcacacaactcaccatattcattataactgaatttgccgtctatgaccgttaacactttatcaaactcttttcctataaccttgtatgtattaaatttccttgttttatacatggtgctggcatttttataggatttctcatagtctatgtatatatactgtttagccttatagtatgccttaagctttttaaactcgtttatgctgttagcatagcatatagttacacaatcatatctataaccttttcctcgcttggtaagatcaaacatatttcttataaactctgataattcaggattcgttcttatcctgtccgaaagaaaatacttttcatcagctatatcttctattcttttatccatagcccgtttctgctcctgacgggacaatatctgttcgcagtcataaaacatcactattttggtattaatacagctgtctgcagctttcatatccagattcacagccgcactttctataatccactcaaactggtcatcatgtatacgctgtgtttcatcaacaagtatataagaatatccactaagcatatccttacttatcagatctttagaagttattatatctgtacatggtatagcatgctctagtatatctatgttaggcgtacgtcttccgaaatgtattacacatttacgtacattttccggcagttttcttacagtgtcatataaaagcagggtttttccagttccagcctcgcctttaactgaataatactttttatcatcatctcttaaaagtcctgcaagaagttttctgctcatagcctcctgctggttagtaagaaagtactgatgccttgcaaacctttcaggtgagttgacaggagaaataagataatcctttgctttaaaaagactttctatattatttttcatgcattttttaaagcttctgatatcctgtgcaacgcttgaaaaatcagatacatatagtttattatccgtatcaagcttatatactgtattcgtatcaagaatataggtatatgaaataatatctgttgtgaccggactaagataatatctgtttcttacaagctgctgttttattctttcttcaccaacatcctcacttttaagttcaatattcaatattcttttcctgttcgatgacactttaagcagatcaaactctttactgatatgtgctatcgtatatgaataaaaaaagttatccagatcttctatctgtacacctgatttcataagctttgttacaagctgtactaaggactccttttcccttatcctcgtcctctgaaagtcctttctttctgacatgatatattcatattctgcaaatctgtcgttatcttcaattcttgttaatgtataaagattaatagaattcaacgttaaacctccataccaatcataaccacctgttattatacatcatagcataattat

SEQ ID NO: 371 - DNA, 11917 bp, Unknown
  gut microbiota DNA sequence
ttttaatatactaaaccttttcgatatattgtagcttttaaaatatttacttaaagtacttaacacctgactcaaatatcttaatatcctgttcaccatatatattaatagcaacagaatctcctcgtctttctgaatgtgccatctttcctaagcagcgtccatcaggacttgtgataccttcaatagccatataagagccattgacattccactcttcatccatagatatattgccttctgggtcacagtactgggtagctacctgaccattctcaaaaagcttgtcaagccattccttaggtgctacgaaacgtccttcaccgtgtgaagctggattgcagtatactttaccaagctctgcacctgctaaccatgggctcttgtttgtaacaacctttgtgtataccatcttagatatatgacggtttattgtattaaatgttaatgtaggggaattaacatcctgtcctgttatctttccattaggtactaaaccaagcttaataagtgcctggaaaccgttacatataccaagtgcaagaccatctctttcattaaggagcttctcaaccgcttccttcatcttagcattacggaatgctgttgcaaagaacttagctgaaccatctggctcatcacctgctgagaaaccgcctgggaacatgataatctgtgcctggctgatagccttttcaaactcgtcaactgactctctgatgctttctgcatcaagattcttaaataccttaacgatagtatctgctccagctctttcaaatgccttcgcactatcatactcacagttagtacctgggaatactggtataaatacagttggctttgctactttattcttacatatatgaacattacctgctgaatatacaggtgtttcaatcttatctgtttcctttgttacctttgtagggaatacatcctcaagtgtatccttccatacacttaaagcttcctccacgttgatagacatatctttataagtaaatgctgccttcttagtcacttcaccaatcttagtgtaagaaaccttaatatctgaaagcttatctgccttaacctctgcaactatgcagccataagctggtgcaaaaagttcttcctctgatactgatgaatctactgcaacacctaatctgttaccaaacgccatcttgctgatagcaggaactaatccattagaatcaagtacatatgctgaaacaacagcaccagactggatagcagcatgtattcctgcataaagctctttgatctgtgagaatacaggaagatcatacttatccttttcaatatcgaatcttacaagtatattacctgcttccttaagctctggtgtaataatatctttttccttagctacatctattgcaaatgaacataatgtaggtggtacatctatatgttcaaatgttcctgacatagaatccttacctccaatagatggaagtccgaagccaagctgtgcttcataagcaccaagtaaagctgcaaatggctggctccatcttgatggatcctctgtcattcttctaaagtactcctggaatgtaaatcttatcttagtataatccccacctgctgccactatctttgctactgaatcagtaaccgcatacatagcaccatggtatgggctccacttagaaagatatggatcaaagccataagccatcatagtaactgtatcacacttacccttaagaacaggaagcttcgctaccatagcctgtgtttctgtaagctggtacttaccaccataaggcataagcactgagcctgcaccgattgaaccatcgaatctttcaacaagtcctttctgtgaacattcattaagatctgcaagtgtcttaagccacttacccttaacgtcctcaacttcctttgccttaagataattatccttctcatctggtatatctacaagtacagaagtttcctgatgtgcaccgttagtatcaaggaaagctcttgatatattaactatatcctttcctctccagttaagtacaagtctggcttctttagtaactactgcaacttctaccgcctcaagattctcttctgctgcatatgcaaggaattccttaacatctgaaggatcaacaacaactgccatacgttcctgagactcagatatagcaagttctgttccgtcaagtccttcatacttcttaggaaccttatcaagatcaactataagaccatctgcaagctcaccgatagctaccgatacaccacctgcaccaaaatcgttacatttcttaataagcttagtaacctctggtcttctgaaaagtctctgcatcttacgctctgtaggtgcattacctttctgtacctcagctccacaagtctctatagactcttctgtatgaaccttagatgaacctgtagcaccgccacagccatcacgtcctgtacgtccaccaagaagaataataatatctcctgggtctgaattctctctcttaactgcacttcttggagctgctgctataacagcacctatctccatacgttttgcaacatagtcagggtgatatatttccttgacataacctgttgcaagacctatctggttaccatatgagctgtatccatgagctgcctctgtaactatctttctttgtggaagcttgccatgaagtgtgtctgctactggaactgtaggatcagctgcacctgttatacgcatagcctgatatacatatgttcgtcctgaaagtggatctcttatagctccaccaagacatgtagcagcaccaccaaatggctctatctctgttgggtggttgtgagtttcattcttgaagttaacaagccattcttctgtctttccatctatttcaactggaactactatagagcaggcatttatctcatcagattcttcctgatcatctaactttccctctgcctttaacttcttcatacccataagtgcaagatccataagacatacgaacttgtcttttctatccttatagataactgatctatcagaaagatacttattgtaagtttcttccataggagctctataaaaaccgtccttgaatgtaacattctttaactctgttgcaaatgttgtatgacggcagtgatctgaccagtatgtatcaagcactctgatctctgtcatagatggatctctcttctcttcgttcttaaaataatccttaataaactggaaatccttaaatgtcatagcaagaccaagtgagtcatataaagccttaagcttatcctcatccatgtccttgaatccatcaaatataataacatcagctggcgtatcgaacttagtaacaagagtctgtggaatattctcatctgctactcttgagtcaactggattaatacaatggtttttaatcttatccttatcttcctctgtaagttttccagagataatataagtagttgctgtcttaattaccggagtttcattctcgttaagaaacttaacgcactgttcagctgaatctgctctctggtcgaactgtcctggaagatattccacagagaatacatagtcatcatcagcagctgcaaattctgtttcataaacatcatctacaggtggttctgaaaatacagtagtaagtgctttattgtatgtatcatcagaaagattctcaatatcatatcttataagcactcttacatctgtgatatcctttattcctagatatcctgtgatttcatcgtgaagttccttggcattaactgcaaaaggtttcttcttttcaacaaaaactcttcttacgccactcatttttattaattcctttcttaatcagctgtaattctctcactattattgaaagaatgtaaaatattgtaacatattaaaaataaataaacaagcttgattattcatgcatgcattttatatgaattattattcatgcatacgtcttataatcttataaacaacctcgttactcataaccataggtgctgtatgggcaaagaatactattccatctgtcggcgatattatctcactttttacaaagccttcgcacggatctatgacctgtcctataacctcgttatgtactaccggatcacccggttcttttaatcttttatagaagcctgcatcgtaggtcttaactgctgaaagatcatattcgtttataacgctggctatatatccactatgattattatactttaagatacccattcttgtaaggaatcttagcaccgaagatacagcctgtcttgccgatttttcatcaactatatctgtactgtttgtgtatatagaaaatgcattcgttccattcatctgccagttataattaagtgttgcagtatccataggctttggctttcttataactacatactgaagaccgaacagatttgcaaggcttgcactctgataaccagtttccatcatacggacatgtgggataaaatcaccaggcatataaaagcttgcaaactgtatcccataactatatcccctgcagctttcaaatatagctgctgctatctgctttgttgtatctcctgctgcatcaccaggaaacattctgttgatatcaagattatctataggccagaatctcttttcaacattcatggagaatctgtttgctgatggtatcacaagtatctcatggttatgcgatatcgctccatgcgcctcaagctccttaagtaccttaataagctgtgagcatatatacagctgctgtatttcgttgcctcttaatgctccgactatacatgcagacttttcgccacctccaaagctataaccttctatctcaaaattctccctatatataccctttaaactatataatatttcttttttcatgactttctgcctccatgcactctggcaagaagtgctcctttatacacaacaggattttcccttagtgtaaacactattccatccataggggattctacatgctgtataatccttccttctataggttctattatgtcacctataggatcacccatatgtattactccacatgaattaatagctggaacaaatataccactttccctggctgtaagaaagttaacctccccctctgttgatatgataggctcccttacacttaccggctcatcatcccatataccaaggttaatacaaagattaaatatgccatcaagaagctgcatactgtattctttgtttattctgtttccaacacccatctccgctacaagtgttggaacacccatatggttaagactatatgcaagtgtagcatcaagcacagttattgatgaaaatatccatacaaagtcagcattaagcatctttgcatatggaagaagcctgtctacgttatcatcgttaagtcttacctgtggcatttctcttacaaatatattacttgagtgaatatcaaggcagaaatcacttcctataatatcattcactatacctgcagcaacactttctgctactgcaccgttattatcacctggaaatactctgttcatatcaagctcgaacataggaattccccttgtacctatatctattccaagtggattgatatccggatatatgtctattattccttttagcttttccggatattggttaatccgccttataacctcataacatatgtattgtccatcaagttcatcaccatgaattccagtaactatagatattcttggaacgttatccccatctttataattctttggcgtaagtctgtttttccttacaaccatactctcgtgtactggaagctctattgatgctacctctttaatcatatatttatactacctcttgtttttcttattacattgaatcaaaattccttataattattcctgatgatgttttcttaagtgcaatgtgtgtgaatactgagcttgttacatatttcttgtcacccataaacacacggctacccggatatatgttcttatctatctttacaaccgctctttctgattcttttataagtgaataaagatatctgccctgttcctcgtagcttgccttttcagccttctttactatctttgtctggaatacctttctatgcagcacttcatcaaacttatctgaattcgcattttttaatatatccagcttatataatgcctggtcatatcgttctatttccgaatctatttccttaatcttcataataatctgtgcatactctgaattgatatttttagttgcacctactcttataatcgtcttggcaaatgcatcactgccacaactttttacagtaatgcctcgtactcctgtaacatcaccacctataacagatccgagcttgccttcaaggtatacatttccatatgccgtagcatttgtattaagcatataatcacacttaatatcaccatggcttatgactcttgcattctcgaaaaatcttgctgatatattacctccagcttcgatatatccattggtctttgcattgacaccatccttaatgattatatccttcccagccttaagcactgcatcttcaacataaccacctataaatatgttacccatggcattaactgtaactccactgtatacaccaccatctatagtaacatctccattaaaatctatattacttccatcaagatcccctgaaacactgtatacactgcttacattaagatcgtaattacggtattcaacctttccatcaatctgtgcataatatgtgttaccatcatcagataccgtaaagcctttaccgcgtaatcttggactaggtcttcctggcttaggtacaagaagcttaccacacacatcataaccaaactctcctttagtcggttcaatatattctgcaagcatatctcctgagcttaccttttcgaaaagctttacattaaagtagtcaaccgaaccatcttctcttaaggtcggcttgttatctctttcatagttctcatcaaaatgaaatatatagtgtccattctcgccgttaactgctggcttcccctctgctactgtaacatctatttcatatatcttttttaaaatgacatcacgtattttcctcgcatctatacctgttcgcacacctgctgctgacagtttttctataacctcttcatatgtatatgagccatcctgtcctattgaaccaaggacaatactcgcactcatatgatcttcggcaacactgacaactacattcttggtattcaattctgtttgtttttcatatacattactcaaatctgaatcctccaatcatctatagttctctgttttactcatactttgctcttaattatccttatatatcaacaactccgatggatctacacctttttcaagtctgattcttatctgttccatctgtctgaatgtatatcttggatctgcataaaggcttacatctacgccactttcaagccctagcagtatctcctggctctgtagttcattcagctgttctgattcatctgtattcttattcccagctttcagtctttcctccttcatccttactgcatcgataaaaggatctgcatatgaactaacatcaatgccttcttccaaccccagtcttatctgttccatctgcccggaagaaaaacctatcatatcatactttgatacatcaacattattctcaagtccaagccttatctgcttcatctgttcagatgtatactcatgcagcatgtattttgatatatcaacgcattttataagtccaagccttatctcgtttagctggcttgcattgtaattttttttgacaaaaaatgaaatatctatatcatcttttttagaaagccttatctgccttaatacatctccaggataaccctgattggcatatctgctaagatcatatctgtacttaagtgcaagtcttatttccctcataacagaataatcatactttggattgcatataagtgaaatatctataccttcttttatgccttcctttatctgctccatctgcatataatcatattctgtgctggcaaaaggtgtcacatccacaccttcctcaagtgcattccttatgaccttcatctgtctttcgttatactcttttacagcgtatatggatacatcaacaccactgttaattccctttataatctctaatgcctgcaaatcgttaaacccggcgttcttccactcctctataccagcattagaattaatcatttcttttaaatttttttcttccatactgtattctccaaccaaaataatctcataattaacaattcacgtttatattatattacaaataatatcatatgtctgacaatttatcaatcatcagctgttatacctttccagaaatcatcaatatattctgaaacacaactggcatcacacggatatatcttatcccattctcttggatattgtaattcatattctttcgttaagaacctgtcatcaagaagtaatataatccctttatcattatctgttcttataacccttcctgccgcctgaagcaccttattcatgcctggataaacatatgcatactgatatccattcttcccatgtgaatcaaaatagtcccttaatatgttgcgctgcctgcataccattggaatacctgttccaactacagccacacctataagtgcatcccctcttaaatcaataccctctgaaaatatacctccaagcacacaaaaacctgctatatcagtcttttcattttccataaaaagtgaaagaaagctctccttatctgcttctttcatattagatggctgttttattatattgtaaacagccttaccttcatattctttttgttgttccttttcttcttgtttttctggttgctctttttgttgttctctttgttgttcttgtcctttttttgctgtgttttcatcatttaaagcagctgataactccaatatcgtattttcatatttcttaatatatatatcatacactgactgcatataactgtatgatggaaaaaatatcatataacgtccatgccttgatgtaaccatttttcttatataatcagctatctttgtatattcgtttatatttcttcttgtatatctgctgcttacatccctgcctactatgactcttttattcgatgtatcaaaaggtgaatgtgcataaactgcataatcacttatatcacctgatatcatctccttaaaataattgactggcagaaatgttgcagaaaacataacagaagcctttccctggctcagccttaaagatatattttctgatggatcaacacaatacagatgcaataacatatcaccatctttatcaagctctgcatatgttacgtatttatcatctgcacaatcatacatgttaagaaaatgtctcactttaaagaaaaaatccatcatctcatcacataccggattcttcttatgcttatcaagaaacttctgcatgtaagaaaagcatgccgaaagacttgctggaaatgttccacaattatctacgattatatattctttatcacacatacgcttaagtgaaagcatgtatttattacacttttcaagagaagatgcaagtcttttatcaatgtctttcacaagatttttacacttgaggaagtcttctttaacaagtgttgcactatacatctgccttgctctgtcaacaagattatgtgcctcatcaacaagaaatatataatcacctttagcaccatctgaaaaatatctcttaagtgatgcatccggatcaaacagataattatagtcacatataattccatcacaccagtatgatacgtcaagtgacatctcaaaagggcataccttatgtttgacggaatactcaagcaccttttccctgtctatcacgctttcatgggtgataatgtcatatacagcatcgttaattctgtcaaaatgtcccttagcatattcacacacatcagggttgcagtttctttcatccatatggcatattttatccttcgctgtaagagtcactgttgtaaaatgaagtcctttatctcttaatatagaatatgtttcttctgcaactgtgcgtgttatagtctttgatgtaagataaaatatcttgtctgcaagccctctcccacatgcctgaactgatggatatactgtggatatagtctttccaacaccagttggtgcctgtatataaagcttttgcccagattcaatagtcttgtatacacttgcaaccagattcttttgtcctgctctgtattcaaacggaaagctaagcttatgtattgactcatttcttataatcctttcgtcaaatacataatccatccatcttttaaaaccgtcaacaagcttttcaaaccagctgtttattctgtttttatcatattcttctgtgaatcttactattttttctgtttcaggattacagtatgtcatctgaatatttatatgttcaagcttatatctgttaaggtatatgtacccatacacaagtgcctgggctttatggacataaactggttccttaagcttcgtaacatccgcctgcatagttttaatctcatctatagtcacatcacttacaggtattctgtttccatcatcatcttcatcaatatcagcaataatgccatctgccctgccctcaagcttaagcacataatcaaagcctttatcagaggtcagtggtatctcttgtcttaaaagcacttccgcatggtatgatgaacccatggaatgttgtatctttctatgaattcttgctccttcctgcataactcttacatccggaacagatacatccctgttatctatatcccctgatgcacacatgaattcaacaagattcctgactgatatcctaaatgtatcatcaacagctgtatacatatgcgttacctttctttcctacgcgtcttacaaccccaaggtagttaagtatattaaggctcagccttgccgtatcttcatgtaccatggcagcttttgcgaaatcctttactataaactcatcctcaaggtctattggaacaaactgcatgtaatcctctggtctgtcaagctctactatttttcttacacctaacggaactctgtcatatcttgttgctcctctttttcttgtataattccatccgttaagaagcttgtattcttctatatccatgagtaccagatgaactgaaagattcggatgtttcagaagattctttatcttataaagttcaaaaaatgcatcatattctgtatagtgccttggagattttcttttcgcacttatatcaccactttctggatctatccagcttatccacttattatatgcacatggataaacaaccgtaacatgatattcttcaagaaacaccgcaagcttatctcttagcttgttaagctgtcttgtctgtatctctatgataccactgtcattaaatatgtctgcataatatccatctatagccacttcatgtttattctcatccggctcataatagttcttaagcactgcatgcaatgtcttttccgacaatgtacctatgcctttatcattatgtgctgttcctaatatcttctttctggctatattaaattcatcataatctatatactcatctgcggatatatttctttgcttagctttaccactacaatcgttacactttttcctcataatatcagcaccatataccaaacgtatgttttaatataattaacagtatacaccagagggcatacaatgacaatattgttgtttaattgaatattagttggtgacgaacggacgacaaatataagctacaggcagtcctgcacactatgttcaatgccagaagcttcaatcgactgtctctaagacttttcatataggtagttataggtgacgctaccattcggacgcgccgtccgtggcgcggcctcattgcttcgtacatccatgtacgaa

SEQ ID NO: 372 - DNA, 185499 bp, Unknown
  gut microbiota DNA sequence
tagggatttttttaatctttgccatcataaaaaacgatataacagcatatactgttatgttaagtataaacatgaccggaaatatatgcggagcataatagcacgatatccagcctgacatttcctccataaacactctgaacaggtagttcataataacaactgataatcctatactcaaagctactgacaaaacaactactattgtcgttgatgttacataaagtctgcttatctccctgttagaatatcccagtatctttaccattgatattgatgttgtattcttctctactataagctttgtaagaaggaacataagaactgcaaacaacacaactgcaaatatctttacaagattaaatgtctcacccatagaacggtctaactgtcttgatacctttgtaaggtcatcaagtgttatctgtgttgcaacatatttttcgtctatatcaagaatattatctgaaaaatatccgctataataatcctctgacttatcaaacacattcttaaatgctgcatctgacataaatattgcaaaggatgatggataatcatacatatcttttactgtaaattcatattcgttatcatcatacttttctttaagcgttatcttgtcgccttttttaatcctgaacttgtcagcatatccatttgttatatacacttcattatctttaagagaggctgtgtttatatctgcatatatgctgttgtctttcacaccatatacaagtacatcctcactctttaatcttccctctatggtagccaacgtctttacacagtatttttcagcagcattatcatctacatcgactaaagctttaagtacatactgatgctttgctataagcttatctgttatctcattctgataatgtgtcagcataggaccaagcataatcccgaacaacaataaaacattggcaaataatattccaataaacaatgttatataattaggcatattctgtattattattcttaatctgaatctgttaaaaaatccgaaagcaggcagtctcatagcctttttcttctgttttcctgaaagatctcttcttaaaaacttaagtggcgaaagctttaatctgcagcctattattacaatattgataacaagcattatgataactggcacaactgtcgtaagtaaaaatgcatctgcattccataatgtatgatatgttggaagtgaatagcttccatagtaagtagctacaaagatatccttaaataccgtatatccaagaatatttcctacaagtgcaccaaatatagtaacaatgatcggaagaagaatataatgtcttaaaagttcacctcttgtatatcctgatgcccttaatgttcctataacatttgcctcttttactatagtgttattagttgtaactgcaaaaacaaatgccatgataactataagtacatataaaagcactatcatcatagacctgtcgctacctatatcatctcctgtaaaatgtatagcctgattaatatactgtggtatgtaattaaccagtatggcatttgctgatattgttttcacaaaatcatcagccataagcttagcctctttatcatcttccggcttattatcgtaaagccatgaataaacataatgtatatgtgtatcatcatacgcatcaaagcatttctgcgacacaacacctacaccaaatttaagtgaatcaaacatggtatctgagttatctgaaaacagactgctatagtcagaaagtgcaacaagaccagttactttaagtatacgcgagcctactgttaatgtatcctggactttgatatcattatttaccgcatacatcctgtctattgcaatctcattaatgtcttctggcagactgccctccataagatccactttgtcaacctcttccctgttaacatagaatctgagcgtactctgactgtcttcgtcgtttttaatattattatgccttacaacattctcttctttatagaaattctcatatatagtaacattttctttttcaagtttatctataacgctttcatcagcctttgaataaagctcaaaattaccatcttctatattatacttttcaaagcttttattatatgtatcatacatacttccatcagcaatcagaaagccacttataagcccgattacagcagtcataaatacaaatataactatgtatttggcaagttctcccttaagctctcttaaaaaacgcttattcaacggatttctcatagcaaataaccttacctttccttacttgttccgtttttaaactttatataaaatcttacacatcattttcagttattagcactcaagctttccagcatctattttgtcacctgaaaattgtgctatcaatccatcttatacagatattaccactcaagatttctggcatctattttgtccttattgacaatattatccataatctctccgtcccttagctttataactctgtctgccatattctgtatagcatcgttatgtgtaaccattattactgtatttccatattttttatttacatcttctataagctttaaaatctcctttgatgtatgataatcaagtgctcctgttggttcatcacatagaagtatatccggatttttaactatggctcttcctattgcagttctttgctgctgacctcccgataactggttaggcagcttatatctatgttcaaaaagtccaagtgtattaagcagttcatctatatcaagtggtgaatcactcaggtaagctccaacttctatattttccttaacattaagattaggaatcagattatacatctgaaatacatatcccagatgttttcttctgtatcttgtaagttcactttctttcatatcctttgttttttcattgttaatacttacgtaacctgaatccgcatcatctatcccacctattatgttaagcagcgtagatttaccagaacctgatggaccgagcaatacacatatttctcctttcatgacctcaaagttgattcctttaagcacctctactttagtagaaccactgccatatgacttctttaaatcttttacagtaagaaacatattgcttcctcgctttcctttttatatttatgctgcctttttatgtgacaatttttcagcctttttcagctttttttcaatcttttttcagcttttctccagctttttttgcctttttggggccttctaatgttgtcttttttgtagcttagctagttagataaggctaactctacgttaatattataatatctttgcgctgaaaaataaacattgcaaatgagaatatatatcattaagcaggatatctgggaaattatggacatttaagtaacttgttgtttaattgaatattagttggtgacgaacggacgacaaatataagctacaggcagttcggcaaactatgttcaatgccagaagcttcaatcggctgtctctaagacttttcatataggtagttataggtgacgctaccattcggacgcgccgtccgtggcgcggcctcattgcttcgtacatccatgtacgaagctagctgggtagctaagaaaaagtctaagagtcagcacaattgaacttcaagtgcatttcacatagtatgcagaactgtctgtagcttatatttgtctgtgttacggcataatttaatactgaatattcaattaaatcaaggtggcgaaacagggcgaaattgtgcgtaaagcgcacaattccgcccctcatgcctctcccctttgatttaaccacacattcattttttgtaaattaagccaaagtcagacagcatatatgagaaaagcaggtgcgcaaacatcaaaagatgcacttgaagttcaattgtgatagttcttagacttttctttctctacccagctatccacagacacggatgtctgtggaagtgagatatgggacatggatgtcccgtatcgaacggtagcggaaactaccattacgtatatgaaaagtcttagaactatccaattgaagcttctggcatcgttgatgtatgcacacctgcttttctcatatatgctgtcgtccgtacgttaagaatgtgtgttaaacaacaatattcctactttatcaacccattcaacctgttctttataatcgtgctgcctattgttgttataggtctttttctttctccagccggttcagcctgcttttctgcttcgactatacgtttcttaatctgttccattttattatcaagctcagcaagctggtctgcataactggatagttctactgcaagtgtctctgcctcactatcaggtatgttctttttatatcttaacttgtgttcaacacttgcccaaaagtccatcgcaatagttctaagctgtacctctaccttcatataacgtttttcattctgtaagaatattggtatttctataataacatgaagacttctgtatccactttcctttggatgtttaatataatccttcatctcaacaagtcttatatcatcctgcttaagcagacaatccgcaagcatatatatatcctctgaaaatgaacagataactcttatacctgctatatctcttatattttcttctattgcctgcatagtaaatgggatttttttcttattagctttcttgattatcccctctgttgactttattcttgtcttaatcgattctatcggattcctgtcatactgcaatgaaaactgctcattaagtaccttaaacttagtttctacctccataatagcacatctgtaatatgccataagctggttaaaaggaagtgtattctcccttataaagtcaagtacttcatctgacatcagattatcccttataaatctttcttcttcctgcttaaaaaattcttctacacccatgtatacatactcccaatttatcttaattatcgaaactgctatctttcttattaggctatcccacaagctgcaaaatgtcaattacccatatataaaaattattgtcctatattaaccggatataaaaaacaccaccatatataaataagacataaaaaatactgtcctaggtatgattcaactcttaatgttggattaaatctcccaggacagtaactgatattatctgttatataaatataatggacaggattgtggtaatgcgtaacacaaaacaatccgtaggtatcaaagcctgtgtcttctgcccctttgttaactagtacatcgcgaaataactacaccattcatttgcctgctaatccgcatcctgcgcgattggtatagttatttaccaaacgatgtactaacttaagaaaccgttaacaatctgctcctcagcctcctgctctgtaagtccaagagtcataagctttattaactgatcacctgctatcttgcctatggctgcctcatgtatgagacttgcatcaacactgtttgccttaagctgtggacttgctgtgacacatgcattatccataataatagcatcacatgagctgtgtccggcacaacgtgtattaccatttattctgctgacgaattcctgataactgttatttctggctacacttcttgatacaacatctactgatgcatcctcaccgttaacatccatattaaactcagtcttagcatgctgctcacctgtagtcattatattttcatgaatagtaagcttagagccagcagccatatcaccacttgtctctctaaatgtgtcatcaattcctgatatctgtgaagtctccatatccataactgctccatcttctagatgtactatagttgtaggattcataagacgctttccacgtccttcaccttcaccataatgtttctctatatatcttaatttagcattctttccaacataaaatgtatgaatcccatcatgagttgatgtttcatcaccacagttatgtatgccacaacctgcaattatagtaacatctgcatcctctcctatatgaaaatcattgtatacaaggtccttaagacctgtctggcttattatgactggaatatgcacactctcatttttagtaccaggcttaatatatatatctattcctggtttatcttctttagtcactatatctatattagcagttgtattacgtgcctcagattttccgtttgccctgatattatacgctcctacaggaagtgcatcaagctctgcaacctcatgtaaaagatttttttctattgcatccatttatatggtatcctttccttactacaatataaattttgttaccagcttcctaattaacatgcaagcgtaaaaatgaattctgacacccgcatctgatatacatttaaactggtgatccagttccttcaagtaactgtggaagtatatcatccttatcgccatatttatctatatttccatcttttataacaactatcttatcagctatatcaagtattctttcctgatggcttattattatgatacttccatgattagtttcatgcatttcttcaaacaccttaataaggttctggaaactccaaagatcaattcctgcctctggttcatcaaacaatgacagcttggttcctcttgctcttatcattgctatttctattcttttcaactctccacctgaaaggctgctgttgagttctctgttaatataatcttctgcattaagtccaacttctttaagataaccttttaaatcgttgtatttagccccattgccagctgccagcttcaataaatcttttacctttaagcccttgaatctgacaggctgctggaatgcaaagcttataccttcctttgctctgtctgttatactcatattagtaatatcaacaccatcaagaagaatacttccttttgtaggctgatatataccagctataacctttgcaagtgtggatttaccgcctccattaggtccagtaaccgctacaaatctctcatcgatttttaaagtaatatcatgtaatatctccataccatcctctgtggtatatccgacatgattaagctctaacatcatcgtcctccgttcattcttatctttatataaatcatgtgtcataaacacattttaacagaataactaatcctatatatccttgggtaatcaggattaatccgcactatatattaacacataatcatcataataatcaatctaatgtataatatataatgtgatatcatggtcaaaaggtctaaacccacatgagcttgctcataggtgggtgaaagaccttgtgacccctgtatcataaaataaaattattaaaaaagcagtccacagattatctgcagactgcaatcttattaaataatcactgtatattcatcatattattttaatacatacttccttatataagcaaaggtatagtcttcacctttttcagatagcataacaagaagactataaagcaactctttagtctttggatgaattatataatgatccattcccctcttaaaatactctaatgaatctgaatccttatatttttccttattgtatatcttacttgccgctactctgtcacaaaacatctctactacataattcactggcatttccatccctataagactcccattaccgcctttagccggataatctatccagtattcatagtggtgcttattacgtcctttatgatgaagccatgccgtagaacagccctctgcctctctttgtgcattattaggacttctgttgccttgaaaatattttacaccaggaataaactccgtcggactgtactttgataaatcatgcagcaaaccctgcttataaagtcctaccctgaaacaatttttcattacctgatatttatgatgatttatagtactcagatgtccaaaaaaattatgaaataatatcatgggtttcatatatgccatcctttacttttgtgtctattatttaacatacctataaagtttatcaaaaaagaaaataaattcaagcagatattgaggattttatagtattttattattttattatattctgctgtgctttctttatagcctcatcatagaaatattcctgtgaattgattcttgtttctttatcatttacatcttttctataatagtttccatctgatgccataactcttgccttaacattatctgacaacatagtattaaacatacgaagaagtctctcttttatctcttcatcataaactggtgctgcgacttcaacacgcctgatagtatttcttgtcataaaatcagctgatgatatgtatattttcgtatcgttacctttgccaaatatatatatacgtgaatgttcaaggaatcttcctacgatacttgtaattgtaatattgtctgtataaccctctattccagctctcatacagcttattcctcttataatcatatcaaccttaacaccactcatagatgcttcaacaagtttttctattattgttttatctgtaagagaattaatcttaacacctatatatgcctcatcaccgtttttagccttatcaatctcggcatctattaaactgataattttattctgaagacatttaggtgcaacaagaagatgctctgtatgttcaacaacatcacccagcccaagattattaaacacatctgctgtttcccttgcaatatcagtattagatgtaataagcgaaagatctgtatataattttgctgttttctcgttgaagttacctgttccaacgtgtgtaatatacttgaattcttcaccatccttatatgttataagacacagctttgaatgaacctttatatgatctattccatatataatcttgcatccggcttcttcaagacgccttgaccattcaatattattctcttcatcaaatcttgccctcagttcaacaagtacaactacctctttaccattttctgctgcttctataagcgcctctacaatctgcgaattcttggctaccctgtaaagagtcatcttaatagacaaaaccctgtcatcactacccgcttcattaagaagttttataaaaggatgcatactctcatacggataacttaataaaacatcctttttagctatctggtctataataggctgcttcatatctatatattttgaattctgtggaacccttctttcatagaaaagctctttccttgttcttaaatcatcctgaatttttgatatgaacgacatttcaagtggtgattcagaataaaacacctgctttttgtcaagcttcagctcgttacacaaagctgatataactttatcatcaagtactcttgaatactcaagcttgacaggacacagccttcttctctcctttataagctgttccatagtatccctgtaatccatatcctcatcaaagaatgcttcatccatatctatatcagcatttctgatgattcttataagtgatttactttttacactatatttcttgaatattttgggaagaaaatgcagtataagttcctcaacaagcatatattttctgctatctgatggtataggtataagtctgtcaaatataccgttgctgcatggtacaagtcctatcttatcgctattctttgacccaagaagagccactgcatatatttccttattcttaagaaatggaaacggatttttctttcctataacctgaggcgataatattggaagtattgacttgttaaagtagttctcaagatataccgcatcagaatattcaacatcattaaagctgataagcttaacaccctgtctgtcaaactcatacataagctttgtatatatcttatcttttttatgtaataattctcttgtgtgcgtaaatacagcatccagctgctgctctgcagtcatcattgatttattgtcgaagcctgtagtcatctcctgtttattcttttttgcaagaagcatctgatcatacagagagccaactcttaccatataaaactcatcaagattactgttgaatattgaaacaaatgtaagtctctcacataatggcactttttcatcatcagcttcatctataactctttcattaaatttcagccatgataactccctgtttgcaaaaaatggcattcttttaccatctttacgatatttttcttcaatattctttatttttttatggatactatctgatacttcggtcatattagctgcttccttagaatcatcaataactatatttaataatttatcatcttctattacattatttttattcatattttctccaataaaatgtatattttcatttatttctttttctacatttatttttctatctacatctatttttttatctacatttttttcttttcttttattactgaagacattcttaatattatttaatctccaaaacatattcccatcgcctttgcttctttgataatacctgagtcaggatctactgtttttaatctgcctgctacttccctaagtggtgttttatctatctgattatccctaacacacaccatatatccatactctttattaataataagttccgctgcctttgctcctagtcttgatgctaatactctgtcgtatgcacatggacttcccccacgttgtacatgtcctggcacagtaactcttacctcctgccctgttctttccataatacctgcacctatcctatatgctgcagatggaaaatgctctcgttttcttatctctttaagttcctttttgctgaattcaagctcttcctttgatattataccttcggctaccgcaagtattgtaaaatgctttttctgcttacttcttttattaatagcttcaactaccttatcaagatcatatggaatctctggtatgagaatgacatctgaaccacctgccacacctgcatgtaatgtaagccatccagtcttatgtcccataagttcaactataaacaccctgctatgtgatgcagctgtagtgtgtatacaatcaatagtgtctgtagcaatatccacagctgactgaaatccaaagcttacatctgttcctacaagatcattatctatcgtctttggcagtgtaacaacattaagtccctcttcacttaacagattagctgtcttgtgtgttccatttcctccaagtataacaagacaatcaagcccaagtactttataattctttttcatggatgctaccttatcttttccattctcatcaggctctgttattcttttaaaaggagttcttgatgtaccaagaatagtaccaccaactgttagaattccagaaaaatcaccaacattcataagcttataatcattattaataagtcccttatatccatcaagaaaaccatatatctttacatctggtattttattatacagactctttgccacacctctcatagcagcattcaaagcctgacaatctccaccacttgttaaaattcctactttcataataatcctccattcttgcgccgcttattatgacgatataaagctcagcatgtttcaaaatattatcaccatattatttaccagttaattataatctcattcttataatattacaactattcctctgtcatctttaatatttttcttttttcatcttttattcatctaattacaaccaatctgtttgttcctgtcaaattttcagaatatatttttaatgtaactggttgaattatgtgataaaataccagtacattattcttttattaaatgacaatggaggtacttattatatatgaccagaaaagaaataaatgaaataaaatcacaattcaatatagaagactgtggtatccaaagattatgtggctgctatgttgatggtgaaaaaaataaagttactacatttaatgatacatttttaaatctgccagaagaagaacgtcataaatatcttgatattttaagaaaatgtctttccggaacacctggcagaaacctgattgacatgaaattcactcttgatgcatatggaaaagaacagccaagggattttcttcttgaacttagaaaatgtgagcttaaggatgaaaacctacttaaccagttatatgataaaataattgctaattattattatcctggcaactatcttatacttattgttaatcagacatatgacatacctggagtaactgctgataatatagcaatggacgatgcttctgatgagatatataactatatattatgctgtatctgccctgtcattctttcaaaacccggcctcggatattttgaggatgataaagcatttcataaccagatacaaaaccatatagttgataaccctgatatagcgttcttgtttccatcatttaacaatcgtagtactgatgatgaaagcatattatttcatagtaaggatacagatgattttcagcaaaattttcttgatgccgtacttagctgcgatgtacctctccctgctgatatacagaaggaaacattcaataatctagtaacagaaactctaggtgaagattgcaattacgaaactgttaaaaatattcatgataacataaatgaagtcattgaagaacataaggctgtatcaagtgcacctgtaatgctcgacaaaacagaggttaaggaaatacttgaaaaaagcggagttgccagtgaacgccttactaattttgaagaacattttgaaatggcagctggagaaaacggaaaacttgcagcagctaatataactccatcaagaaagtttgaagttaagaccccggatgttgtaataaagattaatccggataaaaccgaccttgttgaaacacgtatgattgatggaaaacagtgtcttgtaatacagattgatgagcgtctggaagtaaatggaatatcctttaacccagataccggtgaagttatagacagaactgataaataaaaagatgaggcaggataacttataaaacaagtttcctgcctcatctttttttataattaaccattattaattattttaatgatgtcagtgtcaaaatgtattttgctactgactgatgtatctgtattgctacagtacttacttaaccttaaagaattttacttcattgttaagctgttctgatacagtcataagaccattcgctgtttctgcaagcatattaatggttgcagtaagttcctgcatagatgctgtcgtctgctgggctgaggcagcgttttcttctgagatagccgacagattagaaacaacatcattaatctgctttcttgcctcatcacaagaaccagcattattctcaataactgcagtttcatttcttgatactgctataccatcactgacatctataaagctgttctttgttgcatcaagctttcctatctgctcatgtataagaacctttgtattgttcatatcttctacagtcttttctgattctaactgaagcttttctataatctcttttatctctccagccgcttcatctgactgtgatgccagcttctggatttctgatgcaactactgcaaagccttttcctgcctctcctgctcttgctgactctatagaagcattaagagctaaaagacttgtctgatcagcaatattcgtaataagtgctgctgcttcccctattcttccaactgattcatttgttatattaatctgattagctatattattaatagattcagttgtatgatcattagaatctgaaagctcactcatggtactcatagatgtatcacctgctctgcccattgcatctgttgctttagtaagattagctaccttttcaactatttcacttataagctctcccatattagcaatctgtgcagaagcattctggatctcttctgcctgtgatacagctccctttgatatgtcttcaaccgcacttgatatctcttctgttgctttacttgactgatttgcagagcttgtcatatcttcacccgacctatgaagctcagatgcagtattctgaagattagctactatttcctgaagcttatctataagtgtctgaacagattgagccatctgacctatttcatcttttcttgcaagaatagatttattaacatctactgtcaaatcaccatttgcaagtgcgataaacagattattaactgaaacaagtgcattagcaagttttgttgaaattatagaggctactactatcacaacgattaaaacaactactgatacagatataagtgctattattttctgcattataaatgttgttatatctgttcttggctgtccggagaacatcataccaacaacacttccactaaaattcttcaatggaatatatacacctgtataatctgttccgtctatatcaacatgtgaggttgtatatgtattacctttctgtacagcttcccatattttatcatctgccttaagacttaacattctcttgttattagaatccctgagtgatgtaagcttacaatcaacgcctataaatactgcaaggtctgcatcaccatcttttgtaaatttatctattccatcctgcttctgtgacaggttcacatctcctttaaacagattgccgttattatctacacgccagtcacctgtatactcattatcatagcttgccttagttgactgaccaagtaacgataaaccatttaccgcctctgtattcattccctgtgatatattaacaatagcaagaataagtacagccactattccaactacggttggaagtaatgatgtcattataagcttggctttaatcccactcaataaacttaattttttttctttattatcaccgcttgtattattattcgtattatcattatttatattatctttgttttgtacatttttacgcattctgaaatttttttgctttctttttttctctttttctataggctgcgcatttgctttagccgcttttgatatttttgctttatcattatttcttttgttcttttttttatgctctgtaacagttgcttcctgctcttctttaatatcattagctgatacattttcaacttcaccttctatggatgctgttgttatattcttatcctgatccataataatcctccattcttgcactgcttctcagcgcatcttaaagtttgtgcgaaacacaaatcttacgcgtgaaaaatcttatgtattaataatacataaatatatagatgtcgtggcaaaagatactttgcacctgactggtatatccgaatcgctatgcaattttcacattcattagataccttatatattagttaattatatcatataatttaccttttgtaacttcattttaagtcgatttttacagattttttggcatattttcactttttcgccaattttttacattcatcaattttctttatatattatgtatgttttatatatttcacaaacaccctacacacctgtctttttttcatggattatttaacactattgtctttaaattatatcttgaatattaaaaataaaaagttccccggtctggggtgaccggggatgagtagaggggatagaaatatagtcaagtatattggctttggagattatccaatatacctttgtgcaaattaatctaaaataccaaaatatgatatctgaattaatataataaataataccaataccatatacaagtaaataaacttaggtaaaatcttacttatgcattattaacataaagtaaagttctgtatctttatttcatttattaattaactcatataatcttatacaattatattttgcaaatgtcaatagaaatatctcaaaaatacatcaaaaatacaataaaaaaaattaataatctattaactggtaactggtaactaatatctggtaactaatatctgataactaatatccaataactaaattactgtattatacttcattttatcatattaaataaaattgtattataatatattttattgaatacatttaaatatatcataattaacatatcttatttaagatatatcaaatcatttttattatcaaccaattaattgtcatatatacattattttaaagatttattatcctatttaacaacaaatatggcagatatggcagttgcaccacaaatgcctgcttagaatatatgaatcaaaccattttgtcaagcttatttttaatattctctgccgtttttgtaattgcaagcccttccttcgatgtttctttaaggcatgctggcatattatctcctattcttttcatcgattctataacctcgtcaggaggaataacactctttattcctgccattgacatctgtgaagctgttattgcgttaactgctcctgtcacatttctttttatacatggaacctctacaagaccacatacagggtcacatgtaagacctagcatactttttaaagctaatgcacttgcattgactattttatcaacatccccaccctgaagaaatgtaagtcctgctgcggccattgcacttgctgaaccaatctctgcctgacatcctccagaggctcctgcaatagaagcattttctgctatcacagcacctattcccgctgctataaataatgcttttacaacatcatcttcataaacgtcatacaatttctcatatgatataaatacagctggtataactccgcatgaacctgccgtaggcgctgcaactattcttttcatacatgcattagattcacccattttaatagctttctccatagctgtgcttatgaaatcgccacatatattcttaccagatttattatatatatgcataagttctccgtcgccacctgccatttcacttggagacttaagattcttattataatcattgtctgcttttttcattgcagcgtacattaatttcatattatcgaacacctgcttttcagatatcatgtgttcatttgcattatcccgcattataacctgccacaattcacatttattagctttacataaatcaaccaggtcttttattgaatgataacccatattatttactccattcatgtctttgccggttcattaattcatattcttatttcatagttatacaaatatatgcatattaacaatatgctttaacgcttttttaatattaagaaccttttctatatcatgtctgctatgtctgctacgtctgctattctatgccaagatatgttaccttttctataccttctacacgtttcagccattctatgccatctcttgggatttcttggtcacattctacaaccataaccgcataacctccacgagatgaacgatataactgcatagcagctatatttacacatttatgtgacagcattgatgttacttccgcaacatgtccaggctgatcaagattatgaacaatcaatgtaggataatcgcctgaaaaattcgttgttataccatcaatctgtgcaatattaatacgtgaacccccaagtgattctccaacaacctctaattttttccctgttacactggttaaaatcagttgggcactattgggatgagcctcctttaatgaagatttgccaaatgttatttcaattcctcttttttttgcaatatcaaggctttctggtattctcatgtcgtctggtttcatacctagtaagcctgctactattgctttgttggttccatgtcccttacctgtatcaagaaatgagccatacaaaagaatttcagccttgcttatctgttcacccattaatctttgcgatatatatcctatccttacagcaccagctgtatgtgaacttgaaggtccaaccataaccggcccaattatatcgaatatatccatagactcctccataattaatataaacaaatatgagctgtcaggttcaaaagatattttgtcccaactgatgtaaaggatgttgaattactacgcatttgtatattttgctgcatttccatgcgttcatatatctgctgtattgccgtaaattcatatattcctgctacattgctacatattcatatactcctgctgtattgctgcgcagttttgctattccaaatacatcagattattataatcacatttcccaattatttattggataatttagacaacttattttctattaccttacctgctgatttcattgcatctcctacttcatttgcgacatttaatgcctttttatccaattccttttccttaacgtaaactgatactttatcagctgcttcattagtaacatccacggcctttcctattccacgtaaaaccttttctttattaataaatcccattttcaattcagctccttttttccatttcaaaccttaaatccataaaatcataaaacattttgtttcttactgatatacctgcatccataattctgtataattttacacttaaaactttccgattaattccatcatataaaattttgatgttaataataatataaagttaatattaatataaagttaatattaatataaatatgataccagggtgttatatgcaagaggcacatatttaacatggaccgaagcgtagtgtagacgtggtagtgcgtagcacgaagcaatccgtaagtatcaaagtcgtgggcttttgcccccgacatcataaatattgatattgacagtatgacatcagatattaatatcaaatatcttaattagataactcaataactgcatgcagcttattttctgactgcattattataatacagctattatcattatttacaatacactttattgctacaacatcatttgccataatctctttcttgtattcgattcgaatgtttgagtattccatatttttatataattcctctggtaatacctcataggcagcttctaaataacttacattgtgcatatgtccattgatatccatatctcttctttcaactttatatggtttttcaattattttagaaacatttttattatcctgattaaaggattctatatcaatcttacataattcttcatcaaagaccatttttccttcttctgtgccatatatttcattcatttttccatcaagaataattggtcttctccttgtaagattcatatatagccatcttgatgtaccaatagcaaatagcataccattttcatctcttaattcaaaatctctataagcacacaatttatcactttttcttgaccatgtggaagctataatgtgttcattataaacaggccttgataagatcttaacattccagtctaataaaacccatgcacagttgtttttttcaacatctttcacaccaaaaccaactgaatctgaatgtgcagctgctacatcttccattatagttattattctcttatttgatatcttattacttataccgatatcttctagttctaccttgtatttttcactataaatcatataaatatactccaaaattactgttccagcatattatgatgatgtctatatataaattcatttgaatttatttgtatttagctgtatttatctttttataggttcatatatgtctttatttaccaattatatttacacagattttattcatacatttatcatcatagctattttaatgcctattgttattatataattatttaactggtttttctatatttttctaaaatcttaatatttatatcctttattcttattattttgtatttctgaaattataaaatagaaacgtaattattaaaggtatcaaaaaagcattaatatatgtatataaaaaacattccacataaattacactatacaataaaattagataaagcatcataagaattatatttatatgttgtatgaatttatatgttacatagacaatctgttatatggatttatatgttacatagacaatctgttatatggatttatatgttatatagataatatgttatatggatttatatgttatatagataatatgttatatggatttatatattatatagacaataggttatattgattgaattttcttaaaggttgcataattacaaaacattaattttgtactagttattctattatgtttcacgtggaactcaaacgtatgttttctacactttatttttgattatattttaatttttatatagttggggaattttatcagtcatcattaaactagttaattattttttatttactacataaagtatttagaaattattaactcataacaatatcatcggaatattttacgcataatcaaccagttttctatcttactatatataaatgatacttgaagctggtagtataagtcatctactttaatacatatggattgttccgtgctacaccattccttcaattaaccccaatctatattattaacgttaatacatagatgtctattaaatcattttatcattctataaagtcaattttatcaaggttatattatatatcttatattttatatcttatattatatatcttatattttatgtcttgtatcttatatatatttttttgtgaactcagttcactttttttagttatacacttcataaatacataattagatattgtaaaccgtctatttccaataataacaaatctagatgccagggtcaaaaacccaagactttgataaatatggattattctgacctacgtgctcatacatctacgctctgtttctattcatgctaaacatgtaccacttgcacctatccacactcattgcaaaatatccgctaccaaatatccgctaccaaatatccgctaccaaatatctgccaccaaatatctgcatattgtgagattatcattcaacttttatgctcatattagtacgagtcacaatatctttgtcctacatttataggcaagctcatatagcctagagcttttgaccctggcatcaaatctataatatattataatattgtaaaataaaatgaactcagttcacttactaacaataaaagctttataaaactaaaaagtgaactgagttcaaaaatttcaaagtgaactgagttcattttatagtattactttttatataatctaacaaatttgtgataaatttttttatcatattataataaattcaattatttactgattaaactttatatgctatctgatgtatcagaatcatcaattttttagataaaaaacaataaattatgatttatacattgatttaatagaaaagtaatgtataataaaattataaattaaagaaagaaggaaaataatgagtgaaataataagtttgataaacgaaaaagggggagttggtaaatcctcatctgcaatatctattgcacaaatattagccatttccggatattccatattattgattgatttagatccccagatgaacacatctaaaatgtttggaaaaaatgatgaaggcaatgctaaagactatgaacagctgttttgcaaaaagttatcgaaaaaatcagaagtccttgattacatctcacagacagattatgaaaatatttcaatattgtgtgcatcaagagtattgaatagtttgatttacaaaatatatgacgaaagcaaagagtctaacgtagaactgtgctttaaatataatctggctttattaaaggatgattatgattatataataatagataattctccatttaaatcatatttaacaacatgtgctatgtgtgcaagtaataaaattattactccaatatgtgttgataatttttcttatgatggattaatgtcattatttgatacaatagaagaacttaaccaaaaatatgctttatcaatagagtttgctggaatgtttatgacaagagttgcaggaagaacaactttatataaacaaatgtatgaaagttatgaaaatatgtttggtgataaattcttacctgtatctataagaaattgtattgctgttaatgagtctaataccttatttgaaccacttctaacctacgataaaagatgtagtgctgcacaggattatatagagcttgtcaattatcttggattaatggacaataaacattttagagaactcgcaaagtatctgaaaggagaaaagaaataatggcaaaaaaatcttttggtgccggtgctactaaaccaggtattttaaatacagacggtggagaaaagttgaaagaaatgcaggcaaaaatccaatacaatttcaactatattcctaaagaaaagatagtttctaatcctaaaaatgaaatgtacacacaggatggaatagaggctttaaaagaaagtattcttataaatggattacgtcataatttatcagttttatataatccagataatgatacatacaggctggtatctggtgaacgacgttatcatgcaataacaagtatgagtgataaagaatataatgatctatttcctgcaggcatcccttgtaaggtagaaaaatctgaaattacagaaatagatgaagaaattatgcttatttctgctaaccatgatgtacgtgaatcatcaatggaagtaaaaagatgggaagtaagcagattaaaagaattatatgaagctaaaaaaataaaaggtgagattaaaaatataaatgcagagatagcaaaacaacttaatatatccgaaagacaagccagaaaatatacaactgcagaaaaactgatacctgaattaagcgaattacttaacaataatggaattgatcttaatcaggctgataagtttggaaaactagatgaagatgctcaaaaaagtattcttactataatagaaaaaaatggcaaaatagataatgctgaattccaatcaattaaaaaaatatcagaggaacgtgcaaaagaagctgaacaatataaattaaaattagattctgcattaaaagaattaaatgaaaaagaacagactttaaaaagtcttgaaaataagattaaagaaatatcagaaaaaaatgtggatgattcaaaaaatgatgttgaagatcagcttcgatatatgacagaagcaaaaaataaagctgaaaaagaaaaagctagacttgaaacaaatcttgagaaaatgaaacaattacaaaaagaaagagagcagcgtaaaactataattccagatagtgaattaaaaagaatttcttcaattgcaaaagctgagcaggcattaacattattcgaaaataattttgacgtcataaaaaacaacaaatccataataaaaaatgatgttgatttaaaagtaagagtagaaatattaagtcaacgatttaatgattttataaattcattaaattaaaaatgttatcaaatttataaaaatattaagacatgttgtattaattacaatgtgtctttttttataaatgaaataatataataaaacataacatatattatacatatattgataaatgaattataagatttaacagtgtatatctatatttgtagattaatttggagtaaataagtttgtataaatatgtttattaaattttgagatgtgtttttttattttatatatggtatattttttttgaaattctattattttttgatttttttggtcttttattttaattttaggttttttaattctattaaatgtcgaaaactttccaaatgtgaattaataatatagaattgaatatttattcgaaaaataatgtatacaaacagaataccaaatagtaataaattgcaataataataaactatgaaatttattcacatattataattattataaaatgatagtgtgggaattgtatttatacatatagaattagatgtattgaatttaaatatgataaaaccaggagatgttaaattagaaaatataaaagtgaaaaaaaagtacaccaaaaagactgcttatgcagtctttttcaaatcatccgtataagatcttacaatagaggaaataagtccaggaagatttttaatcgttttttcatgtaatatgtactgtttatatacttcagatagagctgtcatcacataatcatatgaataatgaactgcgatatttgcgatatcatcaagatcaattttattaatagatattaacttatagtgagatatattagtttctgccgaaagaaaattattatatttttcaggctgtattttaccagaatttatttctggtatacatgaattaaattcataaataaaatctgttaatttatgagaatattcctgaagtaaaatatttttttgattttttgctatgtatttttcaactatttcaaaacgtattacattatcattaattgatgttgtaaatatatcagaagttgaattttcaatagactttctgattacacaaggtttacaataatcaggaagaattcttctgatatccttaatagttttatgatctacactagcctgacccttgagattagaattatcaagattaattaactcacgcagatatattcgtaacattattaaagaatcaattttgattaatttatttaataagtcatttgaaagcactaaaaagcctcttccatttttattagctggaagataataagattcatagtcatttaaaataatatttatgaaatgtctatctgttttgcagtacgatatataagtatagccagataaaatatccaaattattccatattgtttttatattgcaatttagtaatttggatataatacgggtgtctacattttttataattccaaaacgatctggatgaaaaaaatgtaatgttaaaaataattttaatgcattagatttgagcataggtctataaccataacgatttttttcattatggtagactttttttgtcacattttgagttgtgagaattctatttggacaattattacaatatgtagatgctgatttatatatctctgattctttatcaaatgtatttataatctgcttatatttacaagacgaacacatagaattggaataatcaacaacttcaacagtattttctacaattgttgtataatttttctgaataccaagagcctggataagaactgctttacctatatttgtaaaattatccaaatttctcacctccttttattgcataatgtagcaattttattaaataaaatcaaattgtaggttttactcatatattatccacatttacataaaaaaatagtttttttactctgaaattatccacattctgaaaaaaaacattatttttactctgaaaatgtctacgaaattttcttatattttttttgaagcagaaaaaatataagaaatcataattttactacaaatctatcgacatttaattagtttttttatatttatatgaaaataaaaaagcttaagtcagtgtttaagccaaaaatgtagacattgaggttccaaattaaaaaaaaaaatgtagagaaaattaattaataatttatataaatcaactattagaatataaaaaaagggtatttttaataaaaaaaataaaatttactacaaaaatggctacataattaaaatatactcttattttatctacagatttaattaggaaataaaaaaattactctgaatttatctacataaaaaaatttattcaaataaaacgtacaattaaatagatataagttggaaaagaggaagataaatgtggatttcatgcaaaccataagaaaaatattttgcaaaaaatatattaagacgacaaaattataaagtggctaataatagcaaggataattaaattgaaattataaaataaaaaattattgatttataattttggagacaacgaagtagaagagtagataaaaatgtagacaaaaatgaactcagttcaaatttagaacaaacatattaaaggcgcagtagattaaaaatcataccacgcctaaattatttaatattgaagagtattggttatgccagtaaaacatgagatatgaaaaaatatgttagatatattaatttatatctgatggcatatcaattaatttcgttttatcaaaattaagatcctgtatttcagcatctgatagtggtaaaaatttaatgataaaaacattgttcttaagttcaaaactgtctataacaatattgttatcaacaaattcctgaagagattcttttatcagctgcagatttttctttttgttttttagtttaaatcgaactattttttgaaagtaggtataattatattcacctatgaaagtttcctggttagatatctgttcacgtttcattgcataacatattattcttgataagttattgtctagaacatcatatgaagcagaagtgatagaaatcagttttttcttaataatcgcattgcttagtatttctccaaattgagcaatagcatagggtctttctacatcctctttaataacaatattatcaaataagttgaagtagattttactacctgcttcttcatatgaaaaattgtattctactaattttctacaagaattagatatttttttaataacatttttacctacatgataatcaacaacttctttacctaaagtattaagatcaacaacaacagatttttctttataaaattcctgcatatttatattagaaataaaggcattaactaattttaaatcattagaatccatagctttaggaggagtaagtttaccactatctacagttacttcaagaagttccttaccatcgtcatcagtaataatctcttttaaaaggttattagaagctgtatccatcataagtgtaaaagaagatggactaaataaaggtttatcaacaagatctacaggaaatagccttaggtaagagtcaatgtttccagcaagttcattttcgatatatttccatgcacttataattaaatcatttttcaatgaattatatattgatttatttgtaaaagatgatatgccaggaaattcaataagaagactattagagtcatccttccataaagttgcagctttctttttatcttctataatttcatcaaggtttttatctccaaatattttgtagtaatcatctacaggtaaagttttagccataataacaatattagagaggggatgttttggatcatcaatgttaatagtatcgatatcattaatataagctttataccatcttgctcttttctggagacgcgattttttaatctttgcaataatagggattaaatcttcacggcttgactttccatcaagatagtccataagagtttcatctataagacttgtcacagtatcagctgaaaagttaagcaaatttctttttttattaaaatagtcaataatgacaggattaatatgattggccagttcttcaataaatcgacgagagtattgttccatgttatgctcctttatataaatatagaaaattattgtattggttttggaaccatttcttaattaattttgggttttgttttctttattttttagtatagtagtgggatgattatttgtcaagtatattgacatatgtcgtcatatataataatatagccatatgttagtatgaataatcgctattatttttgtattcttgaaatgattaaacgtattaaatcaagaatttaaagaatttatatatacatatttttatttatagtacatttgaggagatagtaatgatatctgatgaatttaattcaaaaatatggatttattttgaaaccaatcttaaaccaagaacaagaaaagaatatttcaaaattataaaagattttaataaagagattggtcatgatccacttacattaacaagcaaagaagctaaacaatattacaattatttactaaataaaatggaacacaacctgattagttattcaacgggcgttatgagattatctgttatcagatctatatgtaattttatagagtattataatattaatcacggaaataagtatattaattattttaaagaatattctcttcctgaacctgatagattaattgatgaaaaaggaatacctaacagtcttgaaataaacaatatacttgaagcaattaaagaatgtgatgataaaaaagcattcctgattttttcattagcagtaaaatgtgctttaacaaattctgaaatatgtaaacttaatatggaatatattgttcttgataagacaagtaactcaatatgtattaattatcctgcaaatagcaggaataatatagcaagaacaataaaaataccagacgatgttgcaaaattattagatgaatatatttatgaaaataatatcaaagaaggtcctgtattcatcaataaaagaaaaaacagaatgcagctaagggactccgaaagattaatcgaaaaatactgtaaaatatgtcttgataataataaaattagaaataaatacaccttacaggctttaagacatgctggtttatcatatatgcttgctggtggagctccaaaagatgcagttgcaaactatgccggtataacaggcaggtggatgacacgttatgacaggataataacatctaaaacatataatcaggcagtaaactatagtataatcaccattcagtaaataaataaaaaattacacaatatatcccgaatatcgtttaagaatatttaaaatagtattaattgtagtaccataaaaaagatagtacttttcaaagtatttaactatgttataataataatcgaaaagagctttatatgagctcaatacaattccccaatgtcccatcaaaagattatatcttttggtgggatcccctttttttactacaatttaattaaactctgataaatattttctatattttactggcaacatattcctctgcaattcaggattaattctttctttaatagcaattgaattaaaaaagcttttccaaagcttctgacatttaatatcataatctgaatatgaatttatcttattatataaacctgagtcagaatcattataaaacatgttctttccatttgctgtatgaatatagcaaaaatttcttttaatatcgtatataacaaaatcctcacaatgaagtctgtcagcaaaatgatccgtcaacatatatattatgttattatcaggctcaattcttgcaagaagtaatccagaagcattttcattaaatcttattatctccctataaaacgcagcttcattagaaactttcatatcaatcttaaataaatcatatatgaatttatcatgtatattattaatatattcttttccgtgtttaaaaagtttctgtaagctatgatatactacagaagctttagatggctcattggaatttataactctgaaaataatactatatacataatcacccagtttttgttgtattgaacgtattactttattactaatattacaatctgcttttacataagtatatgtttcaaaaaaagaataattagaattcttcgcatcaaaaatacaacttatatctgtatgacttgttccttcttcccatgccatatatatagccgtaaatataccatctatactatcttcacaaataaatatattaattaaagtattaaaaccactcatataaatataatcctttttctttacgcttattatatcttataattataattgtcatcaaaaaaagacagctgcttataagtgttatgatgttctaaatcatatatttttctcaggtctttagaatcaataatacaattggttatataatcctgatctattttaatgttatacatcatatgtccattacatgttatgaagtatatggctctttttaaaacaacacctattttttttaaatcattaaaatccagctttacatgttttctggcatatagtattcttttagcagatttaactccgatccctggaacacgaagtaacatattataatcagctttattaacttcgactggaaaaatcccaaggtttcgtaaagcccagtcacacttaggatcaagcatggaattaaaattaggatgcttttcagataataattcagaagctttaaatccataaaatctcataagccaatcagcctgatataaacgatgctctcttaacagaggaactccagtcccatcaggctgaagtggcaaatcaacgtccatatttacattaacaaaagcagaatagaaaactctttttaaactatattggttgtataaagcctctgctatagtgacaagatgataatcagtttcatcagttgcaccaacaatcatctgtgtactttgtccagctggtacaaaaactggttttttgtaccttgtaggaatagcatcagaatctttaatataattatcctgtaaatatattcccgtttctttatatattatatcttccaaagtctttttcttaacaccaatcagattcatattggaattaatctcatgctgaatcatacgcattggctttaatatattatctcttgacttagatggtgctaattttttaagagcggcatttgtaggaagctctaaattaacactcattctgtctacataataaccagcaagcttaataagttcttcactggcaccaggtatagctttcatatgaatataaccaccaaaattatactttgttctaagaataataacagttttaagcattcttttcatagtttcatcaggcgtctggattattcctgagcttaagaatagtccttctatataatttcttttataaaactgaacagtaagttcacatatctcttcaggcgtaaatgttgctcttacaacatcattagaagccctgtttatacagtacttacaattataaatacattcgttagtcagaaggatttttaataatgatatacaccttccatctgcactaaaactatggcatatgccacatgccttggaattcccaataccttttttgttgttatttctttctacaccgcttgaagaacaagacacatcatattttgcagcatcagacaatatttcaagtttttccataatactaagattatcttttattatcatatattcaacaactcctaaataagtgtaagaacatttgtttgtatttatataatagaacatttgtttgcataatgcaagcattaactatttacaattgactattagtacaactttttaacttgacactcacagcataatattgataataaaatataaagatgtattattaagaaaatgtcttatagattttttataaggagatagttctaatgaataaaatggtgatttttgatcttgatggaacattattaaacacacttgaagatttatgtgattctgttaactatgcacttaaaaccaacggattaccagaaagaagtatagaagaagtaagaaatttcgttggtaatggcatacggcttttaattgaacgaagtgttccagccaatacaactaaagatataacagataaaacatttgaatgttttaaaacatattatggattacattgtaatgataaaacaaaaacttatcctggagttataaacatgctaaaaaaagtaaaagcaaacggatataagacagctgtcctgtcaaataaagcccaatatgctgtaaccaaactctgtaatatatattttgataatgtaattgatattgcaataggtgctaaagaaaatataccaaaaaaacctgcgcctgatgccctttttatgtgtgcaaaagaacagaacattgatcttaaaaatgtaatatatgttggagattctgatgttgatgtagctaccgcaaaaaatgcaggcgtaactggaatagctgtaacatggggattcaggagtcgtgaaaccttaaaaaaatgtggtgcagaaatattagtcaaaaatacgaaagaattatcagatgtattacaacaatgtataacaaaaaaatcctgctgacattcattttataataaaactgtaaagaaagtaaactgaaaatccaaaaacaatttacgaaaaacggttaacaaataaagcagataaaacgaaaatagacaaaatagataaaatttcaaaaaaccacttgacatattatgattaaatatgtattatagtgcttgtgttcgctaaagctattgtttttaagaacattaaatataatatgcgcgagtggctcagtggtggagcacctccttgccaaggagggggtcgcgggttcgatccccgtctcgcgctcttaataacagggtatcctaaaggatacccttattttatatatagtaaatttaaaataacaaaaaaggaattacttatttatgaaagaaagagaataatttggttcgagattaggattcatttttctgttggaagatccagtagaaaaggtataggaaaagcttttgacgttcttgaaaaaaatctggtattggtgaagctgtatttgcagccatgacccacgcatttttcactttaagtatcggaatgggagctattctgattgggtggatgtgccttgctgttttatttgttactgctatataccttatagcctttttaacaggcagaaaaaaatcaatataaatatttttttaatggaaagacattatttaacatgtactaaaatgttttataaaatgattaaaaagtacataaaattaatatctttccattttgctatcaattacactttaaaatccatatatatatattttttatattatatgataccattcgcaaaggtctttatatattcaaaaatattaaatttacaaggattcattaatgtgataaaatattttatcaaataagcaagctacgatatcagttatataactaagaaaaggaaacgtaatcatgaaactattagaagacagaataagaaaagatggaattataagagaaggtaatgttcttaaggttgacagctttattaatcatcagatggacatcggactttttgaggaaatggcaaaggagtggaaacgcctttttgcagacaaaaaaataaataaaattcttacaatagaagcaagtggaattggtattgcagccatagtcgcaaaagaattcgatgttcctgttgtttttgcaaaaaaatcaaaaagtatcaatcttgatgataataattttagtactaaaatacaatcatttacacatggcaaagtatatgatgtgattgtatctaaaaaattcttatcaccagaagatcatattcttgtaatagatgatttccttgctaacggttgtgcacttcttggtcttacagagcttgttgaaagcgctggtgcaactgtagagggaataggtatagcaatagaaaaaggattccagcagggtggtaaaataatacgtgaaaaagggtaccagcttgaatcacttgcaatagttgaaagcatggacgctgctaacaaaactataactttcagggaacaataaatataaatatgaattttatattctataaactacgatagaacggagaaattaaatgaatacaataactgaatatgtaccagagctatatgcaactttctgggctctgataccacctttagttgccataatacttgcacttataacaaaagaagtatatagttcactttttattggtattattatcggtggtttattatatggtggtttatttactgcacattttagccttgaaacatctatacttcatgtatttgacgatggcttacttggtgttttatcaaatccatcaaatataggtatactaattttcctcattatacttggaattatggtaagtatgatgaataaagcaggtggttcaaaggcatttggagaatgggcctctaagaggataaaaacaagaataggtgccgagcttacttccgtattccttggaatgcttatatttatagatgattattttaattgtcttacagtaggaagtgttatgcgtccggtaactgatggacataatgtgtcaagggcaaagctggcatacataatagatgcaacagccgcacctatatgcataattgcgcctatatcttcatgggcagccgcagtaacaggctttgtcgaaaatgaagacggctttgctatttttatgcagtgtataccttataattattacgcacttcttacgatagttgccctgctttgctttgttatattaaaagttgatttcggacctatgaaaacacatgaagataacgctgcaaagggagatttatttacaactgcagacagaccttatgctaatgtatccaatgaagaagtaataagaggaaacggaaaggttattgatcttgtatttcctataataagcctgattatatgctgtgttattggaatgatatacacaggcggattctttgatgggactccatttgttaccgcattttctaactgtgatgcgtcctttggccttatgatgggaagcttttttgccatgatgcttacaatattattctatgtagtaagaaaaatacttaccttcaatgattgtttctcatgtattcctgaaggttttaaagctatggttcctgctattctcatattaacatttgcatggacacttaaagcaacaactgacagccttggtgttaaagaatatgttgcaggacttgttggaggattgtctgtaggattccttaattttcttcctgctattatatttattgtagctatattccttgcatttgcaacaggtacaagctggggaacattcggaatacttattcctattgttgttggaacatttgcaggtacagataagactatgatgatcatatcaatatcagcatgtatggctggagcagtatgtggtgaccactgttcacctatatcagatacaactattatggcatcagccggagcacagtgcaatcatatgaatcatgtatctacacagctgccttatgttattgttgtagctgctgtttcacttataacctacattatagccggatttttacgtaatgctgtaatatctcttataataggtattatacttatggtcggctgcatattacttattaaatatataacagattgtaaaagtaaagaagcaggaggaaaacaatgatttcgcctgaaaaagtaataattataatcgcattattatttattatatgtgttatgccttttccaatagggcttttaatgtttaaattcaaatcagaaaaattaaaggcagaggtcagaaaaaaatctgaagaagccagtatggataataaagataataaagaaaacaacgattacaacattaataaagataataaaataaataacaatgataatgaaactaatctcactgataatgaaactgatgtaaatgataataattagtagttgtgggcttttgaacctggtataacaaattattattaatttatcatttgcgttttatcctattttcctgtagaattatagggaaataaaatattacatatgatagatatcatatcagaaaggactatatgaaagactattcaattaatacaaaatgtgttcaggccggatatactccaatgaacggtgaaccacgccagattcctatcatccagtcaactacctttaagtatgacacaagcgaagatatgggaaagctttttgaccttgaagcttctggatatttctatacaagattgcagaacccaacaaatgatcacgttgctgctaaaatatgtgcacttgaaggtggaacagctgcaatgcttacatcatcaggacaggctgctaacttctttgctttatttaacatatgtgaatgtggaagtcatattgttgcttcatcgtcaatatatggtggtactttcaaccttatatcagttacacttaagaaaatgggaatagatgttacctttgtatctcctgatgcaacagaggatgaacttaatgctgcattcaaagataatacacgtgctatgtttggtgaaactattgcaaatcctgctcttacagttcttgatattgaaacatttgctaaagtggcacatgcacacaatgttccacttatagtagataatacatttcctactccagtaaactgcagacctatagaatggggtgcagatatcgtaacacattctacaactaaatatatggatggtcatggagcagctgttggtggtgctatcgttgactctggtaattttgactggatggcacataaagatatgtatccaggtctatgtacacctgatgagagttatcatggcataacatatgcagaaaaatttggcaaagaaggtgcatttataacaaaatgcacttcccagcttatgagggatttaggctgtatacaatcacctcagaatgcttttatacttaatcttggacttgaatcgcttcatgtaagaatgccaagacacgtacaaaacggacaggcagttgctgaatttcttgaaaaccatccagctgttaaatacgtcaactatccaggtcttaaaagcaataaatattatgatcttgctaaaaaatatatgccagacggcggatgtggagtagtatcttttgaaataaatggtggaagagaagcagcagagaatttcttaaagaatttaaagcttgctgctattgaaacacatgtcgcagatgcgagaacatgctgtcttaacccagctacatcaacacatagacagatgaatgacgaacagttaaaggaagcaggagtacctgctggtttaataagaatatcatgcggactagaagataaaaaggatctgattgcagatattgcacaggcacttgaagcagttaaataatctctaaaataataagcacatattataattaagcagttacttttaattttcacttaattataatatgtgttttttgttttgttctctaatatattggttttattttatattttatattttataataatttaattttttatattttatattacgtttatatatattgtactcatatttctgtggtggtataataatatgacaaattttggttattggagagaattctaatgaatacaatcttacgtatatttaaacatgatgttaaaggcatatgcagaaatatgtttgcacttattatagcactgggattatgcattataccttctttatatgcatggtttaacatctattcaaactgggatccatatgctaacacctcatctataaaaattgctgtatattctgaagatgaaggttttactcctgagggaaaagaaaaacagaatatgggtgaaagtatcatagaaaatcttagggaaaacgataaactaggatggacctttacgaaggataaagaaagcactatagatggtgtaaaaagcggaaaatattatgctgccattattattggaaacaatttttcccgttctatgattaattttcttaatgacaacatggaaacaccatctgtgacatactatgaaaatgctaaaaagaatgcaattgcaagtaaaataactcaatctggaaaatcaactttacaggaaactattaatgaaacatttattgaaacagttgtggttactatacttaattcaacagatgcagattcacttacgaagaataatgttttatctgatatatctgataaattaaaaaatatcagtgaaaatatatctgaatatgatagtgctataaagcaattcaatgaaagtaatataggattgtctgacactttaaagaaaacggatagtcttgtacacgatattcagggtgatatgtcagaagaaagacttaatgcttcaaaggcttcagctgataatgttattgaccagtatatttccaacataaatgtatcgcttaaccggcttatagatattaattcatcacttgaacagggtatatctgatttaagggcaaaaatagaaatatttaaaaataacggctctgcagtaaataaagacgatatagtaaaagcacttaatgatcttataaaccagatgaataatgcctctaatgccagtgagcagttagcagcaactttaaagcctgtgttagaacatttcaaggaagaagatcttaataatggcggttataaccaggctttatatgatagtcttataagctcacttaatcttatgccggagcttataaagggtgccacacagactcttgaaacatttacaaactggtatatgcagtctgacactaagccgcaggatttacttatatatcttgataatgtacttgcccaatgccagacaagcataagctcactcaataatatattaaaaacaagcgtaagcggttctgttaaccaggctggaaatctgtttaaaacatctataagctctatatataattcacttattagtgcatctgataatctgacatcagtaagcactattattaatggagctgatagtacacttacaaatgtcaatataactcttgacacaatgtcaaaccttataaacaatattaaaaacactcttgataaagcagataaagaacttgatgaattaaaagcagatggtaaatatgagattatgcagaaactgcttgataaagattcttctgaatatggtgaatttttttcatcaccagtaaaagttacaacacagaatgtatatgaagcagtcaactatggtacagctgtagcacctttctatacaactctggctctatgggttggaggacttttacttacagctcttattaaaacatctcctgacgagcttgatgaatttaagaatgctacacttacgcagaaatatttcggcagatacctcatattctggcttatgggacagattcaggctataattacagttcttggtgatttatatcttcttaagatatattgtgtacatccaggtatatttatgcttactgcttcaatagtcagcttcgcatttacattgcttatatatacacttactctatcctttggtgatgttggtaaggctttagctgttgtgcttgtagttatacagatagcaggttcaagtggtacatatcctattgaattattaccatcgttctttagaaatgtatatatatatttcccattcccttatgctattaatgcaataagagaatgtatcagtggtttctatcgatatgattacttcattctcatgggacagcttatgatttttgtaatcggtactttattcttaggattacttataagaaaaccttttatgaagctaaaccactatatgcaccatcgtatgcatgatacaaagatgatgtaaataaccaaatacaagttaacagattggaggcagcatgttaaaagctgataaacagactgttcttaacagttcaattgagatgatccgcttatattatgaaaaagaacataagcgtaataaagacagaataaaatatggaataattgctatgcttatcatccctattatatttcttattttgttatttgttgtaaatagttcaaaagtaatatttctagtaatgtggattgcttcgttattcataataagcggatacctgattgcaatagaatataaagattacaatatgaccgaaaacctgaaaggtattattgataattctgataacgatgcacttattgatacagcaaaagtaatcaaagatattgccatgaactatgtaagtcctgttgaatatgttaaaaaaaatataacagaggatacatctgataattttgatagtgatataaatgaaaaaaatactataactgataaagtatcatctgactgccagaatatagttatagacaacaaacctggcaacaacaaagtaacaataagcgttgataataagacaaacgctgtctgtattacaattaaccctgataattccagtaaggaggctgtccgataatgaaaaatataataaaagtcttcttaaacgactgtaaacatataggacgtaatgtagtggcactggtagtcgttatgggacttgctgtacttccttctttatatgcatggtttaatatattgtctaactgggatccatatggtcctgaatcaacttcgaatattaaagttgcagttgcatatgatgataccggaattaatatatctggtatggatataaatataagcacaaatattgttgaagcactaaaaacaaatgatacaataggctgggtatttacagattctactgacgaagctatagaaggagtatggtctggtgattattatgcagcacttatcatgccagcggatttttctaaagatatggtaagttttcttgctgataatatgacacaccctgaaataatatactatacaaaccagaaaaaaaatgccatagcaccaaagattacagataaagcaaaaaccgctgtccaacaacaggttaatgcaacattcatcagcacattaacagaagctatcatgaaatctgctgatgtcgctgaaaatataggtgacaaaaataaagctgattccacattagagtctggttcagattctatgaacaattcactaattgatatacttatagctaagttccaggttatcaatacacaggttgtcacttttgacaatgtactttctgctctatcaaacataataactactgcacaaaccagtgcagatacagcaaaaggtataagtcctgatatttcatgtacattcgaaggtgaacgcgctatacttaacgaacttaacaaaactataggacagagttcccttatagattcatccttgttttcaacaatttcccatgatattgatgcggtgagtggatatatgaattctatttcctctatatataatgacatgggatataacattgatgactttaacaaatcaataagccagatgggtgaatcaataaacaatacacttgtcatggtcagaaatattgaagataacttaaacgaaacaactaataaacttgtggaattcaaaaacagtggagtatactcgttattacagactgccatatcttttaacacagatgagcttgcatcgtttatatcagcaccagttgcaattacaacagaagatttatatccaatcacgaattatggctcagcaatgtctccattctattcagtactttctatatgggttggagctcttatattagtagctattattcatgtaaaggttcatccttttgatggcacaaaagtaaattcagtagaagcgttctttggaagatacattacattcttccttatagggcaggcacaggcattactgattacacttggggatttattttttataggaatacaatgtatacatccattcaaattctggtttgcagctgcatttacttcatttgtatttactatgataacttattcccttactgtagcatttgaaaatgtcggtgaagcagccgctgtagtaataatggttatccaggttgctggtgctggaggtactttccctatccagtgtcttccagccatatatcaggccatctataagtacctgccattcacatatgcaatggatgctttaagagaatgtgtaggtggaacatatagctggtactactggaaatgtatacttgcacttttagtatatgttggcatatgtttatttattggacttgtaattgcaaaaccatgcagaaaactgaatgctatagtagacaagagcaaagaaaaatccgaaatcatgatataatgagcgcaaaggaaaagaatgcggctgcgtagcagacatattcttttcctgcgccattaacgaacgaacagccatgcgtaagcagggcggaatagcgcgtagcgcgggttcgtgagtgtacgggcagataaagagtaaattatgatataatgagcgcaaaagaaaaggaagcggctgcgtagcagacatttacttttcttgcaccattaacgaacgaacagccatgcgtagcaggacgaaacataacgctgataaacgaggatttatcagcgttatgtttatctgctatcacacatactttttattcatcatcttttttttcctgataaagaggaatcgttgcagcaagcttcctgtgttcttcttccatagctgcataatgcttagcagttgtattaatgtctttatgaccaaggacatcacttacaagtcgtatgtcacctgtgtccttatataaagcagtaccataagtactacgcatcttatgaggtgatattttcttatctggtgttgcatttttagcatattttttcaccatacgttcaatagcactgatactcatacggctttttttcatagatataaatactgcctgttcatcagattccgtatttccaagaagtaaaggtctttcattctctatataatcctttaatgctttcttagttgcttcgttaaaataaagatgtgcatctgaaccacctttacggactatgttaatagttctgtaattaaaattaatatcatcaatatctaagcctgcacactcagatacacggattcctgtattaagaagtaatgtaataagtgctgtatctcttagctgtgtttttttacacttttcaatctgcagcttatttccctttatatttgtatttgaaacaacattaagaaatgtattaacctcctcatcattaagacgtataatatccttttgtggcatcttaatacgtttagctgcacctactgtaggattatttttcatatattgatgaagacataaaaactcaaataaacctctgagtgctgccatacgtcttgcaatagccttatcctggttctgatgactgcttccatcaactgaactattgaaccttaaatacctttgatattcgttgatatcttcaaatgtcaggcattcaagaaaatctatgcttatattctttattgctgtattttttagcagattatttttctctgtcaggaacctgaaaaaagtttgcaggtcatatgcatatgcaataaccgtgttaatctgtgatgataattccttatcattaagatacgatacgacatacggaggcataacagattcaagctgtcttaatttaataagtttctttttgtttttttctttataatattcagaatctatacccattcgtgtctccctgttgatctaacattatctaactttgactaactttatctttctttaactttatttatctaattttacctaaccttatctttaattttaatgtgctttattttatataaaataaagcaagattaactacatactatcaccatcaagccataatattgcttttaaactgtcaggattaaatacatcatcaaatataaaatcttcatataagttttctatattttcctctgaatactctacctgtcttgaaaatatatgtacaatatccattctatcatcaaaagaataatttctatgattatccagccattttaacatatccatctgttttatcataaaaaagtttgttacaagcatctgacatttgccaagaacatcataatcatatatagacttagcaaaatatctgaacacatagtactcaagaagctgtctgtattcatattccctgctggaaatatatgtagaaaattcttcacttaaggcagtatattcatctttatccatctgttcaaaaagactgtatattacatcttttaacatagattcccatgtatcgttaagtatctccatttcctcatatggaactaatatctgtctgatactatcatgcaatgatatattgtcaaattcaccattatcaaacatacttctagtatcttcaagaatatcaacaccatattcttttgtgtactctgctgttatatcttttattgtatcatagtcaccatcattaataattttctgaacttcatttcccaaagacaatataactataagtttttcattaacagataagtcttctttacataatatcttaaaaactacttcacgtacattaaatatttttgcagcatattcactatcatattctgaatcctgttcatatttctcttctaaaggactaatattcaatgtaaatttacgatttttgcataacattattcttgcagcctcttcacaggccatgcctattccggattcttttatagtaccataatattctgaatatcttggaaactggctgcatacaacaccaagatatttttcaccaagctctttatgtacgacacacaagccttcttctgtaagcattggacatctgccatctataagcctgaaacaataatcaccatcctcagtctgaattatactgcttcttaatttttcacctgtttcaccgctcatctgctggtaacgttcataagtatcttcatcaatatctatttcccagccgcctatacagcaattatcactgcatttatctgctatacattgaaactcatcataataatctggaactcttaacttcatcttcttatgcctgcctcattattttgcttatttactgttcataactatacactgcattcactggatttacaatacatctgagtatatatcagctataatgtcaattatatcagcgatttttatgttctttccaccatgcattattaatattctatcatagtcgtcaatagttctcacataaccagaatacctttcataatggccaccttcttttagctcatcctgcacaaaatacgtaactgtgactttacatgaagtatctgatacatcataggttttattattaagcatttcccttaatatagcaaatttttcatttaaaatattgattgcagcttcatcaggttctattctgctgtccgtaagtcttgctgtttcaactatagcatcatcatatccagttaatgcagcaaaaggtgaaaactgagctgcccgttcataattagacatttttttatgtctgtatgataccggacggcttttattgataatgtcactatatttaatacactcattcataatccatgtccttttttctatgctttatgtccacctatctgacggtttctatccatagcagtagctccttcttttagattcattcctcttacaacagcattcttgccatattttttctttatatcaatcatggtttttaaaacctgtttttccttattcagctgcatatcttcttcattatgactttctttatccataaaatctgtaaacagatccagctgtctgcactcctgtttaaccatggcatcatcttcttttataacatgatttgcagttatatttatacgtcttgacataagtcttttatctacaatctcatcataaagcttaacaacagcattagttgttaatctgacagatgatgtgaatcttcctagattcgccgttccatgtgcatgctttggaatacgtcttccatatctgtcttttactatttcacctgaataagttccttctctgttaccagatgttttagtaatattatctatatcataaccgatagtgagtactatctggtctgtcacaagtcctttatctataagctcaagcataagaagatctaccatttcacatactacgagcttggttttttcaaaatcataggcacaatgcagaacctgtcctgaacctatactgttagactctggcttatagctttttatatctgctattgtacaaggttcatacccccatgcatggtcgataagcagttctgcattaacaccaaaaagcttatataaaagttcctcattataaaaatcactatcagatccaagagaacatcttgcaacatcacccattgtatacatgccatactcatacagctttttttcatatcctggaccaacacgccagaaatcagtaataggtttatgcccccataactgctcacgataactatgttcatcaagttcggctattcttacaccatatttatctgctggcatatgttttgcaactatatccatggcaatcttacatagataaagattggtaccgattccagcagtagctgttattcctgtttcatcataaatatcctttatcatcttcatagccagttcacggggtgatacattatatattccaagatacgccccgatatctataaacacctcatcaactgaataaacatgtatatcttcagctgccacatacttaagatatatattatatatatacgttgaatacttcatatacaaagacattcttggtgttgcaataatatatgacagttccagttctttattgcttttaagctctgaggcaaaacatgaactacccttaagtttatgtccataaacttgtgtacgcctcattgcattgatttcattaacctttgaaactacttcaaaaagtcttgcccttcctgatattccatatgctttaagtgaaggagatactgcaagacatattgttttttctgttcttgatgcatctgcaacaacaagattcgtatctaatggattcatgttacgttctacacattcgactgaagcataaaatgttttcaaatcaatggcaatatacatgtgtttaactgacataatgtactcctgttattatatgataaaagtaagcaagaaaagtaaatggctgctttgcagccgcttccttttcttttgcgctcattatatcttacgcataacttcaagtcttttatgaagatttctgatatgctcaagttctttattatcaacggccctgcctgaataaaagtattcgactttacctcttatttcattatgtgtattttctattattccattctttataagtgtatttttaaggttatttgatactcctgtatttccatctattatttctatatcagatggaaaaagctttgcaaatgagtccttaaagtaattaaaatgcgtacatcctaatacaagctcagaataatcattaaagttatagccggcaaactcattgtttagataattcattacattgacagaattaaattcgtccttttgcgcaaatctaacaagctttggaagtgctacaacatcaaccttatgattaatatcatatttcattataagattcttaagcttaacacctgctgcagtgacaggtgttgctaccaccattatccttttatccctgttatgctggcatgccggtttaacagctggttctatgcctatgatgggcagctggtatttattacgaagatatgtaatagcagcacttgtagcagtattacaggcaagcacaactgcctcacagcccttatctacaagaaagcctactgctctgtctacatattcacgtatctgctcattagtcttttcaccatatggaacattgtcaacatcagcataaaacacataatcaacctcaggaagagttatcattacctgatgaagcaatgataatcctcctatacctgaatcaaatatacctatcttcataattcccacctcttattattaatcgttacatgtaactaaaataactttgttgtccactcgctgcaatcccatacatcatctgcaagaccatcataaaactccggctcatggcataccataagaatacttcctttatattcaataagtgcccttttaagctcatcttttgcatcaacatccagatggttagtaggttcatcaagaacaagaatgttagattctctgtttataagcttacataacctgactttagcctgctcaccaccacttaacacacggaccttactttcaatatgtttagttgtaagcccacatttggcaagtgccgatcttacctcatactgtgtatatccaggaaattcctgccatatttcttcaagacaggttgtatctatgtctttagacatttcctgttcaaaataacctatttctaagtaatctccaataaccacttcacctgatatcggttttatgattcccagcaggctttttaacaatgttgattttccaataccattggcacctgtgagtactaccttttttcctctttccatttcaaaattaagtggctttgaaagtggttcatcatagccaataacaagatccttagctgtaaatatatactttcctggtgttcttgcaatcttaaagttaaactccggctttggtttcttttctgcaagctcaatcatatccatattatcaagctttttttgtcttgacatagccatatttcttgtagcaactcttgccttatttcttgcaacgaaatccttaagatcagctatttctttctgctgtttatcatatgcagccttctgctgtgcctgcttcatctcatatacttccataaacttgttgtaatcacctacatatctgttaagctcatgattatccatatgatatattatattaataacactgttaagaaaaggtatatcatgcgatataagaataaaagcattttcataatctaaaagatatctttttaaccagtctatatgttccttatcaagataattagtaggctcatcaagtaaaagtatatctggcttttctaacagcagctttcctaataacactttggttctctgaccaccacttaaatctgtaacatccttatcaagtccaagctcaagcagtcctaaagcccttgcaacctcttccaccttggcatctatcatataaaaatcatgattagttaaaagatcctggatagtaccaagctcctccatgtattcttccatctgcttttcatcagcatccatcattttatcgcatatttcattcatgcgtgcttccatatcaaacagatcatcaaatgcctgtctcataacagaacctattgtcatacccttttcaagaaccgaatgctggtcaagataacctgttttaatgttttttgcccactctattttaccttcatctggcataagctttccagttattatattcataaatgtggatttaccctcaccattagctccaacaagacctatatgctccccctttaataacctgaaggaaacatcatcaaatattgccctgtctccaaaaccatgtgtaagatgttctacatttaataaactcatatataatctcccatctgttaaatattaaatattgtaattttaaaaagcccctttcctgcatatacaaacgaaaaaaggagcttatatcttgattataaacatacactataaatctggtgtctgtaattttctataatataccttcaatgaatccttagacacttttatcttttttaactggataccacccacaaggaactcctgtggaatattattgataaaatacttctgaagcatagctttcaactgtatattctttgatctttgcatggcaacaaggataaaagctatggcaaaaacaactaacttaactataatactggttgaaacccacattgtaagtgcaatattcgttgaaaatgtaaataatataaataaaaaaatcaaactgaatatcacggtataaatatatgttttaatccactcaaccggacttaacatcttcagctgatatataaccttatgataattcctggcttcttctaaagttataggcatctcatatacttccataaggcacctccccgataaaataatctttttatgattatatcgctgaaatgccatattatcaagcatcaaaggattataattgtattcattttcttaaaaatcaattaaataatcctttgaatcctatgagcacacatatgcttaataatcactaagtatttcctcaacatattttattgatatttccagatagtttgatatttcatactccggcactccattatcatgaagaataaatataagttcttctatagatgtaccctttttacgttctactaatataaagtgttttacctgtgcctcattcacttatatcacctccgtataattaaatctgactcatactaagtatatcttccagcatatataccctgttaaaaggaaacgaaaaataatatccatcaacgatatctttagttttatttatcatatcaactgccagttttactccggcagcctctccttcttttttagtcatatcttcactatatcttgaaagaacttcatcagtaacatctattcctgccatctcatttttcataaatgttgcatttttaagactgacaagtggcataataccacataatatacgcgcacctgtttctttttttatggtactaagacgtttaatatcttcatcagaaaaaactggctgtgtcataaaaaaagctgctcctgcttccatttttttcttaacgcgggatatctctatatcaagtcttttccttccctggttaatagcaccgccatatacaacaggctcatacttaaactgatcttcgttcatatcttctatgatattcataagtcctacagaatcaaaattaaacacgctcttaacgctgcttcttatcatctgaggaataggatctcctgttatcacaaggaaattattaattccattaatatgtgcacctagaagctgtgatcttatagctatggcattcttatccctgcagcaaagatgaggcataacacacattcctgtctgacgtgacaccttagctgctatcagaatagagtcagctctcgttctgccagatggtgaatcaggaaatgttagtacatcaactcctttttcctttaaataatgtgctgcatccataagcttgtcagcatcactatcaaaaggaggtgcaagttcaacagctatgagcttctttccttctttaccacaataaaaagcactatttttaactggtgttttattaaaatcaccatcagtatcaatatttatattgcatgatatatgtgatgaacgtatcatttcagatatattttttatataatctggtgttgttccacagcagccaccaactatatctgcacctgccctgacaagatcacataccttttgtgaataatattctatattcttatccgaaaacaccattcttccactgataacctgaggatatcctgcgtttggaagtgcagtgaatattttttttgtgtattttctattcctgcttacaaactgctccatatgtgcaggaccaatgccacagttaaatccaacagcatctatactatctatttcatcagccagtgatataagctttcttgcactaagtccagaactgctgtatccatactgattaatagcaaactgcactataataaaggcatcctttggaacagccttgattgcttctataatatgggaaatgtcagaaaatgtttcaaacacatatatattaacccccagcttagcaaatgtgtttactatctggacgtattcattctctgttatctgacggtcaaacatattatcgttaggtacaggtcctatatctgctgcaatataaacctcctttccagataataaagctgcctgtctggcgttttgcacagctgctttaatattggctcttacaccttctatatcagtatcaagattaatcgtattactggcaaatgtattagttcttaaaagtctggcaccagcctcaatatactccctgtggatagccgtaattctgtccttatagtttatattatctttttcgggaagctcacgtgtatcatataatccagcataatatgtaccaaacgctccatccgttataagtatattatccttaagataatctcttatattatccatatatatatctatctcctgtcaaataaataataagatgccggcagccaaatatttaatccctgcatcaaaaaaatgtcccttatcatagtcacgtaccataatacaaagattatgggggatacatagtgtatgcccccataactatcctgtgtttattatataatagaatgatatacgtgtcaaaagcaaatttcaacacacatacaaacaaacatattgtttaaaacattaatgcgtaaggaagaacattaacaaaaataatacggcaataatccatgtaaatgctttaacttccttagccttacctgaaaataccttaatcagaacataagataaaataccaaatgcaataccatagcttatgttatatgcaaaagccataaatgcaatagtcaagaaagcaggaacagctacagaaatgtctttccagtcaatgtctgcaactccacccatcataagtacacctacatatataagtgctgctgccgttgcacatcctggaataagtgctgctataggacttaaaaacatggcaacaaagaaaaggcagcctgttgtaaatgctgaaaggcctgttcttccaccctcagctacacctgatgttgactcaacgaaggtagtaaccgttgatgtaccacatatagcaccaacacatgtagctatggcatctgataacatagccttttcaaagttaggaacttgtccatccttatcgagtaaatcacctcttgaacatgcaccatataaagttccgagagtatcaaacatgtctaccatacagaaagcaagtgctgttgttgcaataacaagcacaagatctgcgcttgaatggtccgctagataacctgagaaattaaacccttctgtaaacaccttaccaaacgactcagatgcccagtcaccaaaggctgcaaaaggattaagagtcataccatcaaaaaagccatcgtaaaaccctggcactgtaaaacctagtacataatagataatacttccaccaagaataccccagagtactgacccctttattttcctgacagtcagtacagctataataacaagtgccataatagtaacaaacttaggcataatatcagtccatgttgcgttaccattaagaatgttaaaagatgaaagattaacaagtgttgattcatcattaactataattccagcattctgtaatccaagaaatgcaataaaaagaccaataccagctgaaatagcctttcttacggcatcaggaatagccgtaaaaagctttgtgcggatacctgtcaatgtaagaattataaatactataccatctaataatacgagcacgagtgcattagcatagcttagtccaaaattaaagcatgctgtataaacaaaaaatgcattaagtcccatgcctgaagctaagccaagcggaagattggcaagaaatgccatagcaaaagtaccagctactgctgataatgctgttgcgatatatatcgcattataagatacctctggtaaagccgaaagcatacctgcgtttaccataagtatataagccatggccataaaagttgtaatacctgcaagaatttcaacctttactgtagaaccatgctcttttactttaaaatacttttccattataaatgctccgtttctataaatatattgctattaattatatcatacaatatgtaatctggctatatgatttttagtatttcactgacaatttcctcagtttttgatgacttgtattgaaaaaaatacgttattaattatatccaacagaaaatcccccttaaagtaggatgtaaatattgtgtactatgataatatgaaaatatgcttaacatatatatccggaattgatgtaagcatattttcatataacctgcataataagatttttaaccataatatcttattttatagtacgtgaacaggttatctttgtaaaaagttatctatataaaaagaaagcctgttagcagctggggagatctgctatacacgctttcttttttatatttatatgtttatttatatcattcagccagttcttttatattcttaagaacatcatctacattatatggctttgtaacaaactttttcgctcctatttttaaagccttaataaccttattctgctgtcctgctgctgtaatcatgataactttagcatcaggattataatccataattctttcaagacattcaataccatccatattaggcattgtaatatccaatgtaactatatctggctcatactgcttatatgcaagttcaccttcaaaaccatcagatgcttctgcgactatacaataaccggcttcttctaatatatctcttaacatcattctagacattccagaatcatccactataagtactgttgttttttcacctgtctcatcaacactaccttccttaactgccatctttcttgtaactggcatctgtcctatgctcacatcactgtctactgcaatatacaatgaaacctctttgccattaatgtatataggcaatacataggcactgccttttgcaatctgattctcgtatgaaaactgtggaagaatctcaacttctatattctcagctgataatgctgatgagaaaagcccatctatacagttaacaaactcacccactgcatcataactttctagtcctaaggtatatgccccacgctttgaatatccagcagctatctttataaatccatctggatcatcctttacggcaaagcctatgactgtattaatatcgccttcacattgctgtccggaaaaagctctgtaatcaaaattgttaacatgttctatttttccgatataataattatctgtaacaaatcttgttatatttcttaaagcaagtgcggctattcttgtaacataaggattagcggcataagcaaacataggaactatactgtctatatcttcactcttaagtgactcaagttcttcaaatgtaaatcctatgcttttcctgaaatcctctatgtataactctatcttatcctgcttaatacctgtaacctcttcaagcacctggataaacttaatatatggactggcctgttttgaaagtatcatatcaagctgttctttagtgatatatccctcttcaactgctatatcaccaaaccttgcatccttttgtgtctgaagtatattaatcctttcagctttttcctttgtaaggataccttctgaaacagcaataagaccaagctttgcacgtgttttttctacttttgcaagaatatcctcatattgttcctcactaataatatcactctcaataagatattttccaaataactgactaaacataaaaactctccttaacaatatattcacgttatatcaatatcagaatcaatacatatatcctccaagatttcaatatattatatctgataactgattaatttagtctattttaacacatatgatattaaaaatgaataacttttttgtttttatgacgagatttataaacaatttcacaaaaattttcaagctttcccaaaataaaaaagatgcaatagtctatattgcacctttttaatatcattttttatccaagaggacatgtgatcctgaacatttcttctattatgtgatgtaaaagctgtgcagtctgtgtatcagcaagtctgtaatatatttccttgccatcccttctgctgactatcagtccactcttttttaaaagcttaagatgatgtgatactgccggatcactcatctgcatagctgcagctatattactgacacattcctcacaatggcacagcagccataatatacgtattctgctgccatcactaatctgcttgaatacctcagcaactaacacacactcctctgaatctggcattctttccagcactttttctatattctgtccatgatcatgtggaagattaactcctgacatgcgtatctccttttgtaaacatattaatattttactaatctaatccttatatacaaggcatcttgtagcattaagcacagcaagcaccataacacctacatctgcaaatatagcaatccacatattagctatacctatagcacctaaaaacagacatataaacttaaccataagtgcaaacactatattctggtgtacaatttttaaagtctttgctgatatattcatagctgttgctatcttagaaggatcatcatccataagtactatatctgctgcctcaatagccgcatcagaaccaagcgctcccatagctatgccaatatctgcccttgaaagcacaggcgcatcattgattccatctccaacaaaggcaagtacttcattcttctctttttcatcaagaagcttttcgacctcaaaaaccttatctgcaggaagcaattcacttttaacaacatctacccctatctgctttcctacggcatcagcaaccttctttgaatcacctgtaagcataacaactttctttactcctgctttctttaagtctttaaccgcctttgcagatgttggcttaattatatctgatatgattatacagcctgcatatacgccgtcaactgacacatacacaagtgttcctgtttttttatctataaaagactgcgtaggtgttgtgtctatgccatattgttccataagctttttatttcctacaagaatctttctgccttttatatctgcacacacaccatgtccgcttatctcttctatatcagatataacattagtatcaatattcttattatatgcattccttatactcttgcttataggatgcgtagaataactttctgcatatgctgccagtttaagaagttcttctttttgatatgaattagcggtaacaacatccgtaacctcaaatacaccctttgtaagtgttccggttttatcacatacgatatattttgcctttgataaaatctcaagataattagagccttttataagtatgcctcttgaagatgctccacctattcccccaaagaaactaagcggaatagatatgactaatgcacatggacaacttataacaagtgttgtaagtgctcttataagccacttagaccactcagaggaattccccataacaagattgactaccggtggaataacagcaagtgcaagtgctcctatacatacagctggcgtatacacttttgcaaatcttgttataaaattttctgaacgtgatttcttcatactggaattttctaccaggtcaagtattttagatactgttgaatcaccaaattctttatctgtcttaatcttaagaagccctgtaagattaacacagccacttataacctcttcaccctctttagcacttcttggtacactttcgcctgtaagggcacttgtattaagtgtagagcttccctctactacaatgccatcaataggaatcttttctcctggtttaacaactataacgctgccaacctcaacatcatcaggatcaacctgttctaacttcccatcaacctcaatattagcataatcaggtcttatatccataagtgctgtgatattcttcctgctttttccaactgcatagctttgaaacagttctcctatctgataaaacagcataactgccgttccctcaacatattcgccaagagctatagcaccaactgttgctattgccataaggaagttctcatcaaatacctgtctgttaaatatcccatatacagccttttttaatatatcatatccaataataaaatatggaacaagaaaagcgataagttctacatacttattaacattaacaaaatgaaataccagtttaagaagaataatcaataccgaagcaattattattcttataagcacctttttttgtttcttagtcatataaaccacaacctttcatatcaatcagattcagcttataaaaaaatctcacaatctgattctacctttttgcagttctttaaaacctcctgcataactgtatcagctgctgcaccatcctcgaattcaactttcatcttctgtgtcataaaagaaactgtggcatccttaacaccacttgttttcttagctgcctcctccatctttaaagcacagttagcacagtctacttcgattccataagtcttcttcataataaatacccgcatatattgtatatgcttaccctttctttacaattctataacaacaatatatatagtctgattcatatagaaccatttcttatataaacatttaaacaaatgtttaagtgtttgtcaatagctgattaaatattttccgcttagtgataaactttatctttaaccaaaaataaccaaaaaagtcttatcgtacccacacgataagacttttaaaccttttaccgtaaaattattacgctttagtcattattagatttattttttaagacctgctttactaatactttttatttctttaacaagttcgttagaaacacctactattctgtctgtagatgatttgcagctggccatgacgttctccagattcttcatattatcccttgttatctttccgctttgtgcattctgttgtgcaaactctgtaagattatcaactcctaaagctatattattcttatgttcttcaagatcatctacttcacctgttattccacctattgcatctccaacacggtttatttctgaattaagtgttccaaatatagcctctgtatccttaatctttgcatcctgcttttcaaatgcatctgttaccttcttaactgtctcaacacttatatcagaattctcaataaggccattaactatgttattaatatgctcagttgattcccttgactggtctgcaagtgctcttatctgttcagctactacggcaaatcctcgtccattctcacctgctcttgctgcttctatgctggcattaagtgcaagaagattcgtctggtttgatataccagctataatctctgttacttttcttatctcctgtgcagattcgtttgtacgctgtgtttctttgctgacctcttccatggcgtgtccgcttttctcacttatacatataagttctttcatgatgtctgccgctttatcgttacattcagtaacggtatccacgctctccttaagtccttcaatattcttatgtatattatctacagcactgcttattgaatcagtttttacctttatatcttctaccttatccacctggactgtcgtattacctgtgattgtatctactgccgaattagtattgtttacaacttcctgcatctggctgaacattttgacaaactcttctgatacctgttcaagctcagttgttgccgttcttattgccgatatagtgtttgttataccaccaaacgtattctggatattacgtaccagttctcctgtctcatcatttcttaaagataacttctgaagtttttcattaaccttttcatttgctttatcatctgctgaaattcctgttatcgcagcccttataggaataacaacactccttataacactaataatacgcaaaagaactatgccaaatactataagcataataataaatgctggtaaaaccccaataatattattgtttaacaaaataaagataactatcatgactataagcaaaggtgcgaaaaatgcagctgccatcattataagtttcctgcctgttttagctttattttccataatttcctccattctggagtatcatatataccccatttagtattaacattgtattaaattttctatagctcagaaattctagttttaattttcattattcagtttttcatcattgacgtatcttttttcaaattccacagccggataaggctttccaaaaagatatccctgtatataatcagcaccaggttctcttagctgtcttaaatcatctgatgtttcaacaccttctatacacagcttaagtccgagcgaatgtgccatatctattatatatgtcataagctcataatcatatttatttctaagtgcctttaatgtaaatgttctgtctatcttaatataattgggtttaagatcactcaggcaatgaaggtttgagtatcctgttccaaaatcatcaagaataacatacacaccattatccttcagctttctccacaaatgattaaaatgtgtactagagtcaaggtatccgctttctgttagttctattccgatgcatgatggctgtaatgaatatttatctataaccgacattatatctgaaaaaacatcacttttcataacctggatatatgacacattaatatttaccctgaaatcctttacatgctcattccagatactgcactgttttgcagattgctcaagtatccatctgccagctggtattataagaccagtttcttcaagaacaggtatgaattccactggcgatatatattcacactcatccacgccttctttttttatggaaaatctcataagagcttctgcacctgtgagcatatatgtagaagcatcaactaccggctgataaaacacctgaaaacctttaaaatcttcattgacagcattatgaagtgctttacttatgtatagctttcttttatagctgtcatagtcagtcttactatatatataataattattcctaccattatctttggcagtttttaaagcaaattctgacaactttacatagttttcttcttcaagtgttatatcccttgtattaataatacctgctgataaagtatatatagtattatatctgttattttcaatgaagttattaatatgttttttacactgcttatatatatcaactgcctcgtttattgaagaaccattgaaatcaacaataataaattcatctgatcctgccttaaaaagtttttgtgttggttttatactctctaatatacattctgcagttctctttaatataaagtccccatagctcattccgaaatcagcattaattgtactgaaattatctatactcattcttataataaagccatctggaatattatctgtacaggtatctttaatatatctgtcaagtgcatattcaccaagaagaccacttacgttgtcagcctccggctttacacctatttcattaatacatccaaccaggtaatgtggctgggtattttcatcaaacaaaactgaacctctgcagttaatccatactggattattatgcttatccagccatctgtatttcatgtcatggaactttttcttaccagctttaatctgttctatttccttaccaagcatagaaatatcttctggatatacaaaatcctcatgtttttttgttgcattatagaatttatcagatggaagaataaacctttctgttgcatgctttgatatgacataataatcttccttaagatcgaacacgtataaataatcattcatgcacggattcaatatcctgatagcatcctctatctgtttttttgacatgtttaacacactatctaacattatcatcttcccttctgtctatatctgatgtaagagacagaataccttttaaccctgacatcttaatatataaaatacaattttgccatataaaagtcaaatattagttggatttcgttaaaaattatgctaatatctacttaactttaaaaggcaggaacagtttatgaataataatgatatttataatgacgaaaacattcatactaatgactctgtaaacagcaataaagagttgatttcatacacaaaaaatgaaatatcacaagaaatggatatactttcccgctcatttgacagtgtacggcttgttaatccatttgaatgctgcgttacacagattgaagataataaaacagatggtacttctctaacgaataaatgctatgatgtatggaacgctccataccaatgccagaactgcacctcagcaagagctcttataactaaacagacccagtcaaagcttgatgtagttgataacaatatatatcaggtaacatcacgtcctgttattgttgatggaaaagctcttgttttagagatagtcaagcttttttcttacacatacaaccgttataactcttctaattcaagaaagaagcttataagtgctattaacgcttttaacagtcagcttctgcaggataaagaaacgaattcctataacagggattatctttctgaacatcttcctaatcttatatgtgaagcaaagaaaacccacagatcaaacacagcgcttatcaacctcagacatttatatgacataactcagtctgaaggaagtatggctgcctctggaattatatgcagtctttactctcttttaaaccagatttttcatgatgaaactgatattgatctgctatttgtaagatatagtcctgatacgtttttcgtacttgaaaacaagcttgattataaaaacttttgtgaacgtattgaattacttccaaaaaaagctgcgccagagcatatactttttaatgataaaagactgccctttgatattaaaacagcctgtgccgacttaggcaatgaaaatatcaacactgaaaatgaactttttgatattctcaaaaaaagaatcgatgaaaaaaattgataattaacatttgaatttatttccatatatgttattatataatataatgcaaaacaataatgattatcattattaaaatattttttaggaggtcttaattatgacagacacatttatatcagattcaataaaatatattggtgctgatgatactactcttgatctttttgaaagtcagtacaaggttccaaatggtatggcttacaattcatatataatacttgatgaaaaagtagctgttatggatactatagacgaaagaaaatcagaagaatggtttaataatcttaatgcagctcttaatggcagagatgttgactatatcgtaatatctcacttagaacctgatcatgcatctaacatcaaggctctcgctgataaatatcctgatgcaaagcttgttcttagcgctaaagccaaagctatgcttcctcagtttttcaacattgataatcttgatgaacgctgccaggttgttgcagaaaacgatgagctttcacttggtaaacataaacttgtatttataatggctcctatggttcactggccagaagtcatgctggaatatgaaacaacagaaaaggtacttttctctgcagatgcctttggtaaattcggtgcactgtgtactgatgaagactggacatgtgaagcaagaagatattattttaatatagttggtaaatatggtgcgcctgtacagacattattaaaaaaggctgccggtcttgatatcaaaactatatgtccgcttcatggaccagtccttaaggataatcttaattattatattgaaaaataccttacatggagcagttatgaaccagaagatgatggtatccttgtagcatgtgcttctatccatggcaacactaaaaccgctgccttaaaaatggtagatattctaaaggaaaatggctatgaaaaagtagcatttacagatcttacaagggatgatatggcagaagctgtcgaagacgcttttcgttatggacgtcttattgtggcagcagcttcatatgatggcggcgtattcccacctatggaggattttgttaacagactttcacataaagcttaccagaaacgtaaagtcggaatcatagaaaacggctcatgggctcctaccgctgcaagatggttaaagacagcctttgagggcatgaaaaacataacaatctgtcctgatattgtaacaataaaatccacaatgaacgataataatattgcggatatgaaaaaaatggcagaagaaattaaataaaattaaaattatcgtttgattgaatttctttaacaaatcaatcaaacgataattttttaaagcatcgtataaagtaaactatttccgcagctgctgttatcatccatgaacaaggatacaataagaaaagggatggaatcgtatggacatatgcaaatattgtatatacccaggcaaccctgaatacacatgaaccaataataacaactatagttggtactattgtctttccaatacctcttgatgccgctatcgtacaatccataaaagatgacaaggcatacgaaaaacccatgatcataattctctgcataccagcttccacaacctgtggctcacttgtaaacaatgataaaaactgtcttccgaatataataagcagcccacctaatatagctgcagctaaaaaggcataggacatacttattatatagctttttaacatacgtttcttattatgcgctcccatattctgtcccataaaacttgagcacgctgtataaaaagccatcataacattatatatcagtgcatcagcattggccgcagctgcattacctgataccataactgcactaaatgagttgacacctgtctgtataaaaagattagccatagcaaatatagcattctgtattccggctggtattccaagcatcaatataacctttgacactcctttatataatcttaattcctttactcttaatctgcagacatcctcatcttttcttttaaacagattaagaacaaccaaaaaagctgatatatactgtgctgttatacttgcaaatgcaacaccatcttctgccatacctattcctataacaaatataagattaagacatacattaacaacgcctgcaaacgaaagatatataagcggttttttcgtatctccacttgcactcataacagcattgccgaaattatatattgccatagcaggcattccaagtgcatatatcctgaaatataaaacagctccggatataagctcttgctttgtattcataagtgttaagaaaaattttgctcctgttatacataacacacatgctataattccaactaaaagacttaaaataaatgatgtatggattgtttttcttacattttccttctgacctgcaccaagctgctgggcagttcttacattgactccacaacccatgccaataagaaagcctgtaaataatgtaacaagaagcgatgtggaaccaactgcaccaagcgcttcatagcttgaaaactttcctacaactgcaacatctgacatattaaacagcacttcaagtatctgtgccagcataagtggaacactgaatttaagtatatttaatggaatagaacctgttgtcatatccatagctgatgtttttcttttgttattattacccatatatatctccaataaacatgtatacatcagtaagtggcaaaattcacttttgacactcacatcattttatttaacattttaaacataaccggataatgaatataacatataaagcagataatttcaattgaattatttaagatacttaatcacctgtgatgcagcattggcaccatcagcagcagctgttataacctgtcttaactgctttgtcctgacatcccctgcagcataaaaaccgcctgctgaagtaacacaatcctctgctgcaacaacatatccattattatcaagttctacaatacctttaagaatatctgtttcaggctccatgccaactgctacaaaaaggcctgctgattttatgacctgtccatcactaagaaccacctcttcaagctttttttcccctcttaatgcctgtatatttacattggtaattatatggacattctttctttcctgcagttttttaagagtagctgcattacctctgaattcatcccttctatgcacaatatacacatcgtggcatatatcagccaaatacatagcatcgccaagagcactattcccccctcctgcaacaactacacttttatccttataaaatgcaccatcacatacagcacagtatgaaacaccttttcctatatattcatcctcttcttttataccaagatgacgatgatgacttcccgctgcgtatataactgtttttgaaagcttatatgtgccatctgaaagtatagttttccacaaaagcttattacctgcaggagctgtatctatcttaccatcagtacatgttattcctgtaacctcgccatcttctatgtcaactcccaaagatatcgcatgatttctaaaacattctccaagatcaaaaccatttaccgcaggaataccaagataattatctactttatcactatatgcaatctgtcctgcacccatatattccttttctattacaagaatattcagtcctgcccttttagcatatatagctgctgacaaacctgctggtccactgcctactataaccacatcatatatattttctaattctgtcataaatataatctacctttctattactatacaattcacgtataatctatacaaacaatgcaggcaatcggaattaacgactacctgcatccattattatatatcatatctctaaataatatgcaaatcttctttttcagaaacatttccttctatatgaaatgagttaagcactggctcatctgcattcataagagaaagtatcatataacttgctttactgtcatatgcaagccttttatcctcttctgatggtcttgaaggagattcaggatgcgaatgccagttgccaagaggaactaatccttcagctctcatgtccttaactgccgcaagctgctccttaggatccattgaaaaatgttcattagaatgatcaatattagtcagaagatatactttctttatatacttattaccatcctctattgttccacctataaggccacaggcttcctctggaagattaacctttgcatattcaagaattttatcataatcatttttattaaatgtaatcaccttgcaaaacctccttccttttatggcataaacttaaaatcagtggtcttcacagactacctgttcataatctataagctcagttatagttggattcttaccacatacagcacagccatctgtattagaaggaagcttaatcttatggaactcctgtgttatagcatcatatgtaagaagatatcctgtaagcagctctcctactccaaggatatacttgatagcctccatagcctgaagacttcctatgacacctcccatagctccgataacaccagcctgcttgcatgtaggtaccgcatcctttggtggtggattcttaaatacacatctgtagcatggtccttcaccaggaacataagtcataagctgacccttgaatctgataataccagcatgtgaaaaaggcttcttagccattacacatgcatcattaatcaaaaacttagctggaaagttatcagtaccatcaataataaaatcataatccttaataatgtccatgatattttcacttgttataaactctctatatgtattaaccctgacatcagggttcatcgcattaatagtttccttagctgactggactttggcctttcctacatcaactgtctgatgtataatctgtctttgcaggttgctaagatcaacctcgtcagcatcagctataccgattgttccaacacctgctgctgccagatacatagctgctggtgcaccaagtcctcctgcgcctattataagcactttagcattaagtaatttcttctgtcccttagcaccaacttcttttaatataatgtggcgcgaataacgttctatctgctcatctgataaagccatatattttctccttctaaacttatatttttctttcattaaatgacaattcctttattatctttgtccaccgcccatgaaatataaaaattcaacattatctccatcctttaactggtacgtttccttctggtcacctggaatgaattcttcattgattgaaactgttacatattctggtgtttctacattctcgaattcaaaaagctttggaagtgttattccatcttcatattctttctttactcctgatactgttaactgcatattttacctctttcctgcctttatgtcataaatatatttaactgaataatgatatgtaaaaagtatgttttacatgctaaaagcttatgaattagcttctataaagcttaccagttcatccttttttaacacacctgtgtgtcttgccttttcttctccatccttaaatagcacaagtgttggagccgcacttacatcatatttctgtgctgcatcagcatcgaagttgatatttaccttataaacaaccagactgccagccttctcatcctctactgttccaagaaccggtgcaaggcgcttgcatggaacacagctatcagaataaaaatcaaccagaactggaagtgaactattcagtactttttcatcaaaatcctgtaacttaattctttctgccatattaatcctcttttctgctctaatcttctaccttcttaactataagcgtataagtttcatcctcgttattaacaagcttgagtatctgatggccctcatctttaatacttcttggaacattagctactggttcaccatcattcatacgtatagcaataatctcaccatcatccagctcatcaatagccacctttgctttaacaaatgtaagcgggcataccttatcagttatatcaactgtatcatcaatactaattccttctatttccataactattctcccttctttcatagaacatctggcactattattttattatatacatataaaagcgctttaatctatattcctagtatctttatatgtttatatgttatatattaccacattattttctgttatacaatgtgaaatttaaaatttattctggaattcttatttttattccagatatatctatttattccagacacatcagaaattcatagcttttagaatatcttaacgatagctataaaacctctgatgtatctgccagcatactacttaccttcgtaagcagccataatttcttttctgaattcatcctcaccaagtctttgtaaagtaagtctgaatctttcacctgcattagcatttctttcaaagaatcctattgctgcatctgtgactctgaaaagagtttcttcatctgtgataagaggaagaagctgttcacctttatatatatgatttccaaaaagtccaccaaaagatacaataaaaccactctttccttcccatgcctctgttggacaggccttaacacaacgtccacaattattacacttggttctgtcaatcgtaactgtattgttagcacagcttatagcacccctacgacaggctttttcacataccccacagttgatgcatttatcctcaatccagcttacttccataccgccttttatgccgatatcattctcttcagccttaagacagttgttctgacaacctgtaacaccaaacttaaacttatgaggaagctctcttccaaagtaatgttcatcaagcttctttgcaatatcatatgaatctatacagccgctaggacatacagcatttccctgacaggctgtaaccgttcttactcttggaccacatacaccaggcttaactccaccatctgcaagttctgcccttacctcttcgatattctcaaagttgataaaaggaatctcaacaccctgtctagatgtcatatgtacatatcccttaccatatttatccgcaacatcagcaacagccctgatattctcagatgtaagattaccacctacaacctggattctaagtgaaaaatatcctttctgtttctgtctcataaatccgccctttttaagtgctgaataatcaatattagccataatttcctccatctgcccattaatcctattataaccatcaatatgaatatgcatttcatataatcatcataacctttatgggtttaataatgtgtttgtatatcagaccagcctctatgcacgctgtatgaattctactgcctgtgtgaaatcttctatgagatcttcaatattctctattccaacgcttatccttaccagatcatcatatacacccgcgattttcttttcttcatcagtgctatgaacactgatagttgaaccaggatgaataacaagtgttttggtatctcctatattggaaacgttaagtggaaactttaatgcattgataaacttaaatgcattctccttgcttccagttcttatagtaattattccaccatatccgttgtgcagttccttatgtgctatctcatggaattcactacttttaagtccaggatagttaacatttaagaaattataattcttattaagatattctgcaagctttaatgcattatcagtaatacgttccatacgcagccctaaagtttctatgcctagtatattatagaaagcattctgtggtgacagacaggcaccagtatttctatatattccatttcttagcttagctgtatatgcatatggaccaaatctggcaaaatctttcatacctggatattttacactatcccacttaaaattaccagagtcagttataacaccactgatagaattactgttgccattcacatatttagaagtagagttgacaactatgtctgctccatattcaatcggttttataagatatgctgtagcaacagtattatctactataagcggcacccctgctttgtgggctgccaaagacagaagccttatatctgtaacatccagccttgggtttcctattgtttctgcgaaatacaatctggtatgttcattagtagcagcctcaaactgctctatgttgttattttcaacataatgtgtccttattccaaaagcttcaagatctttaaacaaatctatacttccaccataaagacttgcgctgcagactatctcatcaccacttcttaatatattagtaaatgcatttgttatggctgccatgcccgatgcacaggcaacacttgctacgcccccctctagcgctgtcattctcttctcaaacgaatcaacagtcggattgcttattctgctatatgaaaaaccaggtgctttattgttaaatatcttctcaagagtttctgcacttgcatgttcaaatgcactggattgatatacaggtgtctgtgtagctcccgttttcttatctcctctgaaatctccgtgaagtaatgcagtattaaatctcatatcttcatctccaatcacataaactataaacctacttgtttaatatggattagattttaatctctatggaagtatttgtcaatactttattcatataaatttggtatgtaaatgtgttttttatatttgattaaatgtaaatgatatgataatctgtctatattgcatattaagatgtcaggatcaaaagatattctgctcctgaataatgtataaatatagataaaagaggattataatgtcagataataacaataacagttcgaaatgctacagcaacattaacaacaacaacaataataatagctgcaataaaaaacacattataaacatggaaaaaaatacaagtacaatcatttttcttataattctgcttataactgcttcactccttagtataatgcttggaagtgtaagacttaaagtcacagatatactacaatgtctcacaggcagagataaatcatcagttacatatatacttataatgaatataagaatccccagaacattcggagctattatagctggcatgggactgtcagttgccggcgttatacttcagagtgttatgaataatgctcttgctagccctaacactataggtgtgaattcaggtgctggattttttgtaatgctctcactgcttttatttccgaattcagtctatgccggatcatttgctgcattcataggtgcactgcttactactttatgtatatatgctcttgcgtattttgctgacagttcaagaacaactattgttcttgcaggcattacagtatcatcttttcttaatgccggcattaacactataaagcttttaaatgcagatatatcaatcaatcttacatcttttcttatgggctctctttcaggactgaccatgaaaaaaatactacttccatgtatcggtgttatcatagcagttattattactatgttttttgcaagacctcttaatatactgtcactaggtgatgattatgcacgttctcttggacttaatgtaaacatgacacgctttattctacttgttttatcaagtattatggcaggttttatagtaagctttgccgggttgttaagtttcataggtcttatagttccgcatatatgccggaacctgtttggaagtgatgcaaagcttctgcttccaacaagcgtactgcttggtgcatcctttgtactaatatgtgatatagcaggccgtcttttagctgcgccttttgagcttccagctggcataatcatggcatttgtaggcggaccattctttatgtatctgctgcttaaaaagaaaggaggaagaagggtaaatgcttagttacaaacatgtcagtgtttcagtttcaggaacacatatattagaagatatcaatatagactttaatgatggaaatataactactatagtaggtcctaacggatgtggaaaaaccactcttttatcatgtcttaactcaagtgctaaggtaacctctggaaacatatgtataaacgatattgatttcttaaagcttccgctaaaggaacgtgcaagagaagttgcatttcttcctcagatacgcactgttatacctgtacttcctgtaagaactcttgttgaacatggacgttttccttatctgggatttacacgaagaaaaagtaaggaagacattgatatcgtcaatcagtctatggattttacccatgtcacagcttattcagagcaaaatgctgatactttatcaggaggcataagacagcgtgtattcttttctatgatacttgcacaggatagtcagattatagttatggatgagcctgtcacatatcttgatcttgagggaaaaagaaacttttttaacatgcttaaaaagctaagacagtcaggaaaaactattatacttgtacttcatgagctttctgatgccataagaatatcagacaatattgttattatgaatgatagaaaaatagttgcacatggaacacctgatgaatgtatcagcagtcacataatagaagatgttttccatacaacatataaaaaattctcagatgaggatggcgattattatatctttatgtagtttcagattttacccacaaaaaaagcatctaccatttggtagatgcttttagtgcagtcggcgggacttgaacccgcacccaagcaatatggactagatccttagtctagcgcgtatgccaattccgccacgactgcctgctcatatgtattcatatgttttatatcggtcacccgacttgatatatattacattataaatacatatttgtaaagcactttttaaatattttttatattttattaaaatgcctctccaactacctgatacatattatcatcagatataacatttattacattagtgtactttttaaatatatccgcaagcctgtctgcctccataagtccgtcagacaccttatatgcacggcccttatgatgtgcatctatcttttcacggctcatgccatgtgccactgttattcttccaccagccttcagctttcctgataatatttctataagtctgtcaggctgtgtaaaatgtggaaacgcattatatataacaaccgaatcatagccatcacataaatcatattccatgacatctgcacagatgaattccactcttttatctttaaacttactctgtgctattttaatcatttcactagatatatctatggctgtaacagcgcttacgtcacgcgataaataatcaggtataagtactcctgttccacaggctacatcaagaactttgctatccttttttacaccggcattatcaaggatcatttggataatatcatcatttcttatcatacaggcatcccagcctggtgcacatttatcaaagaattctataacctctttcttatcaatcataatagtcctccattcttcatttctacactctatttcatttagttaaagaatgttgcggtatctattttcttatatccaccaaagcttaatggtgcagaaaatatctcatctgacatagcttttcctaaaaatgcctcagtaacctcatctgttttttcttttatatcaacatccttaaataattcaggatatactgttttagctatataccatgtattgatcagagctatttcataattagtataataagcattatatgccatctcaagatatacctcattattattccatgccttacatgtattaaacatatccggattattcttatataatggcttaatattcttaacagctgctgcatcaataatcattatatctattgaagctccgatatctgtgaatttttcttcttctatagactgaataccattctttgcaagtcctgttaccgcattttttacatttgctatattaaatgatacataattctgtgctgtcataagatgattggttgttccccagttaccaagaccacatatatatacagatggtttatctttatcttcaataccagcagttctttctgttatctgttttctctgatcatctatatattgtgtaagctgttctgcctcattttctctttcaaatatcttaccaagaagttccatgctttccttaaatgaatcatcaaacacaccattaactcctgcctttaaagtaataacaggtaccccaagctgttcataaagtgcattttctttttctacatcctcatactctgatataactatatcagggtcacatgaaagaatcttctctgcttccgctgtctgtgcattaggacctccaacaccacaggatggcagtttgttaaagctttcgctatatgccataacataaggtcttgctactgaatcaaacattttaggtctgtccttaagagttgtgttatctatatcttcaacaccacacaacaggctgacatctccaacgtagctatacattcttaacgctccggcacctatacatacaactcttttatagcttcccggcttaactgtaacacttcttccaatcatatctgttattgtaagctctgcctgattttgtgtcgtgcctgtactattatcagaagttgttttacatgcacacatggcaaatatggatacaacaaccataagacatgcagctacctttttgattaatttacttttcttcatatttttcatattattttgccctttcctttttatcatcatgagattcttgtcatcatgggattcttgactacaacttttctgtcatccacagtaataatctttacatcaacatcgtatatatcctttatgagctcttttgtaactatattatgtgaaccggcatactttatttttccatctttaaggaagaaaaacttatcgccgaaatataaagcctggtttatatcgtgcagagatgacagtatagatatattcttttgtttagcaagcttccttgcttcaagaatgatcagttcttcgttggcaggatcaagatttcccgtcggttcatcaaacactataagtccaggctgctgtgccatggctcttgcaatagcaatcttttgtctctcgcctcctgataactctgaaacactgcgcactgcaagttcctcaagcttcatctcttttattatattctcgacaacccttctgtcactatctgccgcccttactccaaaatatgaaagccgtccaagcattatagaatcatacactgataatgtaccaaactgtatattctgtggtacatatgctattttcctcgctctctggctccttgaagccttcgtcatatcaataccatcatagcttatagttcctgacacaggtctgcttattcctaatatattgttaaaaagtgtagtctttcctgctccatttctgcccagtattattcctatttcacctttttcaagttctaaagatacaccatcaagaacatatggggatatttttttatatctataacacagattgtctatcttaaacattattgcacctccgtgaaaatataattgcaacaaaaaaaggtgcaccaagcagtgaggttatggctcctactggcagagccgaaccatttcctatgcttcttgatattgtatcagcaaacaaaagtaaaagacttcccgtaagcgctgacacaggtatggaatagtggtgattctgtccccatatttttttcgttatatgcggacagataataccaacaaagcctattatcccaagaaatgatacgcataccgcaactataacagaactaagaagcagcgatatgaatcttaataattcaacatttactcctacacttttagctgcaacatcaccactaagcagtgcattatatctccatgatagtatcataaacaccaaaaatcctgctgccacgacaacaaacataatcagatctgtcttataagtagatctcccaagatcaccaaaattccatataacagctgccgacagacctacatctgttgcataaaactgaagtatcgttgtggcagcagtccagacagaaccaatagcaatcccggcaagtactacaacacccggatcaaacgaacgtatcctgcataatccaagtataacaagcactgaaagcactgagaatatgaaagccataagtgatgctgcatatggattaatacctgatgtatagttacttatattgtttcctgttgataaaaagccacctgcaaatgctatgatggacagattagcaccaaacacagctgcattagatacgcctaatgtagatggtgaagccatagaattgttaagtgttgtctgcataataagccctgatacagacaatcctgcccctgctataagtgctgcaagcacacgcggaacccttatattccatattatccttatctgtgcaggtgttccttttcttaaaagtgcatgtatgcaatccatcaaggtcatatttgcagagcctgcaaaaagacattctattgtcattagcagtactattaatacaagcacggctgctgctatacttttcttcctgtttttacttttaatatattcagccatatatccaaatccttatttcttttacaatacaaatgtcccaaacaaatctttttcagataccttaactatacagcatacctgaatgttttatctgggacattaaaccttatcaatatattatatataatttttacactttcacaagccgggtggggggataatcataagaactttttaacagacttctggaagtcttctactgctttcatatcaccattttcaatggcatgtactatacaatgtgtcatatgttcattaataatctctttaccaagattatgtaatgctgaattaactgctgttaactggataagtacatcagcacaatcatcatcgttttcaatcattgtctttacatgctgaagatgtcctatagcctttgatattctgttaagctgtttctttttagcttcaggtgaatgatagtgtccatgtggatgtattgtttcgctcattatcagcctctcttataacctatataaatatgtcaggaataaatatcctgctgcttatatcatattatcccacacagtaataatctgcaacctttttctttgactcttcacttttcctgtatacatacattgcttatatttttacgtttctttatctcaactagtttctttatcttaactgcatagtctggcaataacttctataacctcgtcaaggtcaagtggtttagccatatgtacattcatgcctgctgctatacattttcttgcatcctcttcaaatgcatttgcagtcatggctattattggtattaacctagcatcagctctgtccatagctcttattaatcttgtcgctgtcattccatcaagcttaggcatcataacatccatgagtatggcatcatatgtaccttccttacacataccaaactcttctacagcctgctgtccatcagaaacggtcttaactaaagccccttcatccctaagaaatgtttctattatctcctggttaagtttgttatcctcagcaagtaaaagacgtacacctgtaatatctagtgcttcacctgtattcttttgtgcatatcctgtcatatattctttttctgtctttttttgtgtgataagttcttcactgttattattcttcacatcttgtacatctgctgttttaaacggaattcttataacaaatgttgtgccttcatcctttttacttatggttttcacagttccatccatcttatctataagtctttttactatagccatcccaagtccggtaccctgatatatacttctcgcatctgatttttcctgtgcaaagggttcaaatatgtgttttaagaactcttcattcattcctactccgttatcggatatagtccactcatataaaaccttatcacttgttttatatacacacgaaaaatcagttctaacatatccccctactttattatatttaatacagtttccatatatattaagaaatatctgtcttaaatgcagcggactgccatatacatagggataaaacatattttctgatggtctgtcatattctaatgtaacacctgcatctgccgcccgctgttctacaatcgtgattacatcccctactaactggttaagatcaacaacctcatttgcaagctctatatctccatcctcaagcttgctcatctgtaaaacatcattgataagcgaaagaagatgattggcagcaacctccatctttttcctgttttcattaaccagtgctgtatctgtcatatgtttctcatctatctttaaaagtccgataattccattaagaggagttcttatatcatgtgtcatcctcgaaaggaaatccgattttgctgcatttgcctgttcttccctgcttatagcttcctttaactgctcattcttttttgcaagctcagaagcatactgttgtgaaagttcgctttgttctttttcataaatctgtcctgttttccatcttaacatattgtatattactattatgtacatatatatgacaaatgtatatattatgtgtgatattgtgttatcaaatatagctctctcaggaagatatatatatacataataatcccttccccgcttcataaggccaaaatcatgactataaggtgatttgctgctctgtgcgtgcataagtcttccgctctcatcagaatcctttattttctttaatataatataatcatcaacactattacctatcatatcttcattgctggatgatattattttatctccacttgttacaacaactgttccaccttcgctgtcataatatccagacaatatatgatcaaaagacagattgtaatcatcagcatattctgtcgatgtatgatagcaggttataactattcctgttccatctgccatacccttagcagccatatctacataagagccatcctctaagtctattctggttgcaaatgatttcaaagcattgtctgcaacatctaataatgaactgctttccatatactcatcaagctccacagtttccatatcatctttataatactgtgctacaggctttccattattgtctaataatataactgcactaagataacattcttctgtattctttttaagaaattcctgtgaaaatatataatctgcattttcttttattcttttttcgtatactatattctgttttatctgctgtgcgcttcctataaccctcataagactcttcgtctcggctgcaagattaattcttgtcacactattacactggtcattaatatgtcctgctgtatatgacagattcttctgtgctgatatgatatctgttcttattgcaaaaacagctacaatagcaataagaatcactcccatcaccgtttctataagaaatatatttatgttttttttaccaatataatgcttcttattcataagctcctacctccagatacttatcagtatctcctacgtatttttccagtatttccttttccgtaccatcatcacgcatattgataagtatatctgtgagtcttctatctatatcacgtttatcatttttatcaaatgcaacgccaagaccaactgtatctaatgattcctcaagtattctgaactgcatattataatccttcatatactgatttatgataacctcatttacagcaagagcatcagcgtatcctttactcaacataggatatgtaagctccctgtttttcatggacaacagtgaacgtatccttggtattctgctgtcttccatattaagaaacatctcctccggcttacttgctgcctgtacagctacagttttatcccaaaggtcttctatagtatatatattactgtctttattaactgcgatcactatacggcttttcatatatggacctgcccatctgtacttatcttctcttccattcatgctaaagcttccccatatacaatctatagtatggcttgataaaagctcctgcttatcatcccagtttatatttacaaatactgctttatatcccatccttctgaatgcctctgtagcaagctccacatctatacctgtcggattaccatcagaatccacataattaaaaggcggctgaatatcacttccgattataatttccttaagctgcacaccttcatttgcattaacatcatactgattatccctacatccacacagtacagctataaacatatatataataaagctgattgatatctttctttttatattgttcatctttctcacccttcttagcctttatcccactcttttaataataagctccttagtaaatctcattacaccaaaggaaatgtttacaatatttataccactagttaatagtcatattttgtcgaaaaaggaatgttcgacaaagcataaaatgtatgctatgatacataaaaatcaagaaaggagtactcaaagtgatgaaaaaaagaacattgcgacttattaattacatatttataatcgctattcttttgggaactatgtacctcgataaagtacaggcttattcctgtgacctttttaatgagaatattttttctgacacatcatactcatatagttgtgaaagtactccagatgccagttttaattctaatatcagatacaatcatgaatgcagggtttttgcgacaccagagccttctatagatgattcaagaccttgcaccacacagatgttaggtaatcctaactctaatatatcagaaaccataaatataagaactggcatacgctattctgcaagaattaatgctatgcttatatcagcttattacaatgctgacaataaccatgagcattattttacatataacagatctacggaaaatcttttttccatcctgacggttgtcgtcgattatatccacaatatggacggtgaaaaataggctgattctctttttatgatgatgtcaatattttatgtttagtgcaaacaactaaaaaactaaactaaaaattgcgcaaagaagcagcgcaagaatggagaattattatgaacatattaacatatatagctatcgctattggtggatttgtagctataggttctacacttagtattacacttggaattttcggaacaatcatctataaaatcatacgttccatcagatatcgtatatctttatttgactaattaacagacttaactaattattattattatattgcaggctgtgatcattaagcaactggcatatgaagcataataataaggtaatgctacaggtctatagtatagatttacagcctgcggaatggagtttatatggcaggaaatataactgttgctattgttataatacttattatcggtggaattatattcggctgctgggtcgacagggctgatactaagatagccgacaggaaaaatgaagcagcttctgataaacagacggctggtaaataacagatattaatattgggaaccgcatcaaaatgctttgtgctagcacagcactttgctacggcttttgcttcccactactacgccgtgcgcaagtctaagaaagcgaacgctttcttagactgtagggcattcgccctatcagactaaagtctaacaaaaagctttgtgctagcacagcactttgatatggcttttgcttcccactactacgccgtgcgcaagtccaagaaagctttgctttcttggactgtagggcattcgccctatcagacgaaagcctaacaaaaagctttgtgctagcacagctttttgttatcctttcgtctggcacggctcatttagatcacatagtcccagacttcatctttgaatactatttttctatatgttccgaagtctgtccacttgttgaagaatgtatcattgagagcttctttgccttccttaacggcatcaagttctgcgagtaactgggcgtattcgctctcgttggctgctttgactgcaaaacctctgctgtttacaactggaagtcctgtgtatgtataatcttctatcttttctatagactctatcttcttatttcttacagtaaccgctactctgtccctgaatactattacatcaaagctgtcaggatagttgtaagagtcaccacttacactgatttcctgtcctactgtatagttctttccggcaggacttacctttgtaactgtggcactttcaaggttgtagtaatattcttcaaataaatctgcattacccttgatattgccatttacaaatgcacacttgacttccttcttgtcatatacacttgtgtcagtaacaacaccgcaagccgatgtcatattgcttattctgtcaataagtataagctcaccaagtgtcttatgtttagcgaattcatctatgacaacaggctcctgtagtccgatatcacatactgctatttcattcttgctaagtccgttagcctcaataaacttacctgtattaacatctatcttgtactggatattctttaatacaccaagcacctgcttagttcctatctttacgatataatccttaccaactgtaagttcttcatcatccatccatagcattgtagctgtgaaagacttgataactggaagtgttgtctttgctgcaagaacacatcctcttgatacatcaacttccttatcaagctggatagtaacaggctgtccttcctgtgcactctggctgtccttatctcctataagaatactctttacattggcagtttcaccacttggaagggttgttatctcatcacctaccgatactacaccagactctatctgaccctggaagcctctgaatgtatggtctggacggcatactctctgaactggcatatagaagccttcttcctgcttcttctgacttacatcaacattttcaagataagtaagaagtgcttcaccatcataccaaggtgtgttatctgacctcttagtaatattatcgccctctgtagctgaaacagggataatctttacacttgccagtcctaattccttagataattcatctatctgtgctgtaatctcatcaaatctttccttagagtaaccaacaagatccatcttattaactgcaaatacgaaatacttgatgcccataagcgagcatattcttgcatgtctttttgtctgcacaagtacaccctgctttgcatctacaagaatgattgcaaggtctgcaaatgatgcaccaaccgccatatttcttgtatattcttcatgtcccggtgtatctgccacgataaagcttctcttatctgttgtaaagtatctgtatgcaacatcaattgtgatcccctgttctctttctgccataagtccatcaagaagaagtgagtaatcaatagcaccaccacggcttcccactttactgtcaagctctaaagccttttcctgatctgcatataaaagctttgaatcatataatatatgtcctattaatgtagactttccatcatccacgcttccgcatgttataaactttaataatcctgtcatcttagaaatacccctctctctttcttctttccatacttcctgctgcttcgttatcgataactcttgttgttctctcagaagatacagcactgagtgtttcatcgattatctcatcaagagttgttgcatttgactctataccacctgttaaaggatagcagccaagagttctaaagcgtacatttctgtattctatcttttcaccctctcttagcttgaagcggtcatcatcaaccattataagcattccatctctttcaacaaccggtcgtttgtctgcatagtaaagaggtacaatatcaatattctctcttttaatatactgccatatatctgtttcagtccagttagatatagggaatactcttatgctctcacccttattgatacgcgagttgtaaagtttccacatttctggacgctggttcttaggattccatgcctgattttcatttctgaatgagaatattctttccttagcccttgacttttcctcatctcttctgccaccgccaaatgctgctgtaaaaccatacttgttaagagcctgctttaaagcctgtgtcttcataatatctgtatacactgaaccatagtcgaaaggattaattcccttcttaacaccatcttcattaatatattctaacatttcgatgccaagcttcttagctgtttcatccctgaacttaatcatttccttgaacttccaggttgtattaacgtgaagaaatggaaatggtggcttctctggataaaatgctttcatagcaagatgaagcattactgagctgtcctttcctatagaataaagcataaccggcttttcacactccgccgctacctctcttattatatatattgcctcagcttcaagctgatcaagatgcgataattctgccattgttttatccgtcctttcattatatatattactttagaataattatcaacttccatagtatgtatatatgtatatatgtatatatgtttatatgttaataatcatttaagttgaataaactaattttttattacaaacatcagtacttattagattctttcttattaataactatcgtttctctgctgccatctgttttatctatgttccagttaaggtagtcacctttggcagtaacactcatcttacttcccataccacccatatctgctccaagatacagtgcaatagcctcgaacttacattccttaagacatgatgaacatccccagcaatccttaggatactttatatatgcctttttgtcctcacccatctttataagacttcctggacagacgatgctgcattgtccacatcctgcacatttgcttttatctatcactatgctcatatgtctcacctcttcctacaagatttctgaatataacctctatgttatcaccattctttctggtgttgacatacttaagccactcatctgacttatcgggataatcaagattttcagcaaagctgtgccatcttgtttcttttcttgcctttaaatgctctataagtacctgacagactgtaagtctttccttaagctcatacacaaacataagtccatggtaatctgctgctgacacatttcctgaaagtgtgataatctgttctatcttctgctttgcaagctcaagctgcttttcattaaactgatagtggcttccaataccaccagcataggtatccataaccttctgcatagcttcttcaagctgttctgtagaaaatacttcatcctgtctttcaagatatgcattatattcctcaagctttttacttacgaattcttcagcaaagctttctaaggctttataatcatctttaatatcatgacaacaataagcggcatcctgtgaactaaatgtatctgtcagctctgcctcttctttaagtgccttaacaatatctattgcagctatctcaccctctgccatagctcctgttacatacttctgaggacatccacctgcaacatcacctgccgcatacagtccatctatggtagttcttctgttagtatctacccagtaaccactggctgtatgtccacctacgatataaggttctgttccttctatctcaacattctgctcacttggattctttcctgactctatccacttaagtgtctggcttggtgccatattaagataagccttctttaaagattcatcctgttcgctgcttattccttctgttcttaagtaacatggtcctcttccttcgatattctctcttacagttccatatactctctgtgaggttgtaagaccatatttatcttcatacacttctccctttgagttaatctgcttagccccgactccctgagctatagttcctgttggtgctatagtatctttacaacgtaatgctatgaatctcatctcaaatgttgtcatctcagccccggcattaatccccattgcatatccagctccggtattaaacggtggataccacatcttatgccttgaaaatccagggttgttaggcttataaagaccagccgcccctcctgttgcacataaaactttctttgcccttatctcatatgcatatccatcatcaatgttgaaacctacagcaccaagaattttattatccttaactatataatctgttatattaagcctgtttataactgtcactccatcaagtgcttccactgccgaggcaagtataggcttgatattctcaccatttatcttaatattgcggttgcctcttgcaacatactttccattctcatccttaagtatgacaaggccaagcttctccatctttgctgtaacttcattaagtctttccgacatagtaagaagcagatcctctcttactatatcatcagcatcatttttagcataatcaacataatcttctggctttctgccttctactatatatgcattgatagcattaacacctgctgcaagacatccacttctttttatattagctttctccgctataatgatacttgctgtatctgactgctcttttatagtaagtgccgcataacagcccgctgtaccaccacctattataagaacatccgttgtaagcttctttaatccatttatcttcataagcactcctttttgaagtaaagtaatttctattttactactatcaccttaaagatttcacaatactataataatacaccatcagatatagaatacgtcatctgacttcatacccttattctcacacagataagttttctcactgtcaaccgcatatattctgtatataagcacatgtaccttctcacctaccgcaagaggttccttttccagcgaccactcacctgttattcttgtacatccgatattaactgtgacatccagatgattgcccctgaataatatatcttcaacatatccttcttctgatgcactgttgtactgttgaagctttccatactttgatatttttacaaactctggtcttatgaaagccatgtcagccccattaacttcatcaaatcccttaagtcttgaataatcactaacctctgatgcctttcctatgaactcaacaacaaaaggcgttgccggacttttatatatatctatcggactacccatctgttctattctgccatgattagttatgataatctcatcagcaacctcaacagcctcatcctgatcatgtgttacaaatatacttgttattccaagctttgtaaccatgcttctaagccatgttctaagctctgtccttaccttggcatctatcgcagcaaagggttcatctaaaagaagcacctgtgggttaggtgcaagcgctcttgcaaacgcaactctctgacgctgcccacctgataactggttaggatatcttttctcaagtcctgcaagtccagttatctcaagaagctctgtaactcttttccttatctcatcccttggcaccttctgaagcttaagaccaaaggctatattgtcatatactgtcatatgacgaaacaaagcataattctggaatacaaatcctatacctctcttgctggctggtatatcattaaccctctttccatctatgtatatatctccaaagcttggagtttcaagtcccgcaatcattcttaatatagttgttttaccacttcccgaagggccaagcagtgcaaccagctttcctttttcgatagaaaagtttacattatccgatgccctgaagcttccatattgcttaaatatatttctcatctcaacatacattacttaactcctcccttcttagcattcttctgtctgtattcaaacacattcttaagtataagtactatgactgctattattacaagtattgatgacacagcaaatgcagctgttatagatgaatctgtccccgacatatacagagcatctatctcaagaggaagtgtaaatgtctctccccttgtctttgacaatgcgtttaccgcaccaaactctccaagtgcccttgatgtacacaatataattccatatataagtgaccactttatattagggagtgtaatcttaaagaatattgtaaagccatctgcacccataagtgctgctgcttcctcctcatcctttccaagtgaattaagcaccggtattatttctcttgacacataaggaaatgtaacaaatatcgttgcaagcacaacacccggaactgcaaacgcaatccttatatttgttccaaatatctcattaaaccatcttataacaggataaaagaaaccaagtcttccaaatgtcataagaaatgcaagtccaactataacaggcgatattgaaaatggtatatctataagtgttgcaagcacctgttttcctttaaaatcaaaccttgtaagtacccaggctgctattattccaaataaggtattaataaaaagagccacaaaagttgctataaatgtaaccttaagtgcacttaacacataagaagtcgttactgcctttatataaaagcctactccctctttaagtgaacttactataatagagaacaggggaagtataagcatcacgatgataaaaaccactgtaataagcacacatatatttcttgttgttctttttcttttttcaagcttatcatttccgctcatgcttacctccattctgttaagctttttaattaatcttttattaacctcttatcagtttcctattgatttatatgttagttattgttaataatccaaatattttaatagcttgatgtattgcttaagatgttcttgctgccactctcatctgtataatatttatgataagtaatataagaaatgatataacaagcatcacaagtgcaatagctgtagcagaggcataatcaatataattgagcttctgcattatcacataagaaacaacctgtgtatgttccttggcactgttacccgatatatatataacacttccatactctcctatacctcttgcaaatgccaacccaaagcctgtaagaagtgccggacttatctctggaagtattaccttaaaaaatgtttttgccggacctgctcctaaaatataagctgcttcctcatactgtggatccatcttttcaagaactggtgttacagctcttactacaaaaggtataccaacgaatactaaggcaataacaagtccgatatgtgtatatgaaacctttattccaagcgatgcaagaggctttcctaacattcctgtctctgaatacagctttgaaagtgttatgcctgcaactgctgttggaagtgcaaaaggaagctcaataagtccatcaagtatccttttacatgtgaaatcatatttaacaaacgtccatgcaagtattgtaccgaatatacagttaataactgctgctataaaggaacagcttatacttgttataaatgcatttacaacatttttcttagtcacaagtgctataaactcaccaggcgaaagctttaacgaataaaccataaccgatgccagcggtataagcactataagcgataacgttgtcactgttattcctaatgtaagatgaaatccaggaataacccttaccttcctgtcctttactttttttccgttgaattcaggttctatattagttttatcagttgtcgtatatttcatcgaaccatcctccatcatcaaaatatatcctgtaagcttcatcccatccaccataatcttctattgatgtaagccgtacattcaaatcaaatttatcaccatattcagataatatattcttatctgatggtctgtagccatattttgctgccagtctttgtgcgctctcagaatacagatatgaaagatatgcacttgcaagctcttctgacctgttaaccttaacattatcatcaactactgccacactaggctgtgcaagtatactgactgaaggtgttactatctcatattcatcaggataagaattcaccgagttaatcgcttcgttttcccatgctataagcacatcaccttttttattctcaacaaatgttgttgttgaacctcttgctcctgaatcaagcactgaaacattggaatataattttcttaaaaattctttcttagaactctcatccgtatatttttcctctgcaaagcttaatgccgcaagaaaattccaacatgcaccaccactgctcttaggatcaggtgttattatctcaactccaccggcagtaagatcatcccagtcctttattccaaatggattgccttttcttactaagaacacaatcgttgatgtatatggtgctgaatctttatcatattcattcttccatccagcagctatcagtccggtattttctataagtgttatatcatgctcaagtgccagtgtcacgacatcagcattgcagccttcaaccactgatctagcctggcttcctgaaccaccatgcgactgtatcacctttatctgttttccataatggttcatataataatcagcaaatatgtcgttatactcctcataaaattctcttgttggatcatatgaaacattagttattgtaagtccgtctctcttatttgcgcatccggaaagaaaaaatactgataatgtcatacatgccataccaaccgcttttattgttttaattttattattaagcttactgatatttattatcttcattattcatatctcctttccatattttgtatagctgttatttaatgttaattttaaacctgttttcatatatacatagtctgttagtatgtttattgattaaaaaatattgccaggcttctttgagttgcctggcaacctttggaaattgtattgttatattatacccatttccctacaaagtcaatatgtttatgtggtttgttttaattttatttaatttctgatattttgcgtaccataaattctatcataaacttatatattcatgttaacagtatcacctgtaacaataacagcaggtgactgtataccttctttagcagttttttctactatatctttaagtgtacctctcactgccttatatgtaccatcaaaccctccacttataacagcagccggtgtgttttctgattttccttctttcataagggtatctgctatctctttaagatgtgtaagtcccatcagatatacacatgttccatccatggcagcagaatttctgatatccgcatgcaatgttttttcaccatcttttccatcgcctgatgtatgtcctgttataatcgaaaagcttctgcttacatctctgtgtgtaactggtattcctgccattgcaggaactgctatcgcagaacttatgcctggtatttcctctgtttctatacctgcttccttaagatactgtatctcttcagcaccccttccaaacacataaggatcaccgcctttaaggcgtaccacatattttccttcatttgctttggcaagaagaagctcattgatatcctgctgtggtgttgaatgtctttcatttcttttaccaacgtatatcttctcacagctctctaaagcatattctaacagtctttcatctatcaggtcatcatatacaagaacctctgctgccttgaccgcattaagtgctcttacggttatcaggtcatatgcaccacagccagctcctgctatcacaactctgccctttttcgtttcatcagcctcgttttctttaacagatgctattatctcatcaagttcgtcatcatccagctttcttccaagaaccatgcaccttcttgctgatgctttaaatatagcagctctcttagatgaatcttccaccttagcttttatattttcccttattgaacacagataatcaagtatctgctctatatcaggcggaagctctgatgctatacgattttttatatcagcagctatatatggactggctccctgtgtcgatatgcctatagacagatttccagctttatacacagatggaaacagaaactgacagttatccttatcatctacaacatttataaaaatatgatattttctacatacaccagcaacatatgcattgaattttttatcatccgttgccgctatacagaaagaacacccttcaagatccgaattaacgaattctctttcgatgaacttaacaccctctatgctctttatactgtcacttatctttgttgcaaccacagttatatcaggctcatatgcaagaatctttcttagcttatgctctgcaatcctgcctccacctatgattaatcctttttttcctttaatgtcaataaaaaacggaaaatatcccatttatttatcctcctataacattctgaatttattatgtattatactttaaccttacaacatgttattgttttagaatatctgcaagctgcttgtatgctgttccccatctggcattaggtttaatgttatataactttttatccagcacataatattttccttctttcacagcccttagtgaattccatgctgcattatctgtcaatagattattaatgctcttcatagctgcctgggtatcattcccctgcgttgtaacaaatatatagtctggatcagccgccactataccctcaagacttaaatcgtccagcatacttttatccgaatctgctatattgacacagccaagatctgatagcatctcaccacacacagagcccgtacttccctttgctttaacactactggcagctgttcttataaaaagcacctttggatgattattacccattgtactttttatttcatctatctgctgcttcacatcctcaccattagtcttatatagatctcttctcccagtgatcattgtacaatgatcaagcatattaagatactgggtaaaattagaaacatcaaagtatgctactgttattcctgcattttcaagtgtatccataagtgctatatcagcctcagtattacagcttgctatgacaaaatccggctgtgaagctataagcagttctacgttaggattcagtatgcttccaagattaatgactgaatctgtaagctccaaatcaaaattcgtccatgtatcatcggcagctgcaacaaggcttcctcctgcagacacccatatatcagcaaagcttcctataagtgctgcggctctcttatgtgaagtcactgttacctctctgccataatcatctgtaaatgtatacggattacttacagatgcgcctgcagtcatatcatactctcctgaattaaccttactatcagatactgctgttttagcacttccagcaccacacccatacagtcctgttactattattgttaaaacagctgtcgatacaagtgctttaacaattctttttttgtttaaaaacatattttcactctttcgctcctgtttttcactcttatttttctttccagttttacataatatttcgtttaatattctgatgcagcatattattcctaattggtaagataacttgatacagcatacagcttccgcccattatactcaacctgtgaccatcctcgtacgctcattgctgtacgttttacatattctccattctttatggatgtaaccacagtacccgtatcagtacttggaagagttcttaagtttgtttcttcctttgccgttacattatcattatatgaagagaattccatgccgttcacagaaaagttaccattgctgttatcgtatggtttactattaagatctgtcgtcagatagcttgatattgcatagacagttgttccctcatattcaagccttgaccatccattatctcctattcctgtacgtcttgctgtatcaccattatacaataccgaagctaaagcccctcttatgtccggagaagtacgaagattggtttcttcctttgctgtaactgtttcatcaacattcttaaacactatgccaagctcagccacatttatatcatcatgcggcttatcaggatcaaaaggatcagcatctgaatcatagctgaaataagctacattcatatccacatagccttctatgccatcaactcttcccctgttcgtatactgccacatagcaactgttccagaatacgaaggagacgtaacatcaggatatgcaccttcactataagaagctatccataatggatactgtttttttatgtcatcagtattccataacctgttgtcaacaagttcattcttacctgcatacaacatagcatcataaccctcatcagaaatcgtgctcataaatgcaatagcattattggttctgtcctcattagtaataccatacattctgcttgtctggcttgtaaaatcctcacaattatatacgaccgggtatgtaatggcataacctgctatataatctacaacccactcagcctcttctattgcctcagcctcattaactgctgtagaaaagaaatatacacctgttttaatgccagccgcctgcgcacttataagattatatgatgcatactcatcttcacatattgttccgtttatgtctgtccgatagcctattcttatcatggcataatctataccactggctgccaccttcttccagtctatcgttccctgccactttgaaacatctattccattagaatatgaagcactatcgcctggcagggatgatacatttacctcttctccataaacaagatcatcctgtttttccgggtcaccatctgtatctgattcatatgactcttcactttgtgtattttcattttcagttacatccacgtaatcattattcgtagctgtattactctgtgcatcatttaataaactattacttttcttatattttacccctgatgtaataagaataacgatacatattattattattacaaccgctgccacaccaacaataatatattgtctgtattttttcagcattttcctgaatttgttctgatttctttttcttattcttatctccatatacaactccctcaattataactacaattacagctacatttatatctccatttacagttttatttacaacttcattaataatacctgctttaaagtatatcctaagctgctgttttaaaaaaacatatcccaatttatttaaaataactgtattatctcatttagtcaataataattataatcattgccatattatttaagaattattttatatatgttaatttatatatttcattcagtctaatttaacataataagcatcatatcttttgtgattttgcacaaaaatatgtttcatatataattcttgcatacaatgtactaaatgtgttaatctttgttaaagaaataacaatatgttctttatacttgttcagctgaataatacatgtgttattacatattctattttaaatatacaacctgtttgtcctgcagacattgcaaacggctgtagctataaataattacaatgtctgcagaaatgaggattagtatgaaagtaaatagtagaaaagtcgctgtaattggttgtggatttgttggttcttcttctgcatttgcacttatgcagagtgggttattctctgaaatggttttaatagatgcagatactaaccgtgctgaaggtgaggctatggatataagccatggtatttcttttgcacgtcctatgcagatatatgctggaaactacgatgatatagcagatgcagctattatcgttataacagccggtgcaaaccagaagccaggcgaaacccgtcttgaccttataaagaaaaatgccgctattatgaaatcgattgttggtgagattaagaaaagagattttggtggaattcttctcatagtatctaaccctgttgatatacttacacttatcgctcttaaagaatccggctatcctgcaaaccgtgtaatcggttcaggtacagttcttgacactggacgttttaagtatcttcttggtgaacatcttgatatcgacagccgtagtgtccatgcatttataatcggtgaacatggtgacagtgaacttgctgcctggagtaacgcaacaatcggtggactttcagtcaatgaattctgtgaactcagaggacacttcaaccacgaagcatctatgaagagaatatttgatgatgttaaaaacagtgcctatgaaataatcgaaagaaagcatgcaacatactatggaatagccatggctgttaaaagaatatgtgaagcaatcgtcagaaatgaaaagtccattcttcctgtatcaagtcttatgactggagaatatggccttaatgatgtcgtactaagtattccatcagttgttggcgaaacaggtgttgaaaaggttgttcctatcggacttaacgatgatgaaatgtctgaactgagaaaatctgctgatattcttaaaagcatagctgcagattatatttcgtaagaacctaataaagcagggccacatattcttgtgactctgctttattatatatagttttgagggaggtagtaaccttgtaagctttaataaataatacgatatcagcctttaacgccacctaatgtaacaccccgtactatgaactttgacaaacacagataaactataataactggaagaatagcacaccctagcatcatgtataccttgcccatatcaaacttcaggaaatctgcacttcttagctgtgcgataagtataggcaatgttttctttgaatctctgttaataataagtgatggtataaagtaattattccatgatgatacaaacgtaaatatcgcctgtacagctattgccggtttcataagaggaagaactatctggttaaatatacgaaactcatgtgcgccatctattcttgctgcttctaccagctcaatcggaagaacactgtccatatactgctttataaaaaagaatacaactggcgatgcaatggatggaacaatcaatggaataaacgaattcataagtctcatcctgctcatctgatcaacaaaaccaagtgcagatacctgtgtaggaaccatcattataaccatgataattgtaaatgccagattcttgaatctgaaattatatgcatgaatagcataagctgttaaagctgaaaaatacacagataacaatgcagagccaccagcaacaacaagactgttaaacataccactaagcacaggaagattagcatctcctaaaagattctttaagttgttaaaaaacgaccttcctggcagcaaagagaatcccttctgtatatctggatgtgaccttgtagtgtttataaccaatacataaaatgaaaagagacaaagtatagctaagagtattaacactatataacataatgttctttgaatattcagcactactttgtcttttctatcagactttttcttagtaaccactgtactcatagttatacccccttacctgctgctttactttcttttactttttttgatttcttatatgtagatgcacctgaatcaaccattcccttagttacgtatttaaatacaaacacactaagaaccgctgttattataaaaagaatcaccgataatgctcccgccataccataattcttactatacaaatgcttattcagatacattataactgtcatacttgtatcgttaggattaccattaccattagtaagaatctgtggaacatcaaacatctggataccacctataagtgatgttacaagtgtatacgccataataggttttataataggaagtgtaatctttctaaaaatctgtaatgagttcgcaccatctattcttgctgcctcgaatatacctgtatctattcccataatacctgccataagaactatagtagtgttaccaaaccacataaggaaattcataagtgctataagtcctcttgttcctgcaacctctgataagaatctatatgtaggaagtcccattgcattaaggagattgttaataggaccaatatctgagaatatcgtataaaataacattgaaaatgctgatgccataatcaggtttggcatatatataactgtcttaaaaaagccagtacatttcaatctaagtctcaaatctgtaaaccatgaagctaacagaagagaaaatatcatctgtgggataaatcccatcatccatataataaatgtattcttaagatacataagaagtggtgtattagataatatttctttataattggctaagccaacaaacttaggacctacctgcataagtccaactctgtaattttcaaaaaagctgttatagaaagtggaaatcagtggaaacagctgaaatataatatatacaaggaaaaatggtattaaaaatatatatccccacttagcataactgacacatttagattttttctttttcatgccaccctccaattcctagtaataaatataagtataataatataatgccggtgccagttatacctgtttcatactggcatccggcagattaaattcatatatctatcactatgatgttacactaattgcgattatttagataagttaggatactttacatgagccttctcatagaagttatctaatgcctgttctttagttacgtgtccatcgaagtaatccttcatggccttctggaattcctcgttaagtccctggtcataagctgaaatattcttcatattaatcttaggagcagcctgtgcgaaaagcttaatatgattctgtccaccaaggaaatcagacttgaaatcactgttagcaagttcattcatacctgatattgtattagtataatcctgtgtatcctttgttatctggacttctgtagtcttatcacatgttaatgtcttcattatttctttaataaggtttggattatctgttccagctgctgcacaaatccatgtaccaccccagtagtaactctgtggtccctggcatactgcataatcaccataaataccatttccaacttcttctttaccaccttctgctactggtttctcaagtgagttaccaagaagtgtaaagttaataccccatgttgaatagaagaagccaaataccttacctttaggaccctggtctgatgcccatgttgtatcccaaagagatgtcttgttattgtatcctttatctgtaaatgtctttgtctggtcaacccatttcataatgttaggatcaataactatcttgttattagaatctacccaaggagctgacacattgttagaaaatactctataggaatcatcatatccagaaagcatcttgtagccctttgctgcagccttttctgctactgcgttaaacttatcccatgtagaaagagcttcctgaaccttatccggatcatctgttcctaatacatcctttgctacagaacgtctataagcgaaaagtccaggagttgcctgccatgttgtacccttctgattaccattggaatctgtgacaatatcctttgtatactgatactggtctgctacatcatcctttgtaagtccgatatcattgataacatcaagtgtataatcactgttaacatactttaatgcataatcagcttctataagaaaaatatctatcttctcatctgctggcgcatcattctgttttaataatgctgcatcaagtgcattctgatatgcattattttcattaggtgtaactacaaaattaacctttacatcagatggaagctttcccgacttctcaaaatatttaaatctgtcctggaactccgtattccagcaataaatgttgagcacttttccctgggcactctcatctgtattaactttagctgctgttgaactgttaccagaatcgccgcagcctgctaatgttcccataatcattgtcgtagctaagaatatgcctgctaatttgcgtttaatcataataatacctcctcaaaacaatattccgtaatatgttccccttaagcttagaaccatctctaaacttatatccttctgactgtttctccttcaataagctctccacctacaacaagtcttttaacaatggctgtctttgggttgttgatacaatctattaattcccttgctgcaagtttaccaatctcacccgttccctgtttaagtgtcgtaagcttagggcttagcatctgtgaaagctttattccatcatatcctatcatggataagtcatctggaatcctcatatccttgctgcggactgcattcaccccgccggaataagacaaatcatcaggataaaatatacatgttggtggattcttacaatccaataattcatatgtatacttttctgctaaaactgcattcagatattccgaagatttaatatactcatctggaacatcaacatcaagttcatcaagcgttctgtaaaacgacgccagtctttctttagttacttctgacccatcctcgccatgtatataagcaattcttctatgtcccatcttatatgcatacaggactaactctctcatcccccttatgttatctgatacaacggaagtacagttattaaacacatagtcgatagtcacacaaggaattctgctgtcaaccagttctttaacttccggatcatcaaaatctgcacaggctacaacaacaccatcaaagttacgatacctgcaatgctcaaaatatgtcatgctctcattgtgtgtattaataaatgtaatatcatacccacagctttctgcttcaacctttacgccttcaagcactgccgagaaatattcatgtgtcagaccgctttgtgctttatcctttaacaatacccctatattatatgagcggtttgtctttaatgcccttgcggctgaattaggataatatcccatgtcactggctatctgacatattctctttctagtctcttcgctgatatcgctttgattattaagtgctttgcttactgtagcaactgatacattgcaccttccagcaatatctttcatggaaaccatcgcatcgcccctttacttattgtatatctgtgttacttaaaagttacttaatcgttttcgtagctttactataacaccttttataaatcagtgcaacagttttttgacattttatatattttgccgtagttttttcatttttttgtgcattatcactatttttatgttttttattatttattattgcattttgtccctcatttaaatatactcaaaacagaagataatattctattcattttatttcatatctaatttcaattatgaatagactttgtatatgttatattttacatttaaagcctctgactttagtaaaatttatcattttatttttatttttcgtaatcgttttcgtgaatgtatcagatcgttttcgtaaaggtatcagattgatatcaaagatatcagattaaaatcataagatatattaagaaatgaggattgattatgaaatatggttattttgatgatattaacaaagaatatgtgatcacaacgccaaagactcctctgccatggatcaactatcttggctgtgaagattttttcagattaataagtaacactggtggaggatattgtttttataaagatgccaagctcatgcgtcttacaagatatcgttataacaatgctccacttgataacaatggccattattattacattaaagaaaacgacactatatggaatccaggatggcagccatcccaaacagagcttgatacttatgaatgccgtcatggacttggttacacatgttataaaggaactaaaaacaatcttgaggcttgtgtaacaacctttgtccctataggttcttcctgtgtactgacacgtttatcatttaagaacaattcagatgccattaagcatttcagcgtgtattcatatgttgagttctgtttatggaatgctgttgatgatcttaataacttccagcgtaatctaagcactggtgaagtcgagatagaaagctataaaagcaactcctgcatataccataaaacagaataccgtgaacgccgtaaccactacgcactatatgccatgaatacgtcctgcgatggttttgatactgcacgtgacagctttcttggaacatatggaacccccgcaaaaccagaagctgtagaaaagagcatatcaaacaactccatggctgatggatggtcacctatcggctcctttagaaaagacatcacactatcacctggtgataaaacaagtcttatatatatattaggttttatagaaaactctcctgatgacaaatgggaagcccttaaagtcataaacaaaaaaaatgcacataaaatgattgatgccaatatgtctgatgataaattcaacgcagcctttaatatgttaaaagaatactgggacaatcttttgtcaggatacaggcttgaaactaaagatgcaaggttatgccgcatggtaaatatatggaatcagtatcaatgcatggtaacatttaatatgtcacgttctgcatcatattttgaatctggaacaggacgaggaatgggattccgtgactcctgccaggatctgcttggatttgtccaccttatacctgataaagcccgtgaaagaataatagatatagcatccacacagtttgaaaatggaagtgcatatcatcagtaccagccacttacaaagcaggggaattcagatataggaagtggttttaatgatgaccctttatggcttatagcatgtactgctgcatatatcaaagaaaccggtgattactcaatactagatgttgatactccgtttgactgttgcaaagaaaacactgcaccacttatggaacacttaagaagatcattcaactacacaacaacccacttaggaccacataagctccctcttataggaagggctgactggaacgactgtctgaaccttaactgcttttccctgactcctggtgaatctttccagactaccggtgcatctgacggacctgttgctgaatctgtttttatagctggtatgtatgtccgatatggtcatgattattcggctatatgcagacatttgcatttagatgcggaagctgatgaaactgacagacatataaatgatatgatacatgccgttattgattatggatgggatggtgaatggtttttacgtgcctatgatgctgccggagaaaaagttggctcacatgaatgtaatgaaggccagatatatattgaacctcagggattctgtgtcatggctggtatcggaattaaagaaggtctggctgtaagagctcttaattcagtcaaaaacattcttgacagtaaatatggcatagttttactccagcctgcatatacaagctatcacccggaattaggtgaaatctcatcttatcctgaaggctacaaggaaaatgctggaatattctgtcataacaacccatggatatcaatagcagaaactgtagttggacacggaaaccgtgcatttgaagtatacaaaaaaatatgccctgcttatctggaggatataagcgatattcacaaaacagaaacttatgtatactcacagatgattgccggaaaagatgccaaaagattcggcgaggctaaaaacagctggcttaccggtaccgctgcatggaccttcactaacatatctcaatatattcttggtatacgtcctgaatttgatggcttatgcatagatccatgtatacctgatgatatggatggcttcaaagttacacgccgcttcagaaacgccacatataacattactgttgataacacagcccattcacaaaaaggtgttaaacagcttatagttaacggaataaaaatcaatggtaatattattgtatatgatgaaagcattaaagaatacgaagtaactgctattatgtaaacattacggtttaatgatatcacagatatgtgatatcattaaaccgtaatattttccattagtatttattaattatcgttatattttttccagttaatcagttattcatcccttatttcattcctttttttcttcatttgtttctattttatgttcaagcctgttgtttaccatgtccctaagaagctgataaattacagatgtaagtggaataaagaatatcatacctataagtccaaagaacttacctccaagaaatactgccataagtgtcagaagtgccggaagccccactgaacttccaacaactcttggatatataaactgtccctccacaaactgtacaacctggaatacaatgacaaaccatacagtaagcgctggattcgtaaagagcacaagtactgcccctacaacgcatgccataaatgttccaatataaggcacaaactggaatactgctgccattatacatatcagtcctgcatatggcatacggcatacactcagcgtaataaacataagcacagcaagtatacatgattccacgcactgccctgtaagaaagcttgcatatgtttcagcaaaaagattaacaaccttttcaaccttagatgacaccttccttgtaaacaatgcctctatgagcctgccaatctgtcttaacagtctcttcttatccataagaacatagattgctatgattatagatatacttaaattaaacagcgatgatccaatctgagggattcctgtaaatataccttcaagcgatgctataagcacgtttccgacattttttaatatgctgttccagtcgattttatcaacgtagtcctttatgagtaaaagatgctcactatgtttatcaagcagctgtgtaactgaattcagattattgtcgaaattctttataaatccagatatagattcaataagatctggtattaccatccatattataactacaaatataaatacaacacccacaattgttataacaaggcttataccattacgagttttttctttctttaaaaacttcaccttgccagacattttttcaaaaacccgcgataaagcttccatgggtacattaagtataactgctatcatgcagcctaaaaatattggattaattatgtctaaaaatcttcctataccaccaaatatatttcctacgttaagcgcaatagaaaggctgactgccataaccatcccaaatactataatatttcttatcttttctttcttatccatcagatatgaactcctctatatatataatcgaatgtaactgcatacatacctgcaataaaacaatctgtttttaattatgtattatatcttaaaatatttcaatacaattactaattatttataatttattaattatatgatgccataagttcatccaaaaaccttgaccgctgatgcctgctgccacttccatcaacatataatatatccagttcatcccttgctcttgtcatggcaacataaaacagtcttctttcttcttcataatcatccacttttcccatataagcatatggagttatctgctcattggcagatattattataacctttttccattcaagtcccttagcaccatgaaatgtaccaagatacagaccattttccttatctacacgctgtctgtaatctttattcattatgtagttataccattctgacatattatcaagcttcattgattctttcttcatcatttctgattgattcataatatcatctttatctatgccaacatattctgcatattcatacatgctctcttcataacccatattgttataaatataatatagaaattgtgtcggattatctatacgtgaaagacttctaaagtcaagaaacatatcatttattgtatcatttatccgcagacactcatgtctttgggcattggctgtacatgcctcatatattttattcctgtcaaatccacagttttttataagattcgacctgatatatcttttaggtctgttaattatgcgcacaagatcgccatcttcaggtatccctcttgataacctgtaatatgcaagcatatccttataacacattccaagatgaacatcatcaactaaatcccttgtataaaaaggcataccgatggtttcaagtgtacttacaagtacagctgcctctttcttaaccctgtataatattgccgcttcactaagctttccgccattttttacatattcatttatcaatgatatgactatatcagcctgtgcaggctgtgatgaagcctcccgtatatgaattctgccatctcccacacgatacgacttcatatcctttataattcttacctggttattacgtatgattttatctgcaccttttattatatatggaaaacttctgtaattcgtaccaagtattatctttttggtatcaggaaaacgtttaataaaatctggaaatatagtatcacttacacctctgaagccatatatcgactggtcatcatcaccgacaacacatatatttttctttttatcggctgccatatatataacatctgcctgtagaagtcctgtatcctggaactcatcaacacatatataatcaaacacaccctgccagtattccagttcctttttatttcttgcaagacatttatgacaatatatgaccatatcctcaaaatcgagttttttattatttattttatattgtttatattgttcgtatacagcatcaagatagcttttgttatcattacccattggtttttcatggattttatcacgtattcttccaaaacactggcatatattatatccactcccggcatgctctcttatatatttaaacgtattttcataatattcactctgtgcttttccagttatatattcttcacattttctgtaaaattcatcaaaatcatccggaactcccaaagttcttttatagacaagttttttatggaactctgtaaaaaacttaagcttgtccttatcagaaagcaccgattcaggcttaagattatatgcccttacaagaaccgaataacacaatgaatgtatcgttgaaaaacgtatcccggtgtgtccatatatgtcaacataacgtttttccatatgtgctgccgcagcctttgaaaatgtaagcacaagaattcttgacggctttactccatgttttactatattatctgctcttgcaacaataacagctgtcttacccgaaccagctactgatattatacacacctgtccatctatactattaatagcttcaagctgttctttactgtattccaattttcaatctccaaaactatatattttcctattttctgtatttctcataccacataaacaccatactgataagaagtaatatacaagatacccatattgtatgtattccccacgcaacagaaagattaccgcctattcctgcaccaactgcgaaaaagaatattattccataataatgaaacgctttaataagaggttccttccttttttcccttaaaaaagcagataatgcatctgtaccacttcttaagttacctatgcacattgtactggcatatgcaaaaccatttacctttctgaacgcctggacctgcatggcacatgaaaatgagacaagaactgtggctgccatatttaatgaatgaggaatgaatccaactatcgcaagaatgactatttctataagaataataagctgtctccaatgaatcctcttagccattttatatctggcattaatctgttcagtaacaagaacgccaagaccaaaagctaaaaatgggagcagatatttaattccacctataaaattccctgccatgaactcctgactcataagtactacgttaccagtctgggcattcgagaataccttatctcttgtaaagtaggtataagcatcctgaaagcctcctgatacagcaagaactgcactgtttaaaaatgattctgacatctgtatctgtttattagttttcacaataatccacctgttttctatatattttcaactgattataataaatcagaccatatatgtaaaatttcaaaataatatagtcataatctcataattgtatataagacatttagccacggtatattaccacaacatctccatccataataaatgtatcaccaactggtattatattctcatcaccacgctttacaagtgcaataataagattctctggcagattgagctcacgtattgccctgttacaccacgcatcatcctgtgtaacaactctttcctccagcgaatcattatcagagcttacatatgctggaacacttagtataagattatctcctccaagtattcttgtgttgcctcttgttattatagactccctgcccctttttatcataagagctatagcacctgtaggcatatgtacctcacttataagcttattttcccagttatgtcctttaggtataaacatcctcataagtgtaatggccgattcttcctgataatcattaaatgtctttcttacatcactcttttcatctatcattttcagttttcttgaaacttctggaagcaaagttccctggatagcaactgaaataagcgatatcataaaaacaatattaaacagatccttagacatttcacttccacctgccataactgatattgagaaaactattgaagaagctcctcttagtcccgcccatgacacaagcagacactgcctaatagaacacctgaatggaagaagaatagcaaacaccgcaacaggtcttgcaataaatgtaagaaatactgcaataataactgatgttaatatagtagctggaaacatatgcggatatgataataaaccaagcataaagaatatgactatctgtgcaagcgttgtgacaccatcaaaaaaaggtactatatttcctttattccgtatctggctgttaccaagcaatattccaaataaatatatacacaaaaagcaattgccaccaacatactgtgacaatccaagaccaagaagcacaacagcaagtataaatatggtatcaagaccgttggctattatatccgttttagtaagtacatatatagctatagctgccagaataacaccaataagtgtaccatatacaagctgggcaaatatagcatatggtactgttgacaggttatctccattcagtattgatattccaataactgtaagcatataggcaaccggatcattactaccactttctatttctaaaagcgaagcaacaccatctttaagattaagcttttttcttcttaatatagcaaacacactagccgcatctgttgctgatataaccgcaccaacaagaaaactctcagcaaaaggaaattttaatatataaaaacaaaaaactgttgttaatgctgctgttaataatacaccacaggtagataacaatatcgctttagcagcaaccggctttgcagttttccatttcgtattaaaaccaccataaaacataataaaacctagtgcaatattacatatatattctgtcgccctgaaattatcaaactcaattccagctataccgtcacaaccaaaaagcataccaatgcctataaaaagaataagtgctggcataccaaatttacctgaaaacttatctgctgcaatacataaaataagtacaatggctactaatattatttctaacgtcatacaatctcccttttccttatataaacactttctaatgcattatattttatacgttgtttgataacttcgtaataaaggttgattataacatacaatttaacattaagccataatttcaatatatttctttataatatctactgttccatcaactccggctttagtttcatctatacacagatcataaaaagctgcattgccccactcctggtttgaacagtatttatgaaactctcttcttcttgaatcagtttcgtcaacaacagccttcgccttcttttcactaaaatcatgcttctttgcaatatgcctgattctatctgacttatcgccacttaaaaatatactaattttatcctgtctgtcggaaaaagcatagttagcacatctaccgatgatcacacagttctcatcacctataagaggatataatgcctttctggattcagaaagaagaatatctccttcatcatcacttattgtatgcataagtgcatttactggaatctctgaaaaaaaataaggaaatttatcatatatccccttttcttttgcaagctttattatatgttctttattataaaaggaaagcccatactctttggccagctttaatcctatttcatctccatggcagccacactgtcttgctattgtaataatcataataatcctccattcttgcacactgtaagatataatcttttcacatctgtcttcacttttagttcttaaaggaaattagcaaatacactcgcccctataaccgtaagaatacctgctacagctatggaaagactgctcatagctccttctatttcacccatttcaatagccttagccgttccaactgcatgagctgatgtacctattgcaacacctttagctataggttctgttatcttaaatacattgcatataaactctgcaagaatattaccaataacacctgtaacaacaatgaccgctactgttatagtcacatatcctccaagctcctctgatacacccattccgatagctgttgtgattgactttgggagcatagttacatactgttcatgtgtaagtcccataagcatagataaaacaagcactgtaagaagacttgtgaccacaccggatgctattccaagaataatagcagcaaaattgctttttaacagctgtatctgttcatataaaggaattgccaggcatactgtagcaggtgttaaaagccagcttagatatttagcccctgcattatagctttcataatccacctttccagctataagcactaccatcgtaacaatgattgatataagtaaaggattaaacaaccctattttaaacttcttttttagaaatactcctgccatgtatgctataagacttatagatactcctgcgaatgctgaatcaagaaaaaaactttccattttaatatattctccttacatatcattaaaattcatctttatttttactgtgttttactatatattgtgttacatgtccactgactaacattactgtaaatatagcaacaactgtaataatacatacagggataattactggtttaagattaagccatgatgacataagtccgacacctgctggaataaacatcacaggcattatttctataagaaaacttcctgcctccttcactgattcaagctttataataccagataaaagtccggcaaataatatcaccattccataaatactggctggcaccggtaaaggaagcagcttgtttagaatttctccgattaaagatataaccagaatgattaagaattgttttaaatatttcataatgaatctccatccttgcgctgttttttttatatacgaattacataaaaagcaattctttgtatacatgacgcaaaactgtcgttcattatataaccagatataaatacatatcaagatgtttttatgaaaatacattaaaaatacaatcctatgatttttttgcaataaactgtgcatattcaggggacatgcttcttatcctttcaacaacagcctttaactcctcaactacataatctgcctcttccttagttaaatcttcacctattgtcattctgacagagtttcgtgcaatgttcttatcaactcctatggccgcaagtacatgcgatgggtccacggaacctgatgcacatgccgaacctgctgatacacatatccccttctggtctaacattataaggagcagctctgaagcagcacctataaaactcatatgtatgttgccaggaagtcttttatatctgtctccattaagtattgcatatggaatatctgctgatattctttctatgatataatctctcatgccagatacatatttcatattcttttccatattcatagcctcaagtctggctgcctctgccatacctataattccaggaacattaagcgttcctgccctgcggcttctctcctgtgagcctccatgaataaaagaacctatctttacactgttactaatatacaaaaagcctgttcccttaggtccatgaaacttatgtccgcttgcactaagcatatctatattcatatccttaacattaacaggaatatgtgcaaatgcctgaacagcatccgtatggaatataactccttttgaatgtgcagcagcgccaagctcctttataggttctatagtaccgatctcattattagcatacattatacttgcaataatagttgtgtcctttatagctgcacagaattcatctatatcaaccagtccattactgtcaacgtcaagatatgttacttcatatccatgcttttcaagccactcacatgtatgaagtatagcatgatgttcaatctttgttgttattatatgattacccttatccttaaaacactctgctgccgccttaagtgcccagttatctgattcacttccacctgccgtaaaatatatttcatttggcttatcagcacctattatatctgcaatcgttgttcttgcatcttcaactgctttttttgacttctgtgcaaaattatatatacttgacggattggcatagttatctgtaaaaaaaggcagcatactgtttaaaaccccaggttttacagatgttgtagccgcattatccatatatattaatctatccatattaaacctgctttctctacataattcagacattatataatcacaccaccaccaagcacatactcaccatcgtacagtacaagtgcctgtcctggtgttactgcgcgctgtggttcatcaaatgtacattcaagtgttttatcatctatcattcttatcgtacaatctgcgccaccatggctgtaacgtatctttccctttgcccttacctggccttgcagcttttctattgacataaaattaagattgtttgcatataatgttttagagaacacatcattattctcccctattacaacctcgttagtttccggtcttattgccactacaaacacaggatgtcccatagccagaccaagaccctttctttgtcctactgtatagtgaataataccattatgcctgcctatgacattaccatttacgtcaacgaaattacctggaactggcttgtaatcagtagttctttctatataaccagcataatcattatcaggaacaaaacatatttccatgctatctggtttatgtgcaaccatcagattgttatcttcagctattttacgtacctgctccttagtataatcgcctatcggcataatagtatgtgcaagctgctcctgtgtaagattatacagtgcatatgtctggtctttctttgctgtcactgagtttctgatggcataacggccattatcaagctggcatattcttgcatagtgacccgtagctatgaaatctgcacctatctgaagacttcttttaagaagcgactcccatttaacatatctgttgcatgctatacatggattgggggttcttccaagcttatactcttcaacaaaataatcaataacattatctttaaactcattcttaaaattcataacataatatggtatatcaagctggcctgcaactcttcttgcatcatcaactgcctgaatcccacagcagccattctctgttgtttccacagagtcatcctgccatatctgcattgtaacacctataacatcatatccctgttcttttaaaagaaatgctgcaacagacgaatcaacgccgcccgacattcctactactacttttttcttcatatattatctccatatatttattatatatttattattttattgtttatattttatcatcttttacacatactatgcatttatgatcagcttatctgcaatacccttaatctcacaccagtcatctgctgaatcctcatcatatacagcacacaccttaagacccgcctctttagctgctttaacacctcttaatatatcctcataaacccatgtatcttctgaattcatgcaggccttatcgataaccttaagataactgtttttatcactcttttttaagcaaatatcatatacagtatatatatcataaaagcattctcttatgccaagtctgtcaagcagaatctctacactgctcttttctgaagcagtaaatataacaagtttacttccggcctcgtactctctcctaacaagctcaaccataccttcttttgccgggatatccgttgcatagtgcttgttcatgatttcaacagcagccttacttatctgttcaagatcagtatctatccctagtacatttttaagatagcatgcataatcatttaaatccataacacctgtaatatcatcaaaatcatctggaagctctgcacctttatacaatgcatattctcttgcactatttttccagaaaggcattgaatcaacaagtgtcccatccatatcaaatattatgttcttttttttcgcaaacaactcccttgtctttataaaaagcttccttgcagcctcagcacagtcatcagctgcaaatatagcagatactactgcaataccatcaactcctgtattctttagataatcacagttatcgtaattgatgccgcctatggcaactactggaatatccttcatcatacctgtcagctctatgagtgtttctttactcatatctttagcatcaagcttagtgctcgtatgaaataccgctcccatccctacataatcggcacccattcttatagcattttcagcctgttctttagtcttaacagtcatgccgattatttttccttcaccaaggactgcccttgcagtcttataatcagcatcactctgtcctatatgcacaccatctgcatcagcctcttttgcagcatatatatcatcatctattacaaatggcacaccatattttttagcaataggctttattgccatcgctttctttactatttcctcatgtgtggcattcttttctcttaactgtaaaaatgtagctccgtttgcaagaacactctctataactgaaagaaagtcctttccgttaagccattgtgtatctgtaacagcataaagctgcatatcttctcctgtaactctcacagcaacctcctaaacataatccgctatttgcatattagtataaaattctttgcattttttcgcaactgtatttataatgtgatgtgcaaaaaacaaaatcaaaataaaatcaaaggaaaacgaaattgaaaggaaattaagattatgactaaagatttaacaaaaggaaagattatgcctcttcttgtaggatttacgattcctcttgttcttggaaatctctttcagcttacatataatgcagttgacagtattattgttggccagtttgttggcaaagaggctttggcagcagtcggtatatgcaaccctgttatgacacttatgatactttttcttaatggattgtgtatgggtgccagcatacttatgggtacacaatatggtgcaaaggactatgataagctgcatagacagataagcacaactatgctctcaggtgtcgtattttccatcatattaagcttaatatgtattattttttcagtaccaatattgcatatactccaagtcgattcctctataataaagcttacaacctcatatatgcgtatcatattcattggtcttgtatttacattcctatacaacttcttttcaagcacattaagagctcttggtgacagccagacacctctatactttcttatagccagctctgtgcttaatgtgattggagatttattctttgtaattgtacttaaaatgggaagcaacggatgtgccatatctacagttataagtgaaatgttttgctgtattttctgcataatatatatccagaaaaaagtcccagttctttgtcttggaaaaaaatggcttgtatttgaccattctcttctaaaaaagactataagttatggatgggtatctgctatgcagcaggcaacagtacagcttggtaaaataggcatccaggccatagtaaacactatgggcgtatctgtagctgccgccttcgctgtagtaaacagaatagatgactttgcttatactcctgagcagaacatcgggcacgccatgacagctcttatggcacagaacaaaggtgctaaaaagcagcagcgtatgaaagaaggcttcagatgtggaatgatacttgaattcatatatggagtcattttgtttctcatatgttttttactggcacgtcctcttatgcttctctttgttaaggatgaagaagttatactgcatggtgtaaaatatttaagactaatatcatttatgtatattcttccagccgcaactaacggcatacagggttacttccgtggcataggcgaccttaagattacactgcttagcagcttcatcaatatgggtgtacgtgttattgccgctataccacttgttcttatacttggcatgggaatagaagctcttccactgtcctatcttgctggatgggttggcatgcttatagctgagcttcctcttcttataaaaaattatcatcagctcaccagaaatgctacgtctgaaaataataaagctgaaaatgacaaagcataatttacttttgacacaacattaaagatattatataataacaatatctttttgctgtatacaacaaaagatgaatagtgtttcacttaacactatagtaacaatgacttaataaaaagaactgcggtttccaatgcataatgcgttgaaaccgcagttcttaaatctttacgctctacaataaaacatcttcaagcttcagttttggaacatggtgtacattttcctcatctctgtaatatttaagattatctgtgcatgacacttcatctataacaacttcttcttttggataacctatagcgataacaagtcttgcactgagttcagaaggaaaatccagtcttttgttaagctctggaatattaacacttgcaaacatgcagccacccagtcccttttctgtagctgataaaagtatagtctgtgcagctataccctcatctcttggtgcctgcacatcgacaggactgcatattataatatatcctgccggcttttctccttctttaggaccatcccagtccgtaagtgctgctgcccactttaacgttgaaaacacctgttcattgtctgaagcatcacaaaccactttatatcttaatggttgtctgtttgctcccgatgcaacatttcttgctatatcaacaagctcctcaagttctttaacacttacctttctgtcctgatagaatcttctatacgatctgtttttaagtactgtttctttaagtgacatattatcagcctcttttcttagattttattaatactattctttatgcttctttttatctgctcctcatgcagcataaaccgtttctgttcagatgatatgaatctgtcagacatgacgaattcaaagaattcatcatatggaacatacatataatccattgtttcaccaggctgtaatgtaatgcgttcctctttatcacacaagttaatatatccatgatatatacaatgcttgttatgatccgtatattcgtaaagagcaatcagttcttccggtttacatagcaatccagtttcttcatataactcccgtgaagctccttcatttgaagattcgccagctattatagaacctcccgtgacttcccattttaaagggtttgttttattacgtgacctctgtgttataagtacttttccatcctttgttactgtataaaccataactacaacatgatacactccgtctggcatagactttgccatacttcttctaacctcgtatccaagcttgttttcctgtgcatcataggcatcccacatttcttcatctaccatttcgataaagccatcgtagtactgttctttaaaatgcactatctcctctaactgctgcttattgtaaagtatgttttctggtgcaactatccacactgtatcagaatcatctcttctccttgcaactgcaataagaatgcctgcatactcatcaactgcaacatcaactcctacaagatatgctctctgtttttcttcatgctttgaaagttcaaggtcactttcatttacaacataaccggcattaatagggtacaccgacgagggattatcttcatctgcacttcctaacggatgatccacctttaccgtaactaatttttctttcaccttttacctctttccttatagtacctgatatttaatatatcataatttactctttcttaatccacaatttgtcacaatccattatataaaaacagctctttcaagtctgtaaaaacctataataatggagaaatcatatgaagcatacatgttccaagcttaagtggtctgataacatctacagcataatctgatgtaacctcattagaaatctcaaagttattcagcatatccgctttaacctttcctgcaagctctctgttatacgtaaacacagcattttcaaaatgcaggtaaaggcttctgaaatccatattgatcgtgcctacgacacataattcgtcatctgccacccactgctttgcatgacagaaaccaggtgtatattcatatatacgcacgcctgctgaacataatggctcataatatgaccttgttatcttatataccatctttttatctggtatccctggtgttacaattcttacatcaacgccacgcttcaccgcaagtcttaattctctttccatttcatctgttattataagataaggtgttgtaatatacacataatgctttgcattctttaatatattaagatatacatcttcacctattctgtcatgtcctagaggattatccgaatatggctgaacataacattcctgtgatgctgcattataagtgccatctgttgcatctatatattcatcataagcctcctgtgaatctgtatggtctatagcattccacatggtaagaaaacttgctgtgagacttttaaccgcatctcctgtaagctttactcctgtatccttccagtaaccatatggatgagttatgttaaaatactcatctgcaagattatatccaccagtaaaaccaacttttccatctataacagtaatcttcctgtgatccctgttattcataaacatattgactataaccttaagcggattaaacaccctgcactgtattccctcatctctcatacgctttataaattctttgttcaggaaaaatatgcttccaagatcatcgtagaatattcttacctcaactccattttttgctttatctataagaactttttttaatctttcaaagcttatcgcatcttctattgcatgatattccataaatataaacttttcagcctttgaaagctcccaaagctgtgcttcaaagctttccagagcagtattataatactccatatcagtattcttatatacaggatatttagctgtattgcttatatatctacactgatttgctatgccaggatccttttgttcaagctcttttataatctgttcatcctgtttaagcttgtttttaagtatatcagcctctattccattgaaccttcttctcataccctttgtaacaatagaacgtccaaaaagcagataaatacatattccaaaaaaaggaacagctgttataactatcagccatggcattctctgtgccgaattaacatgcgttccaaacacttttagtgctataataacagctatacatgtcattataagtgttatagctgtcgagtacgtgtttaacttcgacataagaactatcatccagcctgtctgtataagtacaagaagcgctataagaataagtcttgttgcgctattttttatactggattttctctctgtacgcatattatggttctgtttctgcatatgtcatctctcctatagcttttatggaaattcaagatatcagtgaaaaaagcttataccactaacatcgtagtacgtaattatagcactaagttgcacatcctgcaaactgtgtcatataaagctgataatattttcctttcttagcaagaagatttgcatggctgcctgtctcagcaatccttccctcatccataacaactattaaatctgcatcctgtatagtcgaaagcctatgggctattataagacttgtcctgttcttcataagcttaaccatagcatcctgtatatgcttttcagttcttgtatcaacactagaagtcgcctcatccagtataagaatcttaggctgcgcaagaaatgcccttgcaatcgaaagcagctgtctttgtccctgtgatatattctctccctctgacataagctgcgtatcatacccctgtggcatctttcttatcatgctgtcacaattactcatccttgcagccatatacatctgttcatcagtcgcactgctgtttgaatatctaaggttattttctattgaatctgcgaagagaaccgtatcctgaagtactattgctgtattccttcttaagctgtcacagtcaatatcctttatgttaacatcgtctatctgtatttccccactatcaacatcataaaacctcataagcagattaacaacggttgtcttgccacttccagtagaacctacaagtgcaaccttctgcccagcctttacttcaaggttaaaatcataaagaacctgcttttccttcgtataagaaaaattaacatttttaaatctgatgattccctttaaatcatccatattcttctttccacttttatcctcaagtggttcatccatgacttcaaataccctttcagcacctgcaacagccgtctgtatctgtccatatatctgcgcaagctcatctataggtcgtccaaactgcctggcatacactataaatgctgatataacacctattgatattatattattaatggcaaaatagcctccaaaagctgctattataacgaaccccacattattaacgacattcatgacaggtcccatggaaccaccaagaatctcagctattatgccaactcttgtaagttcatcagaaacattgtcaaaatcttttacaactgcattttgtctgttatacgcaactactgttctgtaacctgttaccatctcctctacatttccattaagctgcccaagtatcacctgtcttttcttaaagaaaaatcgcattgcctttgacaaaagcttagtagccactatagttaatataactgtcacacatgacaacgcagcaagccgtgggcataaaactaccatcattacaactgttcctatcacagtaagtatacctgaaaacaaagaactcatagactgtgataccgtagttgaaatattctctatatcattagtcattcggctcataatatcaccatgactgttggcatcaagatatcttataggcagattaactatatttaagaacaaatcttttctcatcctgctgactatattctgacttaatactgcacttaacttactctgcatatatgtacatatgctatgtattatataaataatgaccatcactataagtatgggtgaaagcatatcccattgccttccagctattgcatctatcgcattactctgaagttttggcgcatatactgaacatgcaaccacaacaacaactgcaagcataagcaagaacagcattttcttttctgatacgaaataacccatgagcctttttaatgttttcttcccattctgcggtttttctactgtcatatttctgtttccaggtcttctgccaaaagccctgtaattattcatctgtgcctgtctgctctcttcctgtttcatacgcaaatctccctatccataatatgattatagcctatttttttaactgtgaatcatatatatccttatatatactgcttgttatcataagctgctcatgacttccaacatctgccagctttccattatccataacaactatcctgtccgcatttttaactgatgctatcctctgcgctattataatctttgtaatatcttttttattctttccaagcttactataaagttctgcttctgtttttaaatccaatgcacttgtcgcatcatcaaatataagtatctcggctggctttatgactgcccttgcaatagcaaccctctgtctttgtcctcctgaaaggctgtgtccaccctggcttacaattgtctgcatgccatctttcctgttgtttataaactgcgctgcctgtgctgtatctgctgccgcagctatattatctggcgtggcatctggcagcccccatgctatattgtcagctatacttgcagtaaatatctctgatttctgcagggaaactgctatcttatctcttaatacttcaagcttgtaatcccttacatccacatcatcaacaagcactgcaccttttgtaacatcatagaatcttgggataaggcttataagacttgttttgccgcatcctgtagcaccaagtatgcctattgtttcaccaggcgatatgactagattaaaatcctctataacactggcaccttcattgccaggatatgcaaatgatacatttctaaactcaactttaccttttactatagtttcaccatcatatgcgccatcctttatagccggttcacagtttaatacctccataattcttttttgagatgctacacctcttgatgccgtctggaatatcatagtcatacgcataactgcattaagcacctgtgagcagtatgtgatagccgccataacattacctggcgttgcactgccatccataacctgtatacctccaaccttaatcactgcgacaaccgacaggttaagaattatattcataactggtgtcatataagatagcagtaaaagcacatcaagctgtgttccaacaagctcatcattggctttgttaaacctttctgtttcatagtcttcttttacatatgcttttacaacacgcgaacctgatacattttcctgcataatattattaagcttatcaagttttttttgcaatatcgtaaacttcggattagactttgcaataaaatatataacacatataactataaaaggaagtgcgcatgctattacaagtccgaactggatgttaagtcctatcatgcagactataccacctataaacagcatacttgtacgcacaaatcctctcatgcactgcatcacaaaattctgcagctgtgtaatatcattcgtaacccttgttataagagaacctgttgaaaacttatctgtctgttcaaaagaaaaagacataattcttttaaatgtatcttttcttacatcgttgccaaactgctgtgctgaaaggttggcaaacactcctgacataactccgcataccccacctgctgctactaaaagcaccattcttatacctgtaccaagtatgatatcaagattgcctacacctccactgttaataccaagtacaccatcatctattatatggctcataagttctggctggataaggtccatgcttacttcaccaatcataaaaagtggtgcaagcatcgtaaataaccagtatttttttaagtatttaagcatattctctctcctgtttcgtatagtcgttggcaaaagccccactgctattatacaataaaaagcactgattggaagattcttctttccttcagtgctttcttataactaatgcattttattctcttgattttttatattttttcttctgtatatacatattggcatcagctttttttacaatatcctcgatatttctgcctgcgccatatgccttgcctatagaagctgatatttgtataccatcataccgattctcatttttcttgtcagcaatgctgttatatctggctataatatcatcaacaatagtatcatcgttaccttcaagaatagcaacgaattcatcaccacctatcctatatatcatgcccgcattatcaacagccttgattattgatgatgctattccctttatgaggacatctccactttcatgtcccagattatcattagtatatttaagtccattgacatcccagaatataactgaaatctctggtatatgtggataataagctcttaccatatcaagatacttattcctgttgtaaacctctgtcatatcgtctatctctgacatatatttaagatgttcttcattggcagccttgtttgcaatggtatctgatatatgtacaaccataagtactacagccaaaagcagcatagctcttggcactataaaataaagcagaagctttaatgctggattgtcattgaccggggctgcattaaatatagttccacctgcatccacatattcttttatggttcctctcgtaagaacaaccatattggcatcacacaagccatcataataacctatatacacagatattgccagccctatcacactaagaatataagtgtaataaaccatttttctttgtccatattgcagcgaatatataaccggcagaacaataagaagatacatgtgatatgtaagaattgatgactgcacgaatatagcaataacaattccagccatggcaaaatactttgtaatcttattgtccatgccaagtatgctacatataacgactgtaagcactgttaccacaaatgtaaataaaagactcatagacataagtctgccttctacagtaaatattcctgcacaattcaaaatccatgtgataaatggaaatatcattgtaaaaaactgacatttgacagaaaatctgttagcatctgcttcatatgcagttgctgaatgctttttattccccacaatattatatatattcatacctacatctccaaatatgtttatttatccattcgtttatacagataacaaaacaattcccaacagtaaataataaatatctgtcattctgacttaatctatcaatcttcaaacacccgctttatgctgtcataatgcaaaaactcacctttatctgctatctgttcaatctcttctttagtaacaaatctgtatcctaacgcctcttctgtctgaacatgtacatcttcatccttaacatccttaataaacttgtatacatctacaaaatagttatctccttcgccaggattctctcttttatatgtaaaaatatatccaccatcagcattggtcacatctatgcctgtttcttcaaatacctctcttcttacagcctccactgactcttcgccagcctgtgccgcacctcctgatacttcccaccagcctggtgcccatgccttagtcataaccctctgcgttataaggaactttccatcaggtcttttaataacaccaagtaccgtaagatgatattctccatcctttaagcaccagtcattttttttcataagtctgcctgtctttttcttatctgcatcatatatatcccacatttccataaccataatctccatttcatcaatagtatcgtaagcactgtggcagacatacaagccttacacaaacatataataccacgtatttaattatatttatcaattcattctaataaaagtgtactttattactatactataataaagcacacttttccattaaattattgtttttttattcatacatttttattcatgccactacttctgatgaatcttaaccatatgtgcatattcaccatcaagttccataagctctttatgcgtacctttctccttaattccttcctcagtaagcataagtatctcttcagcattctcaatagttgtaagtctgtgggctataacaagtgttgttctgttctttgcaagcttttcaagtgattcctgaactatctgctcactttcattatcaagtgctgaggtagcctcatcaaatataagtataggcggattcttaagaaatacccttgcaatagaaagtctctgcttttgtccaccagatagctttacacctctttgtccaatatccgtatcatatccgttttcaaatgactctatgaactcatgtgcattggcaagcttagccgcagctataacctcttcatctgtcgcatcaggtcttccatatcttatattttcttttatgcttcccataaacagataaacatcctgctgtacaacacctatatggtctcttaagctttttaatgtaacgtcctttatatcagtaccatctattcttatacttccaccagttgcctcataaaaccttggtataagagaacataatgttgtctttcccactcctgatggacctacaagtgcgacatattcaccaggtcttacgttaagattaatacctgacagcacctcgtcactgccatccttatacttaaacgatacattgtcaaatgttatctctcccttgacatctttaagttctgtcgcatctggcttttccttaatctccggttcaaccgacaatatctcaagaaatctttcatatccggaatatccgttctggaactgctctgtaaagtcgataagtactttaaccggctctgtaaatatattgatatacaataaaaatgtaacaaaatcagtcagattgacccagccctttgttatacctgcaccgccaactgctatgactataacattaatcatagttgtaaatgctgtaagaccggcattgtatgttcccatataatgataactgtttttctttgcctcaaggaaggcatcatttccctttttaaacttttcacactctatatcctcattggcaaaagactttacaacccttataccagaaagattatcttctatctgagcatttatctcccctatacgaactctgtttcttttaaatgccgtcttcattctcttgttaaggaaatatgcaaacacaagcataaccggaacaaggataaatgctgcaagcgtgagccttaaatctatagagcttaaaatacataatgctccaactatctttataagcgatatagtaatattctccggaccatgatgtaaaagctctgttatatcaaacaaatcagatgttattcttgaaagcagctgtcctaccttctgatcatcataaaacgaatacgaaagcttctggtaatgattaaatatctccgctctcatatcatactcaatcttagcacccatgacatgtccataattggatatataataattgcatccccactggataagcacaagaatgaaaagcactataactataatagtaatattctttaaagcttcatctgctgacatatatgccactttagatgttataaatcttactacaagcggaattacaagtgccactgccgctgacatcatggcaagtatcatatctaatataaatgtaccaagatatggtttataatatctggctaattttttcagattttccttcattagtttatatcctctttctttaaaactctgttcattataacacaactttcgtatatgtgtaaaaaagacttttgcattactacaaaagtcttaaacatataatataatgatgccggggtcaatagcccccgactttgatacctgctaatgctccgccttcataacctgtactggaactccaagaagcaccgccccaccaagtatattgccaatagtaacaacaatcatactttttataactgctactgttccaatattgccaagcagcatatatcctatagaaaatgtactcatattagctatacagtgttcaaaaccggcaactacgaaggacattattatacaaaacataataataagctttccgctttcactctttagcttagttccaacaagcacagccatacacaccagaaaattacaaagaattcctcttaataaaaactctggtaatcctgctgatatcttagtatatataaagctgttataataatccaccataattgcatgcgatgccttactgtatacaaacatagctgataataaaaaagccccaacaaagttcccaatataacttacaacccatacctttatcatatccactactgatacagttttattatatactcctatcgccataacaaaattattgccggtaaataactcaccattaagaaacacaacaagaactatagcaatagaaaacaaaaatgctccaagcagctttccaaactgcggatatgtagaatataataccgcagcacttacattggataatattgtagctacaactatataaaatcctgccataactgcccgcataaagtactttccaaaatgattattgcaaagctccgccttattcttagctgctgctgcaaccttctctacatctgttaataacataataaactacccttttccttatctttttgttagtgtacagcttttactaacagattgtatacaccatacacaacacaattttaaaggataacacaatactacttattttgctaccagcaaaatgtatttttcaaagtacttttcttatgttgtctattcatttatcctgcagccatttcattatgcatataatttattctacatataatttattccgcatatattctgtccagttcgcttatgatatcattaagagctgaatcattagttgtgtaacttttccccttatatttcacttcgcctggcgaaatcacgatatattttttatctccgtctgcctctttataagaaattccataaacccagccgccactccttaacgtatcaccctttaatactgagagcagagaatatgatttcagcttcatcccatcaagcttactgacaagacttttatcatcatcataaacctttctgtactctccatcctttccccttgttacagaaaactctgtcacatcctggttaatgctgatatgccctggcagtcttatatttaatgctgcaataattacaatcaggactaatataactgctgctataaccatatacttattcaacggctttttattatttttcctcattcgcatttcctcctctatactgcataagctttttctttattttaacataagcagcgtataattaccagcaatattttatacaaaaagtaatgccaaaagtattatcaaaagcaactaaaagagtgatacgcataagtaatcctaatgtataggcataactgcgacataattaaacatcattataaaatgacatatactgcctgccataacaaaaagatgaaatatctcgtgcgagccaaagtacttgtgatgcgcattgaacaccttaagcttaagtgcatatataacaccacctattgtatatatgattccaccagcaagaagccacataaatgctgctcttggaagtgcatttataatctgtgtaaatgataaaacacaagcccagcccataacaatatacaatgctgatgatatccatctaggacaggtaacccagcacagcttgaatatgatgccaataacagctattccccacacaagagcaagaagtgcatatccggttgtattatgaagtacaacaagacataccggtgtatacgaacctgctatcataactgatatcatacaatgatcaagcttctttaaaagcttattaatccttggtgttgaattaactgtatgataggttgtgcttgctgcatatagtagaatcatcgttcctataaatatggataaggatataacgtgcacaatatcaggtgctgaaagtgcctttataataagcggtgttgctgcaaaaagtgccataagcattgctataaaatgtgtaattgcacttcctggatcttttattttaatctgtgatacattttcttttaacttttccataacaatcctcttttctgcatatgatttatattaaagtttctttcactttgtaatgtagtattcattactacgtgtcattataatatcatcattatcaaaggaatgcaatactatatatttatattttcaaactttttaatccacacatattagcaaaaaataaaaaaatacaggaattattcctgatagtgaataattcctgtaatatttttaatttctataattacgttctctataattacttaatatacttctgtattctttccttcatctgctcttcacccataatatgaacgatagtccataggtcaggtgtgttagcacgtcctgtcactgctattcttacaacctcagctatatcagatacattacccttgaagctttcaggatcagccttgtatgccttcatatcagatgcaaaaccatgctcgtcagctatttccttaagcttgttaaaccatgctgaattatcatcgttgtggtcatactttgaaagatacgtctttaatatatcgctgaccatatccccatcaagtctgaactcatctctttcatcattagaagcgccatcaaagaaatatgcaataagctcaaatatctgctttgcatacataaagtcttttcttcttctcttagcaccaacccccatataaagacggagaatctgtaacattttttccttatctgcaaaccacatatctacattttcaggtgcattttccttagcccagtcatataagaaatcatataactcatcttctgaaagcttagataactcattcttacaaatgttgtgtaacttatccttatcaaaaagtgctccggactgactcatcttatctacagagaatgggaattcattaatatccttatcagggaacttctcatgccactcctcaaagttagagttaagaagtgtaagaagatataccttcatagtgtatggatgatatccatcctttctataataatcaagtgaaagctctgggtcctttctctttgatagctttctctttccgcctgtttcctcatcaaacttcataagatgcgctgtatgtgcgtatgctggcatcttaaagccaagaaggtggaataattcatagtggataggagctgatgcaagccactcaccaccacgtacaacaacagttgttctcataagatggtcatctatcgcatgtgcaaaatgatatgttggaataccatccttctttaaaagaactatatcatggatattttctggaagcttaatctctccctttattgcatcaacaaatgtaatctccttatcaggacttccctgagaacgaagtctaagcacatatggctttccagctttgatattagcctctatctcctcatatgaaagattacggcaggttgcatactctccataatagcctgtaagcacctttttttcttcctgctctgctcttaccttatcaagctcttcctctgtacaaaagcatgggtaagcaagtcctctttctacaaggctcttggcatatgaatgatatatttcaactctctgtctctggaagtaaggtccatacgcatttcttggatcagaatcatcaaagcctgcaccctcatcgaattcaatattgaaatatcttaatacattgatgatagtttcaactgctccgtcaacctttctcttctcatcagtatcttctattctaagatagaacacacccccattcctatgtgcaattctttcatctgcaagtgcactataaaggttaccaagatgaataaagcctgttgggcttggtgccatacgtgtaacctctgccttatttggaagctttctatatggaaacttttcctcgtaatactctggtgtattaaccacctctggaaacaataactctgctaacttctggttatccatgtttatcctcatttctgcgcacgtttttcttatatagagcttgtgccgtgtgcgcacagacacaaatcccgcatgtgataaataatttttcacactaatcttgcgcttgtactgttatctatatttaaacacagtattttattttacacattttctgttgattaatcaaccttttaccagcttggtcaaatatttttttaccttttcatctgtaaaaagcaatggtgcaatccttatagtatgtgttttcgatagccttattaaatatagcgattattcactaaacatttattcatgtgtttagaccttttgactctggtatcatatatttaatatattatatatagcataagctagtccatcatcatcgttagacagagtgatataatctgctgcttcctttaacgcatcacacgcattgcccatagctactcctgctcctgcgaattctatcatgtcacaatcattatccgcatcaccaaatgctgctatattctttctgtctataccaagtctttctgctaagaacttaaccccggatttcttaccagcatccttatatgaaatctcaataagctgttttactgaactggtaatatatatatctggatctttttcatataattccttgattatcctattctttaattcatcatcatcaagcacaatatctatactgtccagttcatgcttatgctcatatataaagcttactatatcctcttgaagagttcttgtacttctcacatattctattgccttaggtgttgcaccaaactttaccggatcagccatatactccttagatgcatatgcctttccccttatgaatgcttcgtaggtgaccggatatccgacagtattattaattatcccagctactgaagattccttaagcacatatgaattaagacatttcttatcctttatctcgtatacagccgcaccattgcttgttatcgcatattctattccaggtattgtaacaacctctgaaggaagcgtatcaaacgcccttccacttgcaatacacacatgtattcctttacttatagcatattctactgcctgtctgttagccttagatatatgtccatccgacttaagcgttgttctgtcaagatcaagtgcaatcagcttaacaggctctttatatacattagtattcattaatacctcactactttcctaataatctgtcaaaggcatactttattatatagtaagctgattatttttccaattacttttatgtagaataaatgtagaatttgcaataaaactaatataaaaaggaccaccgcaaaaagaatattcacataatacatagaattgtaaacttaattctaaatatataatatgcaaataattcttattgcgatagtcctttatctatgccttcttactccagaaatcaactggctcatattcctgaagctttgcaagaaaccctaacctttcaagctcctcctgaataatatccaatgtactctcatcctgtgcagctattgtatgataatggtatcctgaggttacattcataagaagtgttgaacttccattattgatttcttccatatatgcctttatatcacgtcttgaatgaatattaagctccgccttaaccacaccatataccttatgatatacgaaaacatccttaacccatccgcccatatccactatggcattaagttccttctctacatctgcattggtatgcttaaccttgactattcttgtatattccttatttcctcttataacataacctctgttagttgaatatacatcataagatgcggctcttataagtgctatgtcctgcacaataacctgacggcttacattaagctgattagcgagtgcaacacctgatacaggtgtatcacttctgctaagaatatctattattttttctcgtcttaactgtccattcataacctggcttcacccctgcatttactttacttatattaattctaacacttatcgttgtagacagcaagccctatgatccgctctatgctttatgctgtaaacagcctgaatcctgctatatagcacatataacattagtcaaccggatgaagattcttaagcgaaatatccattataggagctgaatgtgtaagtgcaccacttgatacataattaactgaaagccctgacagcttggcaagattctctttggtcatattacctgacacctctacctctgccttgccatctattattctcatagcctcagccatagtatcatgatccatattatcaagcatgattatatcagcgcctgcttctactgcatccttaaccatatcaagtgtttcaacttcaacctctatctttcttacaaatggagcatactccttagcaagatttattgcctctttaactccgcctgctgcacctatatggttgtccttaagaagtacaccatctgtaaggttatatctatgattattaccaccaccgactttaactgcatacttttcaaaaagtctgttgttaggtgttgtctttcttgtgtcaagaagcttaattcctgtaccctcaagcagctttactacctcacttgtataagtagctataccactcattctctgaagatagttaagagctgtcctttcgccacataaaagaaccttaatatctccccttacaactgcaagaagctgtcctttctttactctatctccatcagccgccttaagttcaacctctgtattctcatctaataatgtaaacactctttcaaatatctgaagtccgcatataactccatcctgcttacatataagattcacctctccctttctgggaactggcataacactgttagttgaaacatcctcacttgtaatatcctctcttaatgcacttaatattaatgggtctgcatttagtcttaacgtaacctgatcaaacattttataatctcctcgctgtatatattaataataaaattttatttcataataatccgtatgatttataaatatgtattatacaccatattataattatcccaaacttctgatcatgctgtcttcatagctgcatcagcttcgtctattttctttcttacaagcccgctgtagtacttatccagcttttcttcatcctgatattgatttatatctgtatttttaacatattcatcggcagcagcatctaatatatcagaaagttcatgctctgtcatattatgtgctgctctctttgcaaacacaaggctttcaagaagcgaattacttgcaagtctgtttcttccatgaacaccattacatgctgtttcaccaactgcatatagtctgtccatagaggtcttactttcgtagtctacctttattcctcccataaagtaatgctgtgccggaactactggtatacactccttagtaacgtcatacccctgttctaagcaatgctgtactatatttggaaaatgtgtctttagctcttcttctggaattgtacgaagatcctcccacacataatctgtcccatcctttttcatctgctcatatatagcctttgtaagcagatctcttggaagaagctcattcacaaaacgatttccattcttatcatacagctttgcgccctcacctcttactgactcagatataagaaagcttctgtctttatcattctttgaataaaatgtagtaggatgtatctgaacataattaatatcctttattgcaacattatgcttaatagcagctgcaactgcatctcctgtaaggtgtctgaaattcgttgaatgacgatataagcctcctatgcctccagctgcaagtactgttgcatctgccttaacatttacaatactgccatcctcaagtctgattacagcaccaagacattccttatccctggatattatatctaacatacgcgtattttcaagcagaacaacattaggaagttctcttactctgtcaagtaaatgacttgttatctcttttcctgttacatcctcgtgaaatatgattctgttactgctgtgggcaccttcccttgtatatgcaagattaccattttcatccttcttaaagtctgctcctgcagctattaaatcctttacaacatctcttgatgaacgaatcattatctctaccgatttcttatcattctcataatgccctgctttcatggtatcttcaaaataattatcatagtcggcatcatcctttaacatacacatgccaccctgtgcaagaaatgagtcactgctttcagcatctgactttgttatcataagtattttcttatctcttggaagattaagggcaagataaagtcctgaacatccacaacctactattaatacatctgttttcatacttttcactttattctccattctgccatgttttccatatactaagtctgctttcatgactatgattatccggcaatacttctgtttttattttgctgcaagctcaagcatcttgttaagaggcttcatggcataatccgcaagctctttatctacaaacacctcattagtatcattttcaagaacatctaaaaccttttctaatgttaccttcttcatattaacgcagacctggtcaggcttaactgtgtaaagtttcttatcaggtgctttctttcttatttcattgaacacaccatcaacagttcctattatgaattcatctgcctctgtatccactacataatctattattcctgatgtacttccaacataatctgcaagctctaacacatcctctgtacactctggatgtgctgcgaacttagccaatggatgctctgctttcgccttttctaccatctccttagtaataactacatgtcttgggcagcagccattattgaatataaaattcttatccggacattgctttgccacaaaatgtcctagattcctgtctggaataaagaatatattcttgttaggcagattctttactatcttaactgcattagatgatgtaacacatacgtcagaatatttcttcagttctgctgttgagttaatataacagacaaccgcaaggtcatcatactcctcacgaagcttaagtatttcttccttgtcagccatatgtgccataggacagtccgcattcatatccggcataaacacccttttatccggattaagtatcttggcactttcccccatgaactcaacacctgcaaatataattctgtcctgatcaacctttgtagccaccttgcttaaataaaatgaatcgccaatataatcagctatatcctgtacatcctcatctacataataatgtgcaagaataactgcatttttttctttctttaacttttcgatatcacttactatagacatatgtatctcctttttcgataaattcctgttgtttatcaaagtgctttttttaatgttcatgatgtatgcctcaattaacaacacatttaagatttgaaatttcatttacaaattttacaaagtatactacataactttacatgtgacaagacagttgtaaatattttctgtaaaaatacaatatcagaatatgtcataataaaatgtagacattttaagagtaatttaaaagattttctatgtaaaagagcggatatgcctgtaaaactgcacttttacagctataacagctttcacaaacagctcaaaaaatgccaatattttcactaaaaatgtctacatttttattttgataagtattttggatttaggttattgacttataatctatggtagactgtttaaacgctcttgcttcttccaatgttacatcattaggaagacctttcgtaaaaatatataatatttttctatttgtaaacaaatcgcacgattttatcaatacaataaaaccgtgcgattattatttaaaatttatttaacataatttacaaatgttttttatagccaataaaatgtcttatccccacacctttttggcaattttcttaacaagtcttaacttagcccactgctcttcttctgtaagcttgtttcctatctcacaggatgcaaagccacactgtggacttaagcacaatctgtcaagtggtatatactttgctgcttcgtttattctgtcaataataacctgctcatcctctaactctggagactttgttgttataagtcctaatacgaccttcttatcacctgtaacattcttaagtggctcaaagcctcctgaacgctcatcatcgtactccagataatatgcgttaacattctccttagcaaaaagtgtagcggcaacccccgtatacgcaccgctacttgcatatgtcgaatggaaattaccacggcatacgtgtgtattaatcactaaatcttctggttttccttctattgacttattattgatatcaagaagtgtattcttaatcttttcaagtcccgctggtgttgtcccaaagaatttacatgcagatggatctaccaccattccccatgaacaatcatcaaactgaagattacgacagcctgccgcatatacatcctttatgaattccttatatccgtttgctatatcctctgccacctgctcagatgtatcatagaacttcttagtatttccccaggcaaaaggcataatcatctgctctaaaaactgcgctggtgctggtattgtaagctttgcgaccgtatcctcatcctcaaactgctgcacgaacttaaaatgttctataaatggatgtgtcttatacacaatttttcctgtaagatatgtatcatctatcatagcagcttctccgtggaatggaagacctgtttctgtcttggaatggcctactccatcaaatgcccacataaaatcaagatgccatgtggctcttctgaactctccatctgttattgcatgaagtccaacttccttttctttctttataagctctgttatcgcctcatcctcaacactttttaactcttctgctgtaatactgccagcctcataatctcttcttgctttctttaagctttctggtcttaagaagcttcctacgtgatcaaacttaaatggtgtacttgccatattatccaactcctgcctttcctttatcttgtatattgtgattctttttactaaatataactttatatattgtctgaatctgcaatagtttttcgttggacttaatataacatctgacttacaccttgtataatacataaacttttatgtttgccatagtttaaaactatggcaaaacgcacctcttcaacgcctccacatatatctcccctaatcgactaagggatatattcctatgcgtgatatatccaatatgcatcccaccttctccttcaagtggtactgctattatatcttttccattaagttctttatctataacaccgctgcatactgtaaaaccgtttagtccaatcaacaggttaaaaagagtagccctgtcacggactcttatattctttttcttttcttcaactgaaaatatttcctcagaataataaaatgaattatgctctccctgttcaaatgaaagatacggataatcctgcagctcattcattgtaaccttatttctgtctgctaagggatgtttacggctaatgaatacatgtggctctgcctgcataagctcgtgaaatacaagcttgtgcgacttaatctccttttcaagaacaactctgttgaaatcattcatataaagcacgcctatctcacttttcatcatagcaacatcctcaataatctcataagtctgtgtttccctcagactaaaatcatattcatcatgtccgtatttttcaataaggtcaacaaaggcattgacagcaaaggaataatgctgcgtggatacacagaattcctgctttccgccatttcctcccttatatctgtcctctaaaagtgtggcttgttctaatacctgccttgcataacctaagaaatcctctccatcctttgaaatatgtattcctttattggtcctgtcaaatattgttatattcatctctttttcaagctcgtgaattgcattcgtaagacttggctgagaaataaaaagccttgaagctgcctcagttattgtgccggtttctgctaccattattatatattttaattgttgtaatgtcatattaaccaccatttccaaataatttaccttgatgctttttcacatacctgcattgcctcatccaaattattacttaagtaccgaaaaataatctttataattaaactgcgtaactatgctgttattatcatgtcacagctttcacgtattttgcaagtatcaaaatacttttcttctcttggaatccacacactcttaaaagcttccagcttcgcaggattacgtgcttttaaccgttctatttgcaattccttggaaacatccataaaaacacatagtttataaaagttcctaagcttaggatggcagctatatgaaccttctataaccgttatcacattactatttatcttctgtgtcctcatgtatctgtcattatgacaatcatatggacggtaaactgcatttattccttctgtcaggggaataaggatttcatctgtcaatctttgaaagtctatattaccacctggctgtttcattacatcttccgttcttttctgcattggaagataaaaatcatcaatatgtatcacattacattcatattcctttttcaggtgttctgcaagtgtagtctttcctgctgcacagcgtccatctattgccataataaacggctgcttagatgatatttcttttaataacacacataaatcctcatatttattcatatataatcctcataatatcatatgttacttttcttttgcgctcattatatcacgattcgtagctttgctactcgccgctgctatcgcagctatcgtgatcgtcattcgccgttcgccagaaatctgcaagcagctttctggctctcttgcgctcattacatcataattttttcctataatacatatatgagtaaactgctggaagaatacaaggaataatagctgctgcaatgattatccatatatttttaagtggtgatgtaattattagtactatccctccgattaccatacattttccgccaaatctatgcgtattgaaccagttatctgcatcgtttaatgcccatgaaacacgaaaacctatcgtatagttctgcttaatcttaggtataaaattacctaatataatatataagactccaataagaagtgaactaaagaatcccatatccaactgatatccaagattatatccatagacagtagtacagacagcaatagatgttaatggacatatccacataactattgaacgcattttgccattaatattttttgcctttggatctatagaggctgctattatgcatatcaggtgtacagctaataatatagctggaagtccaacaactgcaaagcccttagatgaataaccatccggctggttattagctccccaatgtgttacgaccgtatctggtaactgattccataacaataatcccataataatgggaagaagtattattcctaatgtaattaacagcatttttttattttctttaatcatattatttttctcctttaaattcactaatccataacataagctcttcaagaacagatgcattaagctcataataaataaactttccttcacgttcgtcccgaattagatcagcctcctttaataccgataaatgccttgaaatagccgcaccagatactgaaaaatgatcactaatctctcctgccgataagcgcgaatgtttaagaagcttaagtatctcacgccttgtaggatctgcaagtgcctgaagtgtattctgtagtgccaaattaacacctccctgcttgatatttaatatttaacatttaacttaaatgttaaatatattgtaacacaacctataaatatgtcaagtaaaaaaacagccagaccaaaaatggtctgactgctgctatgtattcatagcttccttaattccaaacaccttgtcaacctctttccacccctcacatcttataaacctgtcatcaggaagttcttcacgtatattccacggccggttaaatactgcaatcctgcagccttcaaagtgcgaaacatgccaaaaagcagccggcgaatcctccactgcaaagtcaaaagacattccatataactgctctaaggtcagattataaacataatcctgcttacaattttcacgcccatatttatccacacaatataaaggcactctttcaagcttgtgttcatcaagccagtgccttgatggttcatatgaattaaatggtcttccagtaataataaaaacctcatgtcccatatcaacccacttattaatcgtctctgatgctcctggcgtttcctcataattcagaagattatccggaaaatgtcctgctttcatcaattcttcatattgactatccgttaaatcaaaggttttcttaagattgaaaaactgcacctctctatatggcacatctatgccaaacatttgctttgcaatttttgtgaaagcaagtgcagtttcacataatacatcatcaaaatctatatatattctcatctattatttactcctgttgtagatatgagcaagctcatgtgggtttagacctcttgaccctgatatcattatattactatattttaaaaaatccctcaagcagacatagttgttctttctactatctgcttaagggaaatattaactggtataacatatgtaaaatctgtttttattatgaacggtgatgaagctcctgtacagtcctgcttatctcttccctgaccttttcatcctccttaggaatcttgttcagcttttcaagaagatctgcagtgttatgctcacaaccgacttttcttaatgactcacatgctgcaaacacaacatcctcatcattatcatcaaccagccttaacaaaagatcaacactactgttattatcattagctcctagttcctttgcaagtgcaagcttttcttcctttgtgccatgtacataatctgccagcacataaaaatcatttttctttacaagatgctctatcttttcactaactgtctttttcttaaataacatattcatttcctcgctttcatgctaaaggttaaaaaccgcatacccaaaaaacgatatgtaataatcagcctctttcttataacttattatattattgcgcttaagatatgtaaaatgtatattttatataacgcttatataatatttacatatacattttttatggttatactagatcttgaataaagaattgcataaattacagaacaatggagcaatcctaaatcatgaaaggacaataatgcaatgacacttgactattacagaatattttattatgtggccagatataaaagcttttcaaaggctgcccagattcttggcaacaaccagcctaatataacaagatatatcaatcttcttgaacatgaacttggatgcagcttatgtgtacgaactcacaaaggaatatcactgactcctgaaggccaattattatacgaacacgttgaagctgccatgtatcagctaaagaatgcacaggatgcccttaagaaaaaacagagccttgaaagcggaactataactatcggagttagtgacactgcactcagactttatctctcagatagactggaaaattttctttctctatatcctaatgtaaggattaaactcactaacaatttcacctctcaggccataaccgctcttgaaaatggatttgttgacttctgcattatcactacaccattttcaatagacaaaacatttacgcagaatactttatactcatttgaggaaatattaataggtgggaaaaaatatgccaacctttcagagaatatacttgacattaatgatttaagttcttatccttatatatcattaaacgaagcctctggttcatattcactatattcagaatatttttataataatcatctgcaatttgaacctgagatgcttgtatattcaactgaccagattatccctcttatccgtgccaatctgggacttgccttctatccaaaagagcttgctgctgatgagcttaacaaaggaaacatctataacataaagctaaatgaacctgtaccacaaaggcaggtgtgccttatacagaaccctaaaagaattcagagcattgctgtaaaacgctttatagatatattgctgcagtaaggcagtgtttttataatcccatgggttatattacctgcagttacaatccatgggaagccttctgatagtctgtaagcttttcatacatctgctttatatatccatcctctttagaattcacaaacactgttttattgctgctttttatcataagcacaggagaatagccatcccatataaaaagcatacatttaccatatgtcctgcccttataattacctatatcatattcgttagtagagcctccattagttcttgtaaagttatccttaggcatctcattaaaaagctgcacttcctgtatgtcgtttatatttatactacatttataacctcctcctgctgccataaatgtatcatctgctatataaacattcatctttacatgtataaatggaacaagtaccgccacagtaaatatgcatgaagctgttataacaacagtaagtattcctacaagaatctgtgcgcctctgttcgcatagttaaatgcataattcatgtcatacattctgttctttataagcatatgtctatcattaggattgtaataaaatccgtacttccagtattcatcatcatctacatacaacggtgtatcatcggctgccagtacctctgttctttttcttcctgccacaacgaaaaacactatcataattatacttccagtaaaattcacgattgaatatacaataatatcagctccatacaaaataccatgcaacatatactctgtggcaatataactaaatgctatcgtattaaacaggctcatcattataagtccaagtgacacatattttttatatatctggttcattgttatattaacatcggaattctcactatatactgtgcgttctctggaattaacatatatattaaatatatacaatataaccgctactacaattgatactataaaatatatattcatatctctgaataacatatctgaatgtctcacaagaacaactggtatatatataactgctgtcagtactataagcatccagtgatacttcatactaacagaggtctttccattagaagccgaaagccttgtatcaatatatacttttttctgttcctcaataagccagccatttttcatcttaagctcatacattttcctgtggccgactatgacaataagctgtattcctacggtatatacgaatatccacaatatatatatgaatatcgatataatcatattcacaacacatataccacatattacaatcgataatacgatattaatattgttaaatacattaaactgcttttttgtcctgctcatcaaagaagttacttctgcatcttctttcttctctgctggtatatggactcccagatacataccagccttatattcaaagcttgacaccatcgttaatctcataatcattattataaataaattggttacaaaaaacataactgccataaatatttccatatatgctccaatccgcagcgaaggaggatgttaacctttatagccgctgctttttcttttacactcattatattataatttactcagttataacttgcttctcttctacacatttcatcttagaatatatcttgtcacacatattaagaaaatcttttttatccatacctgttatacttgcttctgctgacaatagctcaagttctgcttccaacttttcccggaacacaatatccatatcaatattcttagcaacaacagcaccatgtcttctgtctatatttatatagccttctgtctttaatatctgatatgtcttattgactgtcattgtattaacgcctgcatcttctgctaactgccttactgttggaagactttcaccaggctttaactcaccatgtcctattcccataactatctggttacgcagctggacatatattggaatactgctgttcatatctaattcgataatcataatgattcactctttctttttatactatatattaagttttgtcttatttgtattatttgtattatttattataatacaaataatataattgtcaataaattatcacatttatgttttccaaatgttttccaaatcctgctcactcctgcctatccatacgtcaatagcataaaaagaaaggcaagtgtctgcttagcagccgcccacctttcttttgcattcattactacttattttacttatcttccagccagtttatctataatatttctggctacatatacaccactagctgaagcatgtgaaagtgaatgtgttacaccacttccatcaccaattatatataatcccttgtatttagtttcaagattattatcaatctcaacttccatattatagaacttgacttccacaccataaagaagtgtatcatcattggcagtaccaggtgctatcttatcaagtgcatatatcatctctatgataccatcaagaatacgtttaggaagcaccaggcttaagtcaccaggtgttgccgcaagagttggctttacaagtccttcctctattctcttttcagtacttcttcttcctctcataaggtcgccgaatctctgcacaataactccgccaccaagcatgttagaaagccttgcaatactttcgccatatccgttactatccttgaaaggctctgaaaaatgctttgcaacaagaagtgcaaagttggtattctctgtctgcttctcagctccctcatagctatgtccgtttacagttactattccatttgtgttctcattaacaacgattccattaggattcatacagaaggtacgaacaagatcctcgaacttttctgttctgtatacaatcttgctttcatataactcatctgtaagatgggcaaatataactgctggaagttcaacacgtacaccaatatctacacgattggattttgttggaatatctaaatctttacagacgttctctatccacttactgccgcttcgtcctactgaaacgatacatttgtcacagtccatatactcatccttatagaataccctgtatccaccatctatgacctcaatattacttacaggtgtgttaaagtaaaagtcaatatgttctttcatttcatcgtacatatttttaagaacaatataattaatatcagttcccagatgtcttacagaagcatcaagtaactttaacttgttctgcatacaaagtgtcttaaacttagtcccggcagttgaatacatatgtgtttcttcaccaccatgtgaggtattgattgtatcaacatacttcataagttcaatagcctcgtctcttccgatatactcgtaaagcgttccaccaaaatcattcgtaatattatattttccatcagaaaatgctcctgctcctccaaaaccattcataatagcacatgttggacacttaatacacgatttaatcttcttgccatctataggacactttcttttctctaaagtatttccctcctcaaacacagccaccttaagctttggtgactttttcataagctcatatgctgagaatatcccacctggacccgctcctattattattacatcatatttatcactcatactatacctcatttccacataactaaactttacaatattagctgcaatcaatctttttgctcctgcttttttatagcctcattaagattattttctatcttttcaagtgtaacacacatgcttttaagctcatcctctgatatattcttacagaatacgtcttctgccatattaaataaatccgacaccttatctgcctttatttctccctccttagtaagctttatcatccacgaacgccggcactctggattactctctcttattataagccccatcttctccaacctgtcaagtgttcttgacatagtagttacatctatcaggcagacatcggacagctctctttgtgtcatctgtccacctttttttaattcatataatattcttggctgtccctgtcctactgttaatcccatatctataaaataaggtcttaaaagtcttcttcttagcatttccacatcaaaaagataatgcctgacctctccatatttcatactactcctcatttctttgcatatttttacacatatcagttaaatattactaataatcatcagattataacaatctgaaatctttaactaagctcaaactgtcctgtatacagctgataatatctgcctttttgttcaagcagctcatcatgacttcccctttctataatctgtcctttttcaagcaccattatagcctttgagtttctgaccgtagataatctgtgtgctattacaaatactgttcttccctccatgatagcatccatgcctttttctatcaacccttcagttctagtatcaactgagcttgtagcctcgtcaagtataagcactggtgcctttgctatcgctgcccttgctatggcaagaagctgcctctgtccctgtgataagttgcttccatcagaataaagcatggtattatatccatctggaagacgtcttatgaatgaatctgcattggctattaaagctgcatttctaacctcttcatcagttgcatccagttttccataccttatattgtcagctattgttcctgtaaacaaatgtgtatcctgaataaccatggcaagtgattttcttaagtcatccttcttaatatcctttatgtctatgccatcataagttattgtgcctgactgtatatcatagaatctgtttataaggttaatgatcgttgtctttccagcaccagtcgagccaacaaatgctattttctgccctggcttagcataaagagtgacatcatttaatatagtttttcctggaacatatccaaacacaacatttttaaatcttacatcaccacgaagctcaacaagacaagcatctgaattaccataagcctcaagccctgccggcactttccaagcaaatacacctgtatactcactgcactctgtaagactaccttgcgcattcttaacgacgttacaaagtgttacgctgccttcatcaatctctggtttttcatccatcatatcaaatatacgttctgcacctgaaagtgctgataacagaaaattgacctgctgggtaaactgattaagcggcatggcactctgacgtacatatataagatatgatgacagacttccaagatccataagtcctttaagcgtaaataaaccacccacacatgctgatatcgcataattaagatatgacaggcttacaatagttggaatcatcattcctgcaaaagcaagtgcattagtagactctttcctgaaactttcattcatctcacaaaacttctcaaaattcttttgttcatggttgaacaccttttcaaccttctgtcctgccatcatctcctgtacaaagccattaatcttacccagctcctcctgctgcctgttaaaatatttcttgctatgtttactgttaaacttaataaagaaaaacatgataacaagaaacacaataactataactgataatctaacacttaaaaccatcatcatgataagagtgccaaaaagcattataaagctctgaattatcatagcgaaactgttattcatagcttcttgtacagtatccacatcattggtaaatctgctcataagctcaccatgtgtatgagcgtcaaaatattttaaaggaagcttctgtacatgtgcaaaaagatcatttcttatatcctgtataaccttctgtgatacctttaccataatgcggttatagccaaatgtacacaaagccccgcaggcatacataacacccatggcaataactgccttaagaagtccttccatgtctcccggtactataaaattatttacaactggttttacaagatatgtgcctgccacattcgctcctgcacttatcagcacaagcagtgcaacaagcataaacatccatttataatgaccaaggtaaacaagcagatgctttatagctttcttagtatccttaggtcgtttatatccaacatactttgccattataaatctgctccttccttttgtgattcatatatttcctgatatatcttattggttcttaataattcctcgtgtgttcctattgcatttacacaacccttatcgagtataattatctgatctgcatgcttaacagaagatatcctctgtgcaataacaagcttagtcatatcaggaagcttctttgcaagttcttcccttatccggccttcggttgctgtatccacagcacttgtagaatcatccagtatgagtaccttcggtttctttaatatagcccttgcaatacatatacgctgcttctgtccaccagaaacattgacacctccttgtcccatctctgactcatagcctgccggaagcctgtctaagaattcatctacacaggctatatgacaagcttcatctatctcttccttcgttgcattttcattaccccagcgaaggtttgatatcagagaaccagaaaacaaggtattcttctgcaaaacaacagcaatagcatcacgcagatgttttactggataattcttaacatccactccatctatacgcaccgttcccttagtggcatcatatagtcttggaataagctgtacaagagtagtctttgaagaacctgtctgtcctatgattcctactgtctgtcctggctttatatgaaatgaaacatctgaaagtacgtattcctttgcttcatttttatacttaaaccacacatggtcgaactctatttcaccatgcttaacacttatatcctgcgagttttcatcagtaatgtcgattttttcgtcaagtacctcgactattcttgtggctgatgctaaagaacgtgtcatcataaggaatacatttgacatcatcataagtgaattaagaataagcagaacatagcttaaaaagcttgtcagttctccaatcttaagctgtccgttattaataagatgtccaccaacaaagagaatcgcaataatagttccatacataacgaactgcatagctggcatgttaagtactgctattccaaatgccttttcagattctgacttaagcttagcattaacctccttaaacttatctacctcatactctcccctgacatacgactttacaacccttacagctgtaagattctcctgtatactacgattaacaagatctatagcattctgcatctttgcgtacaatggtcttacattcataataattatgataagcaagaccgcaagtataggaagtgccacaaagaatacaagggctagtgttccgttaatagtaaatgctattgatgatgcaaatataagcataacagggcttcttccaaaaggcctcataccagttgaaactgaattctggatattggtaacatcacttgtaagacgtgtaacaagcgacgataccctgaaatgatctatattagaaaatgaataagactgaagcttttcatattctgcctttcttatattcgcgccaagtccctgtccggcaagtgcctggaatctggcgctccctattccaagcacaagtgctataagcgcacataaagccatctcaaatcctttgacatatatataatgagtatcgccattggccacaccattatctataaggtcagccatgatcataggcaccagaagttcaagcatagcctcaacagctatacatataagtgccagataagcatattttttatattgcttcatataagaaaaaattcttcttagcattattagtcgtacctccgattgttgtatatgcaactattgtaacatcaattattgcaatgtcaagtttacgatatctgatttgttatattaggtttgcagcatcaggtttgtgatattaatttttgaaatatcaagttgtaatatattattgacatctgcatataaaaatgataaggtatagccataatgattgttaattatttatcaatcttattttattagcatagttacatcttgtaatgctatacaatgtacattttattgtcatctgattactcataagatgtatataattatctaagaaaaggggaactaatcatgaacaaagaaaaaactttagttgtcgataacatccagtctcttgaagagcttataagctctgtaaaagaggcacagcgcatcttttcgacatattcacaggaacaggttgataagatattcaccgctgccgccctcgctgctaataaggcaagaatacctcttgccaagatggctgttaaagaaactggcatgggaatagttgaagacaaggttatcaagaatcactatgctgcagagtatatctacaacgcataccgtgatactaagacatgtggtgtcatcgaagaagataaagcctatggcattaaaaaaatcgcagaacctatcggtgttgtagctgctgttattcctacaactaatccaacatctaccgctatattcaagactcttatttcattaaaaacccgtaatggtatcatcataagtccacacccacgtgctaaggaaagcactatagctgctgctaaggttgtacttgaggctgctgttgctgccggtgctccagaaggcataatcggctgggttgatgttccaagccttgaacttaccaacactcttatgaaagaagccgatattatacttgcaactggtggtcctggtatggttaaggcagcttattcatctggaaagcctgcacttggcgtaggtgctggtaacactccagctattattgacagcactgccgatgttatacttgcagtcaactctattatccattctaagacatttgataatggtatgatatgtgcttctgaacagtctgtaatcgttgactcatctgtatacaagcaggttaaagaagaattcactaaacgcggctgtcacttccttaataagaccgagcttgataaagtaagaaagactattattatcaatggctcgttaaatgccaagattgtcggtcagagtgcttataatatcggaaagctttccggcatagaagtacctgaaagcacaaagattctcattggtgaagttacttctgttgacctttcagaagaattcgcacacgagaagttatctcctgttcttgctatgtataaagcaaaggattttgatgatgccataagtaaagctgagcgtctaatagctgatggcggatttggccatacttcttctatatatattaattctgcaactgaaaatgataagcttgctaagtttgaggaagctatgaagacctgccgtattcttattaatacaccttcttcacaaggcggtatcggtgacctttataactttaagttagcaccttctcttacacttggctgtggttcgtggggcggtaactctgtatctgaaaatgtaggtgtcaagcatcttattaatataaagactgttgctgaaaggagagagaatatgctgtggtttagagcccctgaaaaggtatacttcaaaaaaggctgtcttcctgttgcacttaacgaggtaaagaccgtattaggaaagaagaaagcatttattgtaacagaccagttcttatacaagaatggctatactaagtgcgttactgacaagcttgatgaacttggcataacacatacaaccttctttaacgttgcaccagatcctaccttagagtgtgccattgagggaactaaggctatcaacagctttgaacctgactgcatcatagctatcggtggtggctctgctatggatgctgccaagattatgtgggttatgtatgaacatcctgaggttgactttatggatatggctatgagatttatggatataagaaaacgtatatacacattccctaaaatgggagaaaaggcttactttatagcgattcctacttcctctggtactggctcagaggttactccttttgcagttattactgatgaaaaaactggcataaagtaccctcttgctgactatgaactgcttcctaagatggccattattgatgctgatatgtgtatgaatcagcctaaaggacttacagccgcatctggtatagatgcacttacacatgctcttgaagcatatgcttctattatggctacagattatactgatggtctcgcacttaaggccatgaagaatatatttgaatatctcccagcggcatatgaaaatggacctcacgatgccaaagcaagagaacagatggctactgcttctactatggctggtatggcatttgccaacgcattccttggtgtatgccactccatggctcacaagcttggcgcttaccaccatatacctcacggcattgctaacgcacttcttattacagatgtaatgcgctttaatgccgcagaagtcccagctaagatgggaacattctcacagtatgcttatcctcactgcaaggaaagatatgttgaatgtgctaacttccttggtattgccggcaagaacgatgatgagaagtttgagaacttcttaaaggctatcgaggagcttaaggataaggttggaattaagaagactataaaagactacggcattgatgagaaagacttccttgctacacttgatgagatggttgaaaatgcatttgatgaccagtgcacaggcgctaacccaagatatcctcttatgagtgagataaaagctatgtatcttaaggcttactatgggaaatagaattagtgtgaaaatagaattaacttgaaaatagaattaacttaaaaattaaattagtgtggaaatagaattagtttaaaatcaaatctccacacaaaggttttttgtctgtgcacacctgacaaaaacccgttatgttaaaaaagtgcgcaagaatggaggattattatgaaaaaatgtatatataaaggtgcattaaagtcagtctatgttgataaggataaggctgaaaaggtatttgcactatcttacaacaagtctgatgtattatatgaagcacttaacactgcaagagttgaagatacaggacttgatataccacgacttcttaatgtatctgtagtagatggcaaatggactataacaagcgaatatgccaagggtgaaacactaaaggagcttttagccaagcatccggaaaattctgatgcatatattgaggctatggttgattaccagatagccataaacaaacacagcaatcctcttctggttgatatgaaaagcaagcttgagcgtcagataaacgagcttaatattcctgctgatacaaaatatgagcttgaatcaagactttcagagcttccttaccataaaaagctatgccatggtgattactgccctgagaatataattgtccagactgacgataagaaccagattgttgctattaccgctgttgactgggtacacgcaactaagggtaatgcttctgctgatgctgcaaacacctaccttacactcaaactaagtgatgaagcacttgctgataagtacataaccatgttctgtgagaaaacatctactgataagcgttatgttgataagtggatgcctatcgtagccgctgcaagattaactaagaaaaaacctgaagaaaaggaaatgcttgaggctatgattgatatatgcgatttccagtaatcagatattaacttacgatacatctgttaatcaaatgtattaatattctttattgttcaactttataaaaccagccatatgataccccttgtctcccttatgtggaatgacatcatatggctggttttattatatttttttatattattatcttcactcataatacccctaatacattttcatccccttcagtttcttctacccattcatcatccgatgctattacagctttgccatcagcattttaattagtattagccataatcaccattcatttcaaattataaatttactctaatattacaatatgcccttcttgctttttttcaatacattgttataacaatgtattattctaaaccttatctacatcaacaccaatactctatattatattgcagaccgcaaatacctcactatataacttgcattacccacaataaatcaatatactaaagtaaattattgtatacactataatcattaagaaaggactacaagaacactatggaactaataaaaggcagaccagccaatgaagctgacagacttgataaagaaataagagtatatgacctactcgaccagttaggaatggaatactatcgaaccgaccacgaaccagcaacaactatggaagtatgcaacgatatcgataaaattcttggcacactcatatgcaagaaccttttcttatgcaacagacagaaaacacaattctatcttcttatgatgccgggagataaagtatttaagactaaagacttaagccagcagattaactctgcacgactttcatttgccgatgaagaatatatgaaagaataccttgatataacaccgggttcggtatctattatggggcttatgaatgatactgataaccacgtccagctgcttatcgacaaggaagtacttaaagaggcttctcttggctgtcacccttgtatcaacacttcaagccttaagttaaagacaaatgaagttatggagaagttcctgcctgctgtacatcacaaagccataatagttgaacttccacgatacgaaaatatttaagtatattgtactttattgtaactttaaagtgcttagcattatctactccccaccgaatagattaacactaagcacttattttcataccattgctaaatatacttataatatataattaatatcaaatcatacaacagtaattcacaatcctatatgagctataacttgaatatactatattattgctatgtaatattactgtatctgtccatctgaaatggtaattatcctgtctgcataatcagccatctgcctgtcatgtgttaccattattattgtctgctcgtatttctgacttgattttgataacatctttgcaactgtttctgcacttcccgcatcaagatttcctgtaggttcgtcagcaaatataacagccggacttgttataagtgctctggcaattgccactctctgctgttctccacctgacatttctgatggatatttattcttacaatggcttatctctaattctgataaaatctcatcaacctttgcatcatctggctttttcccatcaaggagaattggcataactatattttcatatgatgtgaattctggaaacaggctgtaatcctgatatataaagcctatatttcttcttctgaaacctgacagcttcttgtccttcatatgtgttatgtcctcgccttttattaatatactgcctgtatctggtgtatccatacttccaagtattcttaataatgtagattttcccgaaccactctttcctataatagctgtaaattcacctttcccgaattcaagggagcactgctttaatgcaggaacatctacacttcctgtatgatatgtcctggatatttctttagcctgtaatatagcctccatacttatcctccatttctatatctctaattcgacacataattaatttaacaatctctctatactgcttactttgttcagtaacatttattattaagccgcttacattacttaacaataactattaattatcaagccacttacattgcttaattataactataattttcttatattacttgaatatatcagcacttccaatataagcataagtggaagtgttactatgcaccacaatgattccctgattgcttcacgcatacatattccaagtaacttccctcttgtcatccccatttttctaaaaagaatgaacttgccgcgtctgctttctatcctgtttcttataattattgccattataagaagctggataattattaccgccattatagttattccatattgcagtatgttattaacaagctgcgttctgtatacattcttgctgtcaacatttgacttataagtaatattattgctcttaaggtaaagtgcgactttgttgttagtagcagaaaatgttgatgaaaggtcgtaatctatctttatctgattatactgtaatttaaaatctattccgtctgtcagttcttctcccgtaattcttagcataaggtctttctggttatctacctcctgcttagcaagttccgtgcttgcaagtgctgtgtaataaccataatctggcattataccattaaagtcttccttaacctcatctgtaactttaataactgctgccaccttaggtgctacacaggcaccaaacattgtttccacctctaaatcagtctgtgtgaaactatatgttgtacttgctgtatcagggttatcctcatcttttagttctacctgtaaatcaatttttccactattattatatttattgaaaaatggaatatcatatggatatactgcattgcttgatgtaatataccctgctttattacactgtccaaatggaacattataataattataatataatgtatcaccagcttttaatgtatcatcataatcaccctcacagttatcctgtataaatactataacctgctttccacttgcaaagtcatcataattaatattggatttatcaatatatttgcttgctatatcatatatttcctttgttggatttacatattctgttgcaaatacataccggcttccataagtcggatctttcatagttttagctatagatgaagccttctgtgcagctataatcttgtcaattcccatcttatgatagtcctggttatcccagtaccacgttctttctgactcaaatatagaataatcaattgaaactatacccggtatttcatttaaaccatctataacatcagatgatacaccttctataagactattattaccatctttagccaaaggtgaattcattattgcacagttagactttataattctatctggcgaatgatatggtatagatgtaaataatgctgtcataccattatctaatatcaactggcgtaattcatcatacggaatattatatctgttcctgctgttgtattctttattgataagatcatcctgtgtaaattcgtccatatttaacgacttgtccggatagttatcaaaatctttaaggtaagatatatatatcatatcagttctataattagatgatggtacatccagatacccatatatatcaggaagtgaattatttttcttatatttatcaaatgatgtagttatcttcaaaacactgaatacaagtacaacacagataaacagtgaaaataaccttacacctattatcattcctacaccatcacgtttcataagcctgcttgtaattacacggcttacattagataccttaagcttggattttctgcctgatgtattcttattacgaacctcaatatttactatctgctttttgcttcctgccttaagacacttctctttaactgtatccgtaacattagataacagtcctactatctcctcaactacaactgctattacaacagaagcaatactttttaacacaatagaagcattaattgtataaaatgaaaatcctgcctttctttcaagtatgcctcctacaactcctccagccaaaaatgctgtaattattcctatcaatgctgctggaactattatcaaagcattttcaataatatacattcttctaagctgtgaactgtctgcacctaaggaagcatatttcttataagatgcctttcttgtattcttatactcaataagctggtaagaaagtgctgttattcctattgccataactattaaatacatataaatatatatgcttgttgaaccccaaggcttataatcatatacacctgaattgtatgtataactctttgatgtcttctcctttatagagttaaacactgctttatagtcatcagtcttaattgaagactttataggatataagaacaccgaacgtgtatcataattaaattgtgataattcactgtccactacaactgctgatggtatctgctttccattattccatatattagtataatttctgtatataccaacaagtgtataagtcttttcgtttcttttctctttattacctatgctgttattgtcataatatttaagattaatactctcaccaatctcacctttataaccgagtgtcagaagtgtgttccagtccattgctatctcatcactattttctggatgtcttccctcatcaagctttatatgtgactgtacaagaaactctgatgaaaagcttcctacataaaaacctgtactctgccagtcatcgttaagaacattaacgcttcttgacacctttaccggctgttcaatataaatgtggtctgtaagattactatccggctgcctgcttcctatatccatgataaaccagtcgccaaatctgtctttattggactgcatctgccactgatacatattttcctgaaatataagaactgctgttacaaaaaatactgcaaataatgttgtaagtgccgctcttataatctgcctgtatcttctttttacgcttttaaatgttatttttagaatattcacgtcattactctgatattaatatcagccactcctttcttttatgttataactagaataccctgtgaatcttacagcaatcttacaatcgttattatattggtatagttactattttgctttccttttcatattatatttaggtataattatcctgaaacttactcccctgccgtcttcattattatttacgcttacgcttccgtgatgtgcctcaattataagctttgaaagattaagtcctattcctgtatgaagggaattatagctttttccactctcgaacctgttaaatatattgtcaagcttattctttgctattcctttgccatcatcttttattgttataatacacttatcagcattgcatacggcatttatatccacattttcagcttcttcactgcaattctgtacaatattaataaatgcttccaacagccactcctcatctgcattaataaaataatcttcatcatcacaatatgaagttatattacaattattaacaacaggcacttctgatatgacttcattaataaattcattaacattaatatcatcttctgttaatacaatcttccctgactccattctgcttaatttcaacagccttgtgataaaatcccttatcctgtaagtctgcctgaaacattcaccaagattactaataagcttttcattactggatagtcctgtatctgtcagagctttcccagaaaccacttctgactgtgcatccgatatataagaattaagctgtacatctgtcttccttgcattaagctgttcctccatcatatcaagcgacaggcttagtgccgtaagcggtgtctttatctgatgtgctatattttccgtaaaatcctgtaactgtctgttacgcttctccatatatgttctgtaagtgtctagttcttttgatatattctcattatcttcctttaatttattcatatatgagtacacatcattatgtccgatttttacaatattatatattgcaaaggcaagcagtataaccataattccaataattacagcaaatggaatatattccccaccatataagaacatataccacgcaccatttcttgtataacctgcctcctgcaatatagccgaataatctgctgtaactgtgttgccttgtcttccataaaataatatgtacagaagctgtttgcctgcctctttattagccccatacagggttgtcgccatatatcttaccctgtattcataatatattgtgataactgatactaccaacacagttgcaagaaccatacctattgtatacacatataatctcttttttaacgctctctccatctgtatccaactcctcttatagtatctatataattcttgtccgaattatccattttcccaagcttggtctttaacctgctcactgttactgtcaaagtattatcctcaacaaatgttcccatcctgtcccataatttctgaaaaaatacttctcttctcacaataaggccgcggttacatacaagtatctctaataatgcaaattctgtaggtgataactgtatatccttcgcagctttctttattgtaagattatcaaaattaataacaagcgaacctaatgtatatatattagaattgcttttatctatattggaaatacttttatcaagcatagcctgtcttcttaaattggcacttattcttgataaaagttcagataccctgaaaggcttcgttatataatcatcaccgcctatatcaagcccttttgttatgctgtcctcatcatcacacgaagttaagaatataaccggtgtcacacagccttcactgcgaagcttttcgcatacactaaatccatctccgtctggtaaatacacatctaaaaggtataagtctgtattttccctatcaattttattaaatccactgatatcagcactttctataacctcataccccttatcacgcagaagctgtgataactgtcctcttataacttcatcatcttctaatatatttattactgccattattccttaacctttccagtaatgttttctttgtatcttatcaagattatttataaaatgctgtttgtataacagaaaatcttctatatccattaacacatgatattgttcctctggattattaaattctgttatgttatcagccagatacaataaatactctgcaactattttagcatttttcggcatagttcgcatctttttcatttcataatgaagattatatgcttcttttatgcaatcctgtatatcctcttccaatgtttttatattgtcccatacatttatctccatttttttccaacaagaacaatccccagttcgttccataccgccatatcatttaagtaaaatttataacttttaaccaattttagacaaaaccaccaaatatatgctataatatttaataaattaattataattttatatatacttaacaaatgtgttctgtatacactataaataaatattaccttatatgaactatatgagcttattaatacatttaacaggagtaaaattctatgaaaatcgtatagttacaatgaacacggaacaattcgtagctgactgtaaaaaatatctataagaataactataatcattaaataaataataaaagaaatgagggtaactatgatgacaactataagaaaagctacggtcaatgataaaacacgcattatggaaatctacgcttacgcaagacaatttatggctgaacacggcaatcctgaccaatggaataataacaatccttctgaggaaactatcgacaatgatatttccaaccatcaaatgtatgtaattgaatcaggcggcggcattcacgcagtattttatttccatattggtgatgattctacatatcatataattgacaacggacaatggctctctgatgaaccttacggcacaatccacagaattgctggtgacggaactattcacggtatacttgaaatcgctgttaattactgtaaggaacagataccccacttaagaatagatactcatcacgacaataaaatcatgcaacacgttatagagaaaaatggctttaaaaaatgtggaattatatatgttaaagacggttctgaaagaatcgcttatgaattaatataatcaaacagaaaataatagaaataataaaaataagaaatcccccacctgtaagttttttaccggcgggggataacaaatctatccagttacagctatacaatatccactatctgtgcctattttgtgctaagactttctactgtttccttaataatctcatatgccttatcacaatcctcctctgatactataagaggtggaaccatacggataatatgtgctccgattgctgtaataagaagatgtctgtcaaagcagccatgctttacatctactccaccgatagtatcgtcaaactcaacaccaactaataagccctgatgtctgacctccttaacgtgaggtaatgtttctaacttagcactgaaataatctcccatcttctttgcattaccagctaaatccctgtcaagaagttcattaatctctgcaagagctgctgcacatgaaaccggatgaccaccaaaggttgttccatgtgaacccggagtaaatgcttttgcaacctcagccgttgcacatatagctccgataggcataccaccaccaagtgctttagccatagatacgatatctggcttaataccataattcatataagacattacagcaccagttctacaccagcctgtctgaacctcatcaataagaagtaacatctcatgctcatcacagaactttcttaaacctgtcatgaattccatagtagcaggatgcacaccaccttcgccctgtactggttcaatcataatagcaattgtgttctctgtgcaggcatcctcgaatgccttaagatcattatatggtgcatatgagaaaccatatgccataggaccaaagccaacctgacatccattacctggctgaccagttgcagacatagcaccaaaggttcttccatggaagccatcctttgctgttacaatatgatatctgtttggtccatacttttcaataccatactttcgagccatcttaatcatagcttcgttagcctctgtacctgaattctgataaaatatcttatccattccaatagtttcacatactttctcagcaagcaatgcctgagggattgtatatggatagttaaatgtatgcattatatctgaaacctgatccttaacagcagcaacaaccttctcattacagctgcctgcgctatttaccgcaatacctgcatagaaatcaagatatggtgttttattttcatcatatatatacatatccttagctgtttcagcaacaaaatcaaatctttcatatgtatcaatcatatacttgcttactttgtccttaatatcctgtgctgttaatcctatatcctttaatttcataattgactcctttctgcgtaccctttggtacgtatccaaaaattgttttttctcacatctgtcaataaatgtgttaataaatagttggttacttaagcagtgtcaacaaatgcattcttataataacgaaaataaaaaaggcaaaggcgaacaacttgttagttgtaatggcgcctttgccttaattaattcgttctatttatttgacattgatacattaacatataatatattggatgtcaacactgtatttaaaaaaaagcagaaattggatttttttcaccacaaaaaaggtttttgcagatattttttacaatattcagttaatcatctgttaaaactgtatttttatgcatatttttaattatttatcgttctatttttttatattaattttatttaatctatattttcatcttttattgcaatcgtttgtgcattatattgaacataatatgcatttaatgataatccataaatacacatagaagctctaacctctcatctgtttcgtttctatatgtatgaaccttatctgtttcaaaccgatacacctgtccacactctactatctgtatatcattattgcactcaattgtaagctgtccattaaatacgcttatatattccctggttttctctccatgagcaccacttacatattcattaccagcttcaatatttatcctgtatatctcaaaaagatgattatcttcatatggaaaacaagtccacactgtatactttccttcagactctttagtcgggatcatatccttgatatcaacaagacaagactccataggtggtgtatctataagctcatgaaattctattcttagtccacttgcaatctttccaagtgtacctaacgatggattggcagcatctttttctatctgtgcaagcatgcttttgcttactcctgtctgttctgacacagcatccagactcattcccttagatgtccttattctattaagattaactgctacattgtgagataagtaatccatataacatctccctgtacgcttttagttttttcataggtcatttgacactatctgattagatttattattcaacatgtatgtcctgtatatcctctaaagtattgcctcaagtgcttctataactgtctttaatgccttaattctggcatactttttatcattggattccaatatatgccaaggggcataagctgtattagtctttaaaagcatctcattaacagcctcctcgtagctgtcccacttttctctgtttcgccagtcttcttctgttatcttccagcgtttttcaggagtattctccctgtccttaaatctttcaagctgtgtatctttatcaatctgtacccagaattttattataactgcaccccagtctgaaagctccttctcaaactcattaatctctacatatgctctctgccagtcatttacactacagaagccctcaagtctttcaaccataactcttccataccaggttctgtcaaatattgctatatgtcctgtctttggcagcctgttccagaaccgccatagataatgccttgctttctcgtgtggctcaggacttgctataggatgcacttcatatcctcttggatcaagcgcctctgctatccttcttatattgcctccctttccagcggcatcccagccctcataagctatgataacaggaatcttctttttatataattcattatgaagttctccaagttttttctgatacatgcccagaagtctttcatattcttcgtccgaaaggctcttatcaagattaacctctgaaagcttatggataggcttaagtggaaatgcattctgcagcaatggaactgacaatgcactattggcaaatgctgtatctataccctgaacgattgtttcaagcacctgcagctgtgcccattttttatcctttgcattaaccagataccatggtgcacttgaatggttagtatcacaaagatactgatcataaacaatctgacattcatcatagtgcttattctgccatttatcgtgctcacttacacgccactttgtattcttatcttccttaagcttattaagccgctttttttgttcttttttatctatatcaaagaaaaacttaagaagcagatatccattatctgttaattgccgttcaaatcttttaatgctttctaccctcttattatactgttcgtctgataattctcctcttaacttctgtcttgtaacctctgacatccatccactatccataaaaacgaactttccagtctctggaatttttataaaatgtctatataaaaatggttttcttttctcttcatctgtaggttcatccatgactgcaaccttaaaaaatcttggatcaatattttttattacttttcctaaaacacttccttttccagctgcaccccatccttcaaacaaaacaataaccggaagctttttttctttcatcatgatctgctgtttaacaagcttatctcttgctgctttaagtctgttttcaatctcttcatctgatggcaattccattttattccaatcctttaacatattaataatctcctttccataatcatgacaattctattattattttataatgcgtaaataaagtattactataaaacacgtatatttactagtatatttatgatatactgtatctatatctttttatttacagctattatacactataattataataaacaccactttttgtatattattttatattgcattttttatttcattatttttaattttattattttttatttcatattatttttaatacaatacagattcattagtgtacaaaaaaagactgtcagataactaacagtctttttcttacgtatattatttattgttctgctgtctgcaccactggattgtctctacaatacccttttcaaatgtatattgcggttcaaatccagtatcagcctttaaatcttctatatctgcacacagatacataacctgattaggactataaggtatatccccgaatcctatttggattgtactatctatgctttctcccattatattaatatattccttaagcggtcttgcctgtccacttcctatacaatatatttttccatctatacccttctcaccaagcagtctcatagccagtgctgcatcttttgaatacagaaaatcccacatctgctcacccttcgtacatgaaggaacttctcctttaagaagtctgtctatcgtactcattaccattgttttttcgccatcatatggtccatatatactgagtattctcgtccagatatgcttaattcctttctgctggcacattatacgtgtcatctgacctgcgcataatttagctattccatatccattttctggaaatgttggggtacttccattaagttttccctcaaatcttccatattctgcctgtgagcctgctcctacgaatgttttacatcctagctttgaggcagcttctacagcatcaagtgcatatttaacatttaggttctgtcctttcatgttgttacggctgtctccgaatgttccatcccatccaaaatgataaaatacatctgctccatccggtattaattctggcaatttatcaagattagaaagatcacacttaacacattttactaaagaactttcttttattctgtcagctcttttagaaccaggtcttacaacagcaacaacttcaataccattagcttcaagttcattaatcaaagcaatacctatagaacctgttggccctgttattacagctcttttcatataaattgtacccatacctttcaaatatatcttattttactactttttaccaaaagcccatatcttatttaagaaaaagttaattgggatgttgattataagattaataatcggtgcaatcattttgcttacatgtaatactgaaacccatataactgataaaacattatttaatatcaatcctgtaaaaccatatgacacatatgttttaaataatgctgcccatatatttctatgttcgccttcttctttcttaaacacaaacttattattccaataaaatgaccaaagaacactaagtacccatgaaactacattggctataatataatcaaatgtcactccacttttagaaacaagaacaagcgttacaacataaagtaaatatgatactattgtattagatacacctactaatccaaactgtagaaattctttaaatgtctgtctggttttatctgttaaatcctttcttataatcttaaaaagcaattcaacaaaaaacatgtatattttttctataaatccgtatatcatttttcccatatcaatatatacccttatatcattataatccagacattaaatatactgtctggattataatattatttatttttaatatataacagactactgattaacagcttcctttatagtcttagccatataatctatcatctcatctgtcattcctggatatacacctacccagaatgtatctctcataattctgtctgtgttgtcaagagttcctactactctgtagccttcctttgttgctctcatctcatcaaagcatggatgctttataagatttccagcaaaaaggtttcttgtctgtactccgtggttttcgatatactctacaactgcctttctgtctatgccttcctttactgtaataaggaaaccaaaccagcttggtcttgagttatcacatggtactggaagtattaccttatcttcgatatctgcaagcgctgctcttaatctgtcaaagttatgtcttcttctttcaacgaatgaagggaacttctcaagctgtgcacagcctactgctgtctgcatatctgttgccttaaggttatatccaaagtgtgaatatacatacttatggtcatatcctaatggaagttctccatactgcttatcgaatctgtgtccgcagaggttatcctttcctgatgggcatacgcagtcacgtccccagtctctgaatgaacggatacacttgttaaggagtgcattgtttgtgtatacagcaccaccttcacccattgtcatatgatgtggtggatagaagctgcttgttccgatatcaccgattgtacctgtgaacttttcttcaccattgattgtatacttagaaccgagtgcatcacagttgtcttctactaaccagagattatgcttatcacagaattcctttactgctgataagtcaaaaggattaccaagtgtatgtgctatcatgactgcctttgtcttatctgagtaagcttcttcaagctttgttacatcgatgttatactgtggaatagtaacatctacgaatactggaacagcaccatactggatagctggtgttactgttgttgggaagcctgctgctactgttattatctcatcgcctctctttattcttctgtcaccaagaagtggtgatgtaagtgccataaatgcgttgaggttggctgatgaacctgagtttaccactgatacatactttacattaagatattcgccaagcttcttttcaaactcatctgtataacgtcctgatgtaagccagaactcaagtgctgagtctacaagattcatcatttccttgctgtcatatacgcggcttgcataaggaattctgtccccttccttatactttttctggttatgatacttcttacagtattcatcaacaatcccaagaatttcttctcttgcttctaattcgttcttgttttcaaacatacttttctccattctatatttgttatattccaaaatttttatatttccgcatttttatttctaagataatatattgatgtcggggtcgaaagaaagctaataatatatctttttagcttaatcattaaagaattcatcaatttccttatcaagacatgcaacaacgtctccaccagatgcatatacctttgaccattctactgacttttcaatagccatatcaaagttccatcttggcttccagccaaatgtcgtctttaacttagaacagtcaagctttaagaagttagcctcgtgtggacctccgtcatacttgtttatccacttaagtccttctccccacttgttacagaatgtatcaacaagtgttcctgttgttatacagtcactctcatccggacctacgttataaaagcctgcatacttcttatcttcgtactgcttcatggctatcataagataagctgcaagtggttctaagacatgctggtatggtcttgttgaatgtggattacggacaactatatcctctttctttacagcagcccttacacagtccggaactattctgtcattggcaaaatctcctccgcctataacattgcctgctcttgctgttgatactgcaacatccatatcattaaaaaatgaattgatatagctgtgtgttacaagttctgaacatgacttgctgttagaatatgggtcatatccgtcaagaggctcattttccctgtagccccatgcccattcgttattgtggtataccttatctgttgtcacgttaaggaatgactttacacatgggttaagccttacacattcacatatattcactgtacccatgacattagtctcatatgtgtatacagggtctttataagaatcccttacgattggctgtgctgccaggtgaagcactatctctggctgtgtttcttcaaacaccttttttaaatgttcaagatctcttatgtctcctattactgagtttatgttgttctctacatctgccatagagaaaagattaggtgttgtaggtggtacaagtgaatatcctgttacctgggcacctgcctttacaagtatcctgcagagccatgaacccttaaaacctgtatgtcctgttacaaggactttctttcctttataaaagcttaaatccatctttgtatataacctttctgcttatcaactatcttaaaacatataaatattcatcttatataattctatataatctgtcacctgtgaatttaccacttcttccaaggagctgttcctgtggcaagatacttctcaagcatatccatctctcttttgttatccatgcactgccagaagcccttgtgcatgtatgacataagctgtccttcttttgcaagcttttcaagtggttccttctcaaagactgtatcatcaccttcaatatagtcaaatatttctggatttaacaccatatatccggcattgattggagctccatccatgtggctcttctctctgaatgacttaactgcattgtcaccaccgatatcaagcacgcccttctgctgctctaacataactgctgtaagtgtagcaatcttgccatggttcttatggaaatctacaagctttgatatatcaacatcacatactccatctccataagtcataaggaatggttcatctcctacatacttctggactctcttgattcttccacctgtcatagtgttaagtcctgtatcaactacagtaaccttccatggctcacagtgctgctcatgaataatcatatcgttagttcccttagtgaaatcaaatgtgatatcactgttatgaaggaaataatctgcaaaccattcttttattacatactgcttgtaacctgcacatatgataaattcatcaaaaccatagtatgcatactccttcataatatgccataaaataggctttccacctatctcaatcattggctttggcttaaactggctttcctcacttattcttgttccgaagccaccggctaaaagtactactttcattcttctcctccagtctattcatatatttaatatctctttggcactttattaatcaacacttctccaatattcaagtgtttctttaagagtctgttttaatgaaatgaccggctgccaaccaacttctttcctaatcttatctatatcaggctctataatcggaacatcaacaggacgaagctttttttcatcaattttaacttcaatatctctgtctgacattgctataatctcgtcaagtatctgtctgatttcaatggcatgtcctgttccaacattgtatgtttctccgcgtctgccatttttaacaagaagtgcataagcctttacaacatcccttacatctgtgaaatcacgttttgcacttaaatttccaacatatattactggttcctgttttcctttttctatatctgcaacctgcttacagaaatcagcaaccacaaacataggtgtctggtttggtccaatatgattaaatgcccttaccatcataacatcaagtccatatgcatctgaatatatctttcctaacatattctgacatgactttgttgctgcatatatatttccaggtcttaacacattatcttctatgataggacattcatctttctttatatgtccatattcctcacctgaacctataagaagcactcttggctttttatctgcatcctttaccgcttctaataaattcacacaaccctttatgtttacatctactgtcagtgtaggattcttccatgaataagcaaccgaagactgggctgcaagatggaataaataatctggtttttcctcactaagaagctctgatatctgattcttatccagaatatccagattccttacaactgctgaatctattgtaagagtttctttctccgtcttggtaactgtcacatcatatccaagatctttagttaagtgtcttacgagatatggtccgacaaatccacccccgccaactactaatgccttcattaactacctctcttctgctacatcaaatattgtcaggacagattaatcattctctgccctgactataaacatcattatatttattaattattagcagcttctttcttaacaagttcaagatcattcttaaccattctttcaactaattcctggaatgatatttctctcttccatccaagctttgactctgccttagctggattaccaataagaagttcaacttctgctggtctgaagaagtctggattaaccttaagtacaaccttgcctgttgccttatcctttgctatctcattaacgccttcaccctcaaactcaacttcgattcctgctgctgcaaatgctgtcttagcgaattctcttactgttcttgtctcattagtagcaattacataatcatctggctcatcctgctgtaaaagtaaccacatagccctaacataatcctttgagtgaccccagtctctctttgcatcaagattaccaagttctacacaatcctgaagtcctaacttaatacgtgctacagcattagtaatctttcttgtaacgaactcttttcctcttctttctgattcatggttgaaaaggattcctgaacaagcatacatattgtagctttctctatagttctttgttatccaatgtccgtaaagcttagcaactccgtatgggcttcttggatagaaaggtgtatcctctgtctgaggtatagcctgcaccttaccgaacatctctgatgttgatgcctggtagaatctacactctggctttacgattcttatagcttcaagcatgttagtaacaccaatagcatcaatatcagctgttgtacatggtgtatcccatgatgttgcaacaaatgattgtgctgcaagattatatacttcatctgcctgtgatatcttcattgctgatataagtgatactatatcctgcatatctgcgtagataaagtgaatcttatccttgatatgatctacatttccataatctacaacactctttcttctcataagaccatatacattatagcccttttcaagaagaagctctgctaaatatgaaccatcctgtcctgttatacctgtaattaatgcgtttttcataattaatctccatttctataaataaaaatatacgctttaaactcgcacaaaacaccttaccacaaaatcatattacctgtgtctggcatattgcaagtattttcacgaaagctaaattaacttttatagtttccacacttaaatcattatatatttaccaaattataaatactgattctttccctcttctttaagcttagcaagtactttctttatctcacctgcgttctccttagtagaaatgagtgtagcatccttagtatcaacaactatcatgtctcttaatcctacagttgcgataagcttgtctgcaccttcaataacacagttctgtgtattgactgtaacaacattgccattcacaacattaccttctgaatcattttctttgattcttcctactgcaagccatgagccaacatcatcccagccaaaattaccagcaagcgtgtatatatcagaagccttctccatgataccatagtcaactgactgtgattcaagattagggaattccttttcaagagtattctgataatctgctgtaccaactgatgctttgatctttaataatccttcatatgttgaagtcatatacttcttaaagcatgaaagtatagtcgataccttccatacaaacatacctgagttccaaagataagaaccatctgcaagatatgccttagctgtatcaagatctggcttttctacgaacttctctactgaaaaactctcaccctctttattatccttgttatactttatataaccataacctgtttccgggtaattaggtgtaataccaacagttacaaggttctcacccttctctgctatatcacatgcattaacaaatgtatccttaaatatatcattgtgctttataagatggtctgatggaagaactatcataaccgcatcatcatacttgcttgccacatgaactgcaccaagtcctatacatggagctgtatttcttccaataggctcacataaaatattctcctctggaagacctggaagctgctgctttacaagctccttataattagcattagttgcaatatatacgtccttaatatcaactaacggactgattctctcaaccgtaagctgaatcattgtctttccatcatctgttaatgataaaaactgcttaggaaggttaactctgcttcttggccagaatctttccccttttccacctgccattattaacgctgttttcttcatgatatacctcgtttcttatataaataaatatattaattgccatttctgcgcacattttgtgcatatcgagtttgtataaaatatatgtagacttcacacatatacgctggaaaattatatctcatactgctcattttgtcaattaaactggctcaaacggtattataaacaacacaaaattataaaagctgtaattcattttacacataaactacagcttttataattaacaaatattttttaattattcaaaagataatcagagtatatttctgccattttgcgccaattaattaaagcttctcctatattggcaccacacagctcgcgataaattgcccatacaaaccaataatatgctattattgcaacataggccatgtaatgaaatcttgttttctcactatattcttcctgaagatactcttttataaattcttctgccttatcaaaatcatacattgcatctacaatataataacctacatcaattccaggatctgaatatccaccatactcccagtcaataagtataacacttccatctggttttatcatccaattaggtttatatgtatcaccatgacaaaagcatttatctactccatcaccaagtgtcatattataaagcttttctatctttaattttaactgttcatattctttaaagcaatcggaatcttttttcttaatcaaagcttccatctcaagagcatcttcccatggtttcataccataatcaactttaatatctgccttatgcaattttcttaacaccgaaagtatctttttagaatcttcaaaagaattatagtctggttcacgaaattctggtataaatacagaaattttccatccttcattcacatctgcatatatatatgttggatcaattcctatttttttagctagaataagtgattttttttcattttttctattaattatactttctgttccatcacctggatgcctgtatatataatccactccatcaatcttgaatatgaaagatatattagtcataccttcacttacatttctaaagtcaactatatcttcttcatcgcatctgaatacaagcttaatatttcttattatttcactatgtgtataacctaaatattgcgaatcaaactttcttaactcttcaaaataatcaaattcaaatatatttccttttttatactctctcacatacattgatggtaaatcagaaagcttatcttttaaaaggatttcccaataagaattattatattttccatcatctctgatatcttccattacattaataaatgaatcagaaaactcttttttccaaaatgagtgtcccataagaatataaccattatctattggtttattatccatgcagactattttaccatctgagtcgacatcagcatatatctcttcagtaataagatttccacgataacctgagtaatatgtaatatactcatattgattaaatggattctctatatagtaactgtcacttacacatatgtatgtattctttaattcttcttttgcaagatacaggctttctatattattcttaatattaaatgaatcattaataataagtttaacgccatacttatcctcgagatagaaaaacatttccttcttatatccaagaactatcgtaatattcttaattcctgcattttgaagttgttctatctgtctttcaataagcttttctccccttacttcaaacaaacctttcggctgttccagtgataaaggaataaatcttgttgatgaacctgctgcaagaataactgcattattaaccttatatggctctaaagctttaatacctaattcagtaagacatccactctctttatcaatatatcctgcatgaactaatctgttatatgctctggtatcagataaggctctgacacaatctaatgcatacgaacaatccgcacggcctatacttccgttatataaactgttcaatatataaaattcattctttttcacagtgaatacctccaatgtaattcaacttttattcctgtcccggataatctttatatgaaagatccagctgcacaagttcatagaaattatctatttccattatatctgacttctcacatggtcttacttcaacattatatctttctttgcgtaataccaatggtataaattcccagaaataatccttaccatcttgttcctcttcatacacctgtttaaaatcatttcgtaattttttactatcatctttattccaatatgatataccataataattaaaacaaaacgtattgccttttttgtaatcagttatataaccgttatcaagtttataactccaatcatctgtttctattgagaatgatccaagaatgttactgctatactgatacttactaattatatccggattagatatatataagtctgcctcacataaataacattcatcaatatgctcaagagcagccatagctgatgatatattgtttgttttatcatacacatcattatcaacaaacttaataaaaggatatttatcagtaatttcatcaaatttttctttcttgtatcctcttaccagagttatatcttttattccgactgatactaatgcatctaaaagtgtatctattattctcacaccattgactttaaccattggctttggcctgtccagtgttaccggaaccattcttgaaccaaaaccagcagccattataaccgccctttttactctatatggctcaagcatatcaagacctttatctgtaatttctaataggttttcatttcttaatattgcacctatattggtcaactcatcaagtgccttactaacctcagtacctgatatttttaatttatctgaaagtgttctgattgcataaacattctttccatttttttcaagaaatgcaagaacttcaaactgataacgattcataataatcctcatttctgtacacactattttacatataacttatttaactatcataggtatgatatatatccccaatgctatacatgtaactataattgtacatactttccaaatattgtattgtttatccatcttcttttttgtttctccatctggttcttcaataataccgatttcttcttcaatagatggcatcttaaattcttttttatgtgaatataaataatagaatattatacatgcaaccgttattattccagatgtaagaagtgccattttgtctgcgaatataagcataaaaacatatagaactatagtaacgacacatccaacaaccccaagtggtgccttatatggtcttttcatatcaggatattttttcttaagacctatatatgataagcatccaatcatataacatatagccagtgaaataagcgaaacagaggctatatagtcaatagatcctgtagcaattaatatgaaattaattactcctactgcaattactgctatataaggtgtcttatactttggatgaatcttacccaggaatttaggcaatgctccatcctcggccatagtatatatatatctcgctggtgcagcaattcctggattaattgtagataaatcaccaccgaatgctattcctatacaaagcaaaattataggaaagcctattaatcctactgcctttaacccttccgcatatggtgcattagccactgcaagcacaccgtaaaactcttttggtacaagaccaactaaaaaccactggaataatgcattaagtgcaaataccataaatacagaaattttcaatgctcttggtaatgtatactgtggatatttagtctctgcacccattgaaacacatgtttcaaaaccagtataacaccaccatacaaggccaaatatatacatcatttcattaaaaggtggtaatgaattcatagcaattccaccaaaatattcgagatgtaccttaggaatcatatataaaaaccaacacactgaacatccccagaagaaaaacataaatgctgtctgtgcttttccagactgctcaatccccctgaaattcaacacaagaaatactgcaacaagaataatggcaataattcttgaatccaaccatactatatcaattccaagctgatcaagtaatattttaaaataattagcaaatgctaaggtttcaccagctcctatagcaactaccgatactatataatgccatccagcaagattagcccatattctgtttaatcctcttttagcataattataagttcctcccgcacatggaagcgctgctgacatttcaccatagataagacatggccatattgatattaataatgctataaatgtaaatgctataatccatgagcctacacttcctatctgtgctgaaccacacgtaaataatccaactccaactaccgttcctatagtcatactaattgcttcttttaaaccaagagccctgaccaatttgttatctcccattgtcttctccttttgctcattaatatatacaatatccttattaaaaaattgttcacatattgtattgttcacatatcattttaacatcattattatatgtatagtattagtaaagtgaactgttaaagtatacatcatcttatataaaaagtaaatatttcttcatataattttaagcatttcttaacattcgtaacacatttttatgatttgattacataaatatctatatttgttattttacaaaatacaataataattaatcaaaaaggtccaaagtattacactctggactttttgattccacattataaaacatacaattacttatcttcagactttgtattaattataatatcatcgccttcaacttctttgtttttattttcatctataccaagcttatcactaacctttttctttgcctttctccaataaatacctgcaacagcacctattgcaattacaacacctgcaatcgcctgaatggcgtatgtcataactgatggatcgagatacccacttaccatatttgtaaacattatcattttgattttcctcctatattagatttattattactaattattttgtacattatatttttttatcatttcatcatactgatcgtatggcacaagaataaaagagcctatttcatcggcacgcttatctgccggtataataagtaatgaccataattgttccttcgcatatgcattatccttaaatacattctctgtgaggtcattaggtgctacatggaatctgaccatctgcttatctccaacttcaaacacattttcaccataagctgatgaatcttttaaagttgaggaagcgatagtattgtttacatttgtaaatgtaatctttgaatcacttacaaccatctcatcatgattagcatttctttccttaacaagaattgcaggattagaataaaggtcaattcctccatgatctgccgttattataatagtactgctgtcatatattccctttgctttaagctcatccatatattcctttataattttgaagatacctcttatctggctatctacacctatcgaatctgaaggaacagcctgtgcattttcgtccatgacatatggactatgagctccattaagatgatacattacaaaagtatccttatcgttttgggttgttatgcctttttccttaaaatcctgatagaattgtgcatcatcaagcttataaagattagaagtattatcttccaacgtaatatactgattaaattcaccagaatataaccagaaattctgtttcaaaaactgtggcatggcataaaatgaaacaaacttatatagacattccataaagcctcttcttgaagaaatgacatatttctgttccattttaagattatcaacactatttttatcgcaatagtcaaggtaataaaattcagtaaaaagtttaacattacaattactattctgcatatccgcaaacaaagaagaactttcatatgcatctttataatactcacttgtatcacgtgaggcatccatatctatttttcctgtaagtaatgttggaataccaagtactgtaggagcaccaccagcaactgcgtcatcaaaatatgtaaaatcttttaatgattccttatattcttcatttggaagaagcatgtcttcaaaccagcttgcgtcaagtgtatccacaacaaacataattgtattattttttgaagacaattcaaattcaccatttttagtaactgcaaaatcgttagatactaccttatgtgtagttaataataatacaacaagtgaaacaagctgcattgctgttacaaacagacttccccattttacaataagtgacataatattttcttttatagcataaacaacctgaggcactacaaaaaccaatatccaggcaattatgcttataatgccatttatcttatactctgaccaggcaatttccttaccattgagtgaattaaaggccggattaaggaaattaccctgaatataaaatcctaatgccaggctaaatacaagtaatacatatgaataaaataatcttttgattggtataattaatccaattatatatacaattaccaatacagcaactgaaacaagcgcaatcaatggaacaatctttatgtaatcaagtgcaaagtcatcaatattacttatgaataaggaacttggcatatatatagcaaatgtaaatataagaaatattgttggaggtaaaagcaaaagtattctttctacaaaaccatatttcttttttgacttttcagctgaattgttatcatctctcataaactcctcctcaataattatttggattctttattctttttatcgttaatttttcttacaacagcgttaataatataatctgcacctacctgtgcactgtttccaagattatatacatattcatgaacaaactcatcaattttttgcttataatcttctgtatgttttaatatctgatctaccacttctggaattctatccatctcatcaggtttcaatgaagcacctatgctgtctctcatccatatattaataggctctacacctatcttttcatattcaggattcattaccttcattggtgtatctataaacaatacaggcttacaagttgtatatgcatattcgtaacatattccagaccagtcagttatcatcatatctgcttcaaaaactgtactattagatgaaaaatctgtctgaatttctatatcattatcattagcgaagcggtctttaagctgttgcatacgttctggcatatgtcttacatgctgtggatgaggtcttactgttatcttataaccatgtcctttaagattatctaacaattcatccagacaactatcaactatattatctttctgccatgatggagcaataaggatagatttaacatcagaaaccttcttctccattttattgtaatcatctctcattgaatcaagcaggcaatatccccattcaacaagagttttttctggaagttcatatatcttttctgtttttttaatttcttccttttgatgcttacccgtacagaatacagtatcaaaatgatccatagaacctgttctcatagtcatattcagactatccattccatgtggtatgtatatatattcaatatcttttcttatatagcttctttttatatgataattctcaagatcaggcatagtcattacaacaacatctgcatcaagcttcatcatcagtgttataagtttcttttcacctatataatatgctttaatacggctattttcttctgccttcttaaagatagaatcatcaggatcacttgttatgtaatgtattactatgttggtattcttaagaatatattcaatcattccggcatagtatttgtaaaatccattattttcagaatagaatacaagatgcttattaacaactgagaaaaatctcttataatcagctttctccctctttgcatatggatttttttcaaagagcttcttcttgccagaatttccacctatgccttcaagtgctgcaagctctttcttactctcctcaaggtcttcataatcaacgtatttcttaggattaattgcccagttaagaagatataactgtacaatagcaaatatattacttgcaatccaatataaggctacacctgctggcacaaaccagccaagatataatgaaagaccaactgataaaatcatcatgccatatttgttaagtttagactgctctgcctgtaatacattactggcattctgtgcaacacataaaagccatgcagaaaatccagctattacaggtacaataatatctatcccacctacttctgatggaacccagctaagattaattcctaagaaattcatattcagagtcttaacctctgcaagaatcccagctatatcaacaccattaaactgtgactggagtgcaagaaactggctttcatatcttccattcttaatactttcaactacagcaagctgaatagacgatgattcaggatctacccctgtaagtgaaactattaatgaattaaatgcatctataacatctgatggcaaatgaagaagataatccaacggatgatatataactgccactaagccaagtaatagaataatctgtacagccaatggaataagtgatgccaatggattatatttttctttcttaaaaagctttgactgttcatcagctattgaatctttatccccaaaatgttttgcttttatcctgttaatatcaggctgcatcttaaccatcttaatggaatttttctgaacccatatagatactggcaaaagcacgaatttacttataagtgtaaaaagaataattgcaattccataattacttataatcttatagcaaaaggccattacatatcctaatgcacttgataacacattcatatttaactccttttttatatatttcacatttttttcacattcacaattgataatactaacataaattatataattagtaaagtattttaaagaaaacaagtataattatgtgtaaaaaattaatataatattaagactttttaagattttattgccagcattgaataaattatcttaagcttgtaattattcttacttattttacacaatataaaaacaccagaggatatttacccaatggcattaagttaagaaaatctcgcatcacccatagtgtggtgtgggatttttttatggaaaagtattgacatgtcaatcaaaaaatgcggccgctttagctactgatttatttatagatgcagctaaagcggcccttgtaattagaaatcatctttttgcaaggaggacaccgcatgaatagaaaagctcaagaattaaaaacattattacttagaatagtcaatactcagaaacaggatttaactggtcttgtttctaacccagatattgatttttcaaggaacagaaaaataccgtatgaaaaaatgattttgtcattactaacaatggaagggccaactttaacaaacgaattattaaggcagtttggatgtgatgcatcaactgcaacatcatctgcatttgtacagcaacgaaagaaaatacttccgcttgc

SEQ ID NO: 373 - DNA, 6516 bp, Unknown
  gut microbiota DNA sequence
cggcgaagcattaagagacatgttcttaatgcttacatcccacttattgtttaatatttaagcgggcaaaaaactactacagcttttttttaatagcctctcttttatcaacatcaatatcaagtatatccatagcttcatctgctgatttaccaagctttgtcatgatatttttaatggcatcgatagctgcggttatacgtccttcttcaagcccagcagcacgcccttcttcaagtccagcagtgcgggcttcttcacggagaatctccataacgccttcttcatcgtattcaaatatactcacatcaatcacctcttctctatgctttataaagaaatctgatagaatatcctctttgatacattcatctacagcttcgataactgatgtcctgacatccagaccggataaatccattttattacgtactttggtgacaaaagtcatataatctctgagtgacttgcagcggtttaatatgttatccgtgaataatccgtttatggctggtctgatattattatcaaaaaagttgtcatcagtagtgctatgtataatatcagttgcctcttcagcaggattaagattaataaccgtaacgattaactcaagctctggatgctttgtaggatgttcaaacatatctgacagtttaagaattttaatacgctctttcatacgttctcttccattatagaatgtaataaaatgtggagttggaatcttaagcatacttcttttatgaagcatattattaggaaatatattcctgtatacttctgagccatagtgtaagaaccttaatggcatattaaaattaagtgatgactgctgttcaaacatatataactcatagctgaatacaaatgaggcatcattcttatacttcatatacacgccaccttttagcgttgttatgctaagattatcagtgtctgtatgagatgagttattcagggcattgtataaatccagtaaattcttcttatctgaatataatagacaaaatacgttatcactatatcgtttggttgtagtagaggagctactatcatttttaataattatattgttatcagtgtttttgttgtaataattattatctttatcgttaattttcataagcaaaatctccttaaaatttcatttattcaataagtaaaattaacaacaggcaattctgctatgaaatcatatatattctaacatgtggtcaaatatataacaagtgagttgttacatcaggtacatcatatgataaaatgatcgtaatatagaatcatgccttgttgtgtatatatgggtataatctgataataaaatgctgtactgaatccagtgtgatacataagaaatgtgtaatatagaactttaatataagtatataatacacattcaagacttaattaagtatagctatactatacaatgcttgatttgcaatgtcaatagataataaataaaaatcttttatttattattaaatgatgatacaatatgaatatatttgtattggagatatagagtgttaaaagtttctagaatgagggaaaacacttgattaaaaagagaagaaggctgggaaaatgaattcggaaatataagcagtatatacattcctgcaaaagaattctatttaacagatacaattaagttatggtaggtttttgttaaaaccagcataaaaaatatacccaccagtgtttatgtatcaatatacatagttcactggtgggtattgtgcaaggcatgtatatgataggtgatagaaaataggagagaagtatgccgttagaaaaaggtggaagagcagataaacaggggaatagttatgagattaactgtgtgatatacgaactgcttaaagttcttgatgatgtgaattacagtgttgtgatagaagcactaggggaagatgaagtagggacagacatacttgtaacaaatatgtctggacacagggaacatcagcagtgcaagtcaagaaatgcaagtaaagaaagctggaatatgtcagacctaaaggcaagaggtatattagaagcatggagaaaacagcttaacagagataataagagaagagttgcgcttgtaagtccgttggcatgtacatttttatatgatatgcataaaagagctgccaatacaagtggcagagcagaggatttttataagatacagatagcaaaaagcagtacagagttcaacaaattttataaaagcttctgtgaggagatgggattaagaatagagcagaaaaatatagaagctgacaggaaagaaacagataaatgtcaggacgaatgtaatgaggataatattaattataaaaatgttcttaaaagtatagagtatttgaaaagaatatcatataaacaaatgtctgaatatcaacttaatgagtttataagcatgaatatacgttaccgctttagcagcgatgaaaacaaagtgtataatgccttggtttcctatgtcgttatgggggatatattagggcaggagcttacgcagcagaaaataacggattatcttaatgaacaggggataatattcagtcttagggatggagataagagaattgcaccaagaataaaggagctgaatgaagaatataaggaaaaatttatacctttaaaaagtggtttcgtgcatagagaagaagctgacgaatgtatacaggctatagaggctgataaacatataatcatatcaggaagtgccggctgtggtaagagtggctgtgcagaggcagttcttaaatactgtgaacaaaaaggaattgtacatattgctataaagcttgatgtaagaattcctaataagagctgtgaaaaatggggtcaggaactaggatttcagaattctatagttgaagcaatccataatatatcacagaatgaaaaagcagttattatacttgaccagttagatgcactccgatggacacaggctaattcagcggaagctgtaacagtgtgtatggaattaatcagacaggtgaagttctttaatgaaatacgtgataaaaagataacaatagtatttgtgtgcagaagttacgaccttgaaaatgataacaacataaagggattattcagaaagcagaataattcaggtacagaagcttcacaggatgatgaatggaaagtaataaaggtagattgttttaaagaagatactgtaaagaaagttgttggcagtgaatataataaaatgtctgccaggctgaaaaatctattgaaaatacctagtaatctgtatatatggcagcatctggataaagaaagctcatatgatggatgtctgacaacaagccatcttatagataaatggtttgagcagatatgcatgaagagcagattatgtggtatagcagagcaatccgcttctgaggcgaaaacagatattgtaaacagacttgataaaatgggacgtttatatgtgccaaaacagatacttaaaatagatgtagcaacacttgattatcttatatcgtcagaacttatagttgttcaggggaacaaagtcggtttcgtacatcagtcgatacttgattactttatatcacagaatatgctggaaaaatattatgacggggcatcaatagatgagattattggagagaaaagcaggcagactccgactaaaagatatcaggtacagatgtttttacagaacattttagagcttgacagtgcagaatttattgatgcaggcggaaatatgcttgcttcagataacataagatattatataaagtatcttttttatgaaatattaggacagataaataatccagatgataatataacaacatttattattgataactgcgacagcgaagagtatggaagttaccttatcagaaatacaatatatggcaggaaagactatgtaaatatattacttacaaatgaaattatggataaatggtataatattcctgataaaaaagagattgtttttaatctgctaatcagtatgagcatagaccttacagaggaggcagtggaatttatcagaaagcacgcatttataagtaaagaagatgatgcgatgtttatgaggtgcttccattatgatataacacaggaaagtgatgctgtgtttgaacttagaatgatgttttacaagcattatccggaatttgcaaaagatgtctatatagacataaaaaagatgatggatggctttgagaaaagaacagtaagacttatagccttctggttaaagagaaagataaatagtaagggaaaatcattgtatcattatgaagaagacctgataagttctgatggtgaatatattataaaaaatgcagattatattcttgatgagctgcttggatgtctttctaaggagaaaggaagatatatcaaatatggtgactggtcatataatcatgcatatatggggaatattgagagggtgagtgtggagttggtgaaaaaggcagcagttgcacttgctgataattcgctggacactttctggcagtactttgagccatatatgggaatgggatatgctgtatacaatgaaataatattaacaggacttgcacaccttccggttagatacagcgatagaattatagattatataacagaaagctttaatgataatgtatttgactatacgagcggcgcagataatgagctggaacttgttaaaaaagtgctgataaagcatacgtcggaatgtagtgatgaaacatttgccagacttgaaagcataatatattattatgtgtcaccagatgcactgcaaaagtataaaaacagaatagaatacaatcaggataaagaaatacgccctgtttactggagttattggggcgacctgcaatatgaattattaccttgtctgccagaagaaagaataagtaaaaagagcagagaattaatacaagttctttgcaggcggtttgatacagtaaaaacctgttatgtaaatgataatgaccattcaggctgggtaaaatctccggtagcaggtaaaaaaataagcgcaaaacaatggataagaataataactaatgagaaattaaaaaacagacaacattctaaatggatatctgttaaaggtggttttatagaaagttcatatgacacattcattcaagactttgaactggaagtaaagcaaaatcctgtagaaatgatagaacttgtattaagtcataaagaagacattccgcaggcatttgtagatgcattatttataggtgtcaatatgtcagagcagctttcggatgtagacagcagtattgttgaaagaatgctgcttgaatgtccatgtgatatggaaagccagagagcttcatatttctgtggaataattgagacattaagcagtgtaaggtggtcagaagaagtcctttgtgaactaaaaaatattgcagtaaatcatcacaaccctgacaatgataaaccatgtgttacaagtcaggatgacaaggagatgaaaagctgccatatgcttcagagtaatgcacttgactgtgtcagaggaagagcagtaagaacaataggaaaacttcttcaaaataataaatcattatacgaagaatttgcagatattattgataaggtagtaaatgatgctaatgccgcagtgcgttatgctgcattgtatgctttatggccggcatataatattgacagacagtgggcggaagaaagaatattatatatattggaaagtgatatccgaacattaagcttctatggaacaaaggatgtattattttatctttatcctaaatataaggaaagagttattgatataataagtaaggcttatgagtcagatgataaaaagctgactgatacagcgagctatatggtatgtgaattctatataagatatggtgaattcacagatattatgagcgcaccaacggataaaaacgaggagcaggtaaaagctatattagatatggcgataatgtatcttgaagttgataaataccgagaaactgccaagaagattatacttgattataggaacacagatataaatgttgaattcccactatcaaaaatgttctatgacaagtatatagatgtaaaacgtgacagacaattcctacatgaattcataaagaccaatcttagcagaagaatagtcgactcatttatgcattttctgacagaaagcgccgtatcgcttgtggattactcagacataataatagaattatgtgaaaatgttttatctatggataatgatgaactgcaaaaacagtgtggcttaacagcttcaatttccgagcttatcataacactatacgatgaaacctctaactccaacataacatcacaaaaaaagactgcccagaaatgtatggacatgtgggatgtaatgtttgaaagacaaatcgggtcagtgagaaggattagtgagaagatgatggagaggtgaggacgataaaaggcttgtatcaatatgcattataaaacttgataaattttaagcgaaggcggtagataattattttatctgcc

SEQ ID NO: 374 - DNA, 2845 bp, Unknown
  gut microbiota DNA sequence
cttttctcaatatcaatttttaatatatccatagccttatctacggatacatgatgactatccattatatttttgattgcgttcagggttgcttcattacgttcattttcaaaacatttttaagaccttccgtaagtgcttgagcacgagatttcttacgagcttctttacgtaaaatatctataatcactttcttatcatattcaaatatattcacattaatcctcttattcctatgctttataaagaatgacagaacatcctatttaataagaaaaactgttattggttttaattgtttagttactattggaatgaaaacgggaaataaatttgcattataaaataaaatgctctttttattttataaatgtggataaaaattacattgtgtaatttattaaaattgtatttttattaataataacaaagtaatgcttgaattatcatagatgatgatgtatatttgagtagctttgatatgagtatatcatatatgagaatgtattataacattaagaaaaataggtaaaagaattgcagattaataaagaagaatataagcaggagaaggcatctagagaaaatcgccttgatgaatttaatgagtgtgtcaagaaaaaaattagtgaattatctaggaatataataagtgaacttgttgaagagagagaaaaacaggggttatctcaaaaagaattagcagatatgatagggatacttccttataatttggcaaggtttgaaacgggagtaagaattcctacattgattatgttagaaaagtatgcatcagcagttgataagcatatagatattcagattaaggaaaataatgaatcgttatgtttgaaagaatagtttacataagataaatgaaagtataaacaatgagttaatgtagatttaatatattattgatagttaagtggattttatatattggagaaggataaataatgagagttttacatgtagcagaatgtataggtggtgtagatagatatttaagaagttttttaaagtattcatcttgtgagaatataatgattctttctcaattatataaaaaaagcgattatcaaaaattagctcagtatgttgaaacaatgcatatgaaacatggtataggattttctgctgtaaaagaagctattcaattaagaagtaaaataaaaaaatataatcctaatattgtatatgcacattcttcaatagcgggtgcaataactcgtatggcttgtattgggttgaatgtgaaagttgtatataatccgcatggatggtcttttaatatggaaagtacgaaaaagaatttttacataatgttagaaagaataatggcaaaattttgtgatgcaattatatgtatttctgaagcagaaaaaaaatcggcaataaaatatagaatttgcaaagaaaataaattatacgttgtttataatggtattgatattcaagaatataaaaaagaagaagtagtactaccaattcccaatgatgtatttgttgtggggatggtcggtcgtatttgtaaacaaaaagcaccagatatttttattagaatggcatacgaagttcaaaagaaaatatctaatgtttattttgttattgttggagatgtgatagaagaagcacaggaagaaaaaagaaaaatagaagatttagcaaaaggtcttggagttaaattgttgattacaggttgggttgaaaatccattagcttatatgagtagatttgatgttggttgtttattaagtcgctgggagggatttggattaacaattcccgaatacatgattacaggtattccgattgttgcaagttcagtagatgccataccatatttaataaatgatggagaagaaggattacttgtggaaaaagatgattggagttcagcagcagataaagttatagaattgttaaacgatacagaaaaaagagaaaaaattgttaaaaatgcagaaaaaacagtaagaaaaagatttgatgcaaaaagggtttcaaaagagtgtgaaaatatatttgaaacattggtgaatgtatgaagaaaataaaaatattacactttgtttctggacttatatctggtggtgtagaacaaatgttatataattattgtaaatttatggatcatgaaaaatatgaatttgttatagtatatcagcatgtaccggttttgacttgtatagaaaagatggagtcaattggatgtaaaacaatcagaattacagcacgaagcgaaaatcttattaaaaatattaaggatagtatcgatgtgatacaatcagaaaaaccggatatagttcatgctcatatgaacttaatgaatttctgtgctttatatgcggcaaaaaaatgtggagttaaagtaagaatttcacactcacatattgcagaaaaaaataaaggtattatgtttaatatgatggcaaatgtgtttaagcaaatgtgtattaaatatgcaacagcttattttgcatgtggagaagaagcaggattatacatgtatggaaagaaaaaaatggaagcaggagaagttacaataatacaaaatgctatagatttacaatattttagtaaaaataaagaacttaacgagcattttagacaaacaaataatttaaatggaaaatttatagtgggacatataggaagattttcacagcaaaaaaatcataataaattaatagatatatttaatgaaatattaaaaataaatgaaaatagtttccttttgctggtaggaactggcgaacttgaagatgaaataagaagaaaagttgcttcattaggaatatctaataatgttttattttacggaactactgataagatgaat

SEQ ID NO: 375 - DNA, 875 bp, Unknown
  gut microbiota DNA sequence
tatgaacattaagtataggttattgtgtaaaaggttaatagaggaaaggaagagagtaggtgtcattcaatattataatgtactgttcataatggagttagtgtcagataaagacatatggtctttagaacagtgggtgaatggtataaataacatatatatgaaagatatacataattggtgtagaatacattttgttaaatatcacactgtatttgtttacaggaaagagtatccggtaaaagcaaatatttggaatgggtattcatatataaggtggcggatggagcggatgatgaatttgggataagataaaatagtgattgcatgaaagagagccttaaagcagggtgttcttttgaaagtatggatagaataaaggctgaaggctctgcgctattcgtttggcagagcctgagtattctcctgatccgtagaaaataaatctaacttaccttctggagtggaactttgaccggattcatcttcagttgatggttctctttttttgggtgttttatgagtgtataatttctcaaaaggaagtgaatacttggattttttattgtattctagtaaaagagcttctgcgaatcctaatgaaccggcacgacgttctctggcagtacgactgatttctctgacagagacacgcccaactttttctttaaaggtgtcatctttcattgtttctccataagcattatccagacgggcaatagcattaagcatattggaactaaaggacataggagcaccttcccatgtggcaacacaaaggcgtaaaacacgatcaagagtgtgaaaaccatatttttcatagatattaattaaagtggatacagcacatatacctccggggcgagaggaagaag

SEQ ID NO: 376 - DNA, 360 bp, Unknown
  gut microbiota DNA sequence
tatactataattgcgcatactcatctcccattatttctgatttgaattctgtttgtggcagttttgtgatgatgttatccatggaaaatagagctatttttttatctgggtaaatattgccttctaaacgaaaaatgttaaatttctcccaagaaaggttaagttgggaaagtgaatatagtaattctcggctgtacaattcataactgttaccattgatgacaaaataatccttaactttatgtgccaatttatcctccgcacaactagcctttatacctatcattttttgatcaggattaacaagaagttgaatatattctgggttaccaatttgacggagtgtattgcggtggattc

SEQ ID NO: 377 - DNA, 201 bp, Unknown
  gut microbiota DNA sequence
ttatacctatcattttttgatcaggattaacaagaagttgaatatattctgggttaccaatttgacggagtgtattgcggtggattcgtatacgattcttcttaaagtcaatacatattagtggatgggaagagtgtttgttgttcataggatttttcctcactttctgctgttgatggttcttttgctttttctatggat

SEQ ID NO: 378 - DNA, 618 bp, Unknown
  gut microbiota DNA sequence
attaaagctagattgttataaacttattaaaaatattttagaagaaaaagattttgttccatttttacttaaagaaggtatgtaatgaagaaagaattgaattataattatgcatttttattttatgatgttggcgaaaaaagagtgcagaaagtatttaagatatgtaaaaaatatttatcacattatcaaaagtcagtattcagaggtgatatgacaccatcacgctttatatcactgagggcagaattaaaaaaggttataaatgaggatgaggattttatctgtattgtcaagcttaagaataacagtgtgtttggggaagaagtgttaggaaatggcggtgagctgacaggagaagatttaatcatataataattaaataaattaccagctggtttattagtgtagatattaacaaagcctgtaaatatgtgggttaaacaaataataaatataaatttaaataattattgagttggctggtaaaattcatgagaatgtactaatatagtgggtatagtggaattggctgtaaaatagatggcttaaaatcgttggttgaatagtaacattagatgtattgaaattaagtattgtaataactataattcctat

SEQ ID NO: 379 - DNA, 1681 bp, Unknown
  gut microbiota DNA sequence
gaagtgactgcagggaatgtttacatcaaagagctttctgcaccgaagggatataagctggatacgacagtacacagtctgaaggttgaagccggaaaaaaagccgtattaaatgtttccgatgttccgaaagtgacagagacactggtagacctgttcaagattgatatggagacaggaaaagcaactgcacagggtgatgctgcattggcaggagcagagtttacctggcattattatgacggactttatacaaaagacaatttaccagagaaagcaacacgtacctgggttacaaagacggtagctgaaaaagacagtaatggaaatattcattatgtgacaaaactggcagatgcttacaaagtatcaggagatacattttacacccagaatgaaaaaagcgtattgccacttggaacactgactgttgaagaaaccaaagcaccagacggatatttactggacggagcttatatgcaggcaggggacagtacagagcagatcaaaggaatgtatctgacacagatcacagaggacggagaacttgcagttctttccggaagcaaccagtattccgtatttgatcaggtaatccgaggtggtgtgaagattcagaaacgtgatatggagacaaaagacattaaggcacagggaagtgctacattaaaagatgcagcatttgcaattatttctctgaacgagaatccggttctggtagaaggaaaactgtacaagaaaaatgagacagttaagacgattcagacggggattgacggaattgcaacaacgacggcagatttacttccgtatggtaaatacaaactggaagaaaccaaagcaccagaaggttatctggctgacggggcaaaagcgattgaattttcgattacggaaaatggaaaaatcgtggatttaacagacgaaagccattccatttacaaccagattaaacgtggagatctggaaggcgtaaagattggagcaggtacacataagagacttgcaaatgttccttttaagattaccagtaaaacaaccggagagagccatattgtagtgacagataaaaatggtcagttttcaacagcttccgattgggcatctcataagagaaatacaaatgccgggaaatccagtgaggacggaatctggttcggaacttctgagccggacgacagcaaaggtgcattactttatgacacttatgagattgaggagttagcttgtgaatccaacaaaggtatgaagctgattccggcatttgaagttgttgtcagcagaaataaagtaacaatcgaccttggaacactgaccgatgagtatgaaaaagagattactattcatacaacagcaacggataaagaaacgggcgaaaaaataattgttgcaggaaagaaagtaacgattgtagatacggttactctggacggtctggaagaaggaagaaaatatcagttaaaaggctggcagatgctgaaagaggaaaatgcagaactgctcattgatggaaagtgtgtggagagtgattatacctttgttgctgacaatgaaaaaatgaaggtagaaatttcttatatgtttgatgcatcagaacttggcggacagaatctggttacatttgaagaattatacgatctgaagaatccggaagaacctgtaaaagttgcagagcataagg

SEQ ID NO: 380 - DNA, 700 bp, Unknown
  gut microbiota DNA sequence
ggtgcacgggtgtttcacacacccccgccgtcgcttctatcgcatcgttgaaaggatgcaaccatgctgctacccgattccaagaccgagctcgtccgccgtggcaacaaggtcgtttacgacctgggcgacaagatcgtcaaggtctttaacgagaccaagcctgtctccgacgtgttcaacgaggctttgaatcttgcccgcatcaatgagtgcggcatccgcagccccaaggctctcgaggtttcccagctcgagaacgccaacggctgggcgctcgtgaccgagaaggttccgggcaccacccttgccgagaagatgactgccgagccccagcgctttggtgagtatctcgagatgttcgtcgacctccagatcgagatccacggctacacctccccgctgctcaaccgtcagcgcgacaagttcgcccgcatgatcgacagccttgatcagctcaatgccaccacgcgctacaaccttcaggagcgtctggacggaatgaccaaggagttcaaggtctgccacggcgacttcaacccctccaacgtcatcgtcggcgacgacggccagctctatgtgtgcgactgggcacacgccacccagggctcccctgctgccgacgttgccaccacctacctgctcttcgccctcaacagcaaggatcaggctgaggcctacctggagctctactgcgacc

SEQ ID NO: 381 - DNA, 7920 bp, Unknown
  gut microbiota DNA sequence
aatccgtaccgctccaatctgttgaatagtaacattagatgtattgaaatcgacatacagctgtcgaggttaattaatagttcctatgaatcattgagattgcatcagaataaaaaaataaaacacataaagaatatataaagaaatcacaactaatcttgcaataaacagtatatactgatagaatacaagatattgcacattttgcagcttatacaataagatatagttccagatgattatatatttaaaaagggaaaaagtatatgcatataaatagattaaagaaagtgataaaagtattcttaataatacttgctatactacttattattgtgattgccatagttggctgtgcgcttattacatatcataaacagccggtattgacagatgaggacaaagaagagctgtctgttgataatatatggaagacaagaacagagccggaaatggcggaagttatagaagataatggagatgcactgcttgagcgtattaagctgataagcaacgctagggatgagattatattatcaacctttgatttcagggcagatgatagtggaaagcttattcttggtgcgcttctagatgcttcagaacgtggagtatcggtaaatgtaatagttgatggagtatctggatttcttcgtatgaatggtaatccttattttgaagcgttggcagcaggagaaggaacaagtattaagatatataataaggtcaatccgtttgcaccatggaaatctatgggaagacttcatgataagtatcttatagctgatagaagcagttatataataggtggaagaaacacattttcatattttttaggaagcagctcgccatataagaattatgacagagatgcgttggtgtattgtgagaatccagatgagaatagttctgttaacgatattctatcgtattttggaaaagtgtggaattataaagaaagtaaggcttttatcaatggggtaaatgcgattacagatacagacacatattttacaatatcagagaataatgaatacaattattgtgtagagaatacatattcagataataattcgttggaaagttccagaatcacagataagaaaaacaagctggcagctaagaagaaagtggcagcagccagggaagaacttcattcattatatgcagaatattgtgcagacaatgcagataatggtatttataaaggccttggggaaagtgtttataaggatatgtttaaggatgcttatgaagtgaataatgtagcacttttgagtaatcccatagaatattcatcaaagaaaccatatgtgtggtatcagcttgttgaacttatgaagaaagcagacagcagagttaagctgcatacaccttatattatatgcaacgattatatgtatgaaggactaaagtcggtttgtgacacagtggatgatgtatcacttatgacgaattcagttgctaacaatggcaatccatttggttctgcagattattatgttaataagaacaggatacttggtacagggattgatgtatgggaatatgaaggcggttattcataccatggtaagtcagtactgattgatgataacatatcagttataggctcatttaacatagatatgagaagtgcttatctggatacagagcttatgcttgtgatagatagcaaggatattaacagagagttgaatcagtcaatggagggctatgaaagggtagcaagaaaggctgataaagatggaagctatgataatccatataacgtaaagccggtagagttatcatcatatagagaacgtcagatgaagctcataaagaattttgctttgtgggccagatatctgttttaacatatattaaagcatttacacctttagatgctaagagtgtccagagtgaattgtaacatttattaaagatttaacggaattataaagattgaatagaattataaagatttaacagcgttatagatatttaacagaattataaagatttagcatcatttaaattcactcaataataaataacatcaggtagaaagagagtaataatgaacacaaaagaacaattaacgaacaaaacaaaaataatagctaaagaagagaacagaaaagattttcttcagaaaacctgggtggtatgtgtactcgcacttgtatgtacatttctttggggaagtgcatcaccttgtattaagttagggtatgcgttatttgagataccatcaagtgaaacatggacacagatattatttgcaggtacacgttttatattggcgggaatacttactattcttataggcagtgcacttaataaaaaaatgttagtgccaactaagtcatcagttcccagcatagcaaagcttgcgttattccagacaatactccagtatatattcttttatatcggacttgcacataatagtggtgtaaaggcatctattataaatggttcaaacacattttttgtaattctgcttgcaggtcttgtatttcatcaggaaaagcttgatttcaagaagcttgcaggttgtgtaattggctttgcaggtgtaattatagtaagcatgaatggtaagtccatagatatgaatctcagccttatgggagatggaagcctgtttttatgtgcaatatcatatgcagtatcatcatgtcttatgaagaattattcaaagaatgataacccagtgatgcttagtggatatcagtttatatttggtggtatagtgatggtgattgttggacttatcatgggtggcagaattaatcatatatcattaagtgctgtacttatgctgctttatcttgcttgtatatcagcagtggcatattcactctggggaatactgcttaagcacaaccctgtatccaaggtagctatattcggatttaccaatcctgtatttggtgtgcttctttcagcatggtggttaggagagggcagcagcgagcttggaataaatgcacttatagcacttattcttgtaagtataggaatccttatcgtaaacgtacgaaagcagtagcagtgttataccaaaacgtattacaaaggagcagatcatatcatgcagatgacaacattatgttatatagagaaagaccgatgttatcttatgttacatcgcacaaagaaggaaaaggatattaataagggaaagtggataggcgtaggcggacatgcgtatgatggtgaaacacctgaggaatgcctgctgcgggaagttaaagaggaaaccggacttacattaacatcatacaagttcagaggacttattacatttataagtgatgagtgtgagcctgaacttatgtgcctgtttacggcagatggattcacaggaaatgtatgtgaatgtgatgagggagagcttatgtggatagataaaaagaaagtgccagagcttccgacatgggaaggtgatgcggtattccttaagctgatattagaaggcgaaaaaagattttttacggttaagttaagatatcagggaagtaagcttgttgagaattcagttaattactggtaaaagtcttaagaaaactaaagaaatattataaatacatatacatcatttggttttatatttatgacataaaaaacaaaagatatcataaatataagacgtgtttaaagcatgtattaagtggcagatggacacatagataaggaggcggctgtctatgcatgtaagaggctggataaaagatgttatgtatggattaattatatttggtatatgtgcagcattgatattagttgtaagtgttgcagcagataatatagtagcaaaacataatgcagttatagtaagtaaaaatgtgaatagtaaccttgattgtgatgattcgatatgcacgagtgtggataatgtgagtggctcagaaaacgatgaaaatgttaatctggcatgtgatggaagagaacagtataacaataataataacattaaagataaaaagatagtctgctggggagattcaataacatatggacttggtggacaggagaatacatatataaagagtgaggctgggattatagatgcttcaaactggaattatccggatacacttagatactacacaggaatggatgtatataatcttggtgtgtgtggagaaacatcctacgagatagcactccgacagggaggaataaagatgtatgtaggaaagcaggttaccgttaaaccgggaaaacgcacacagataagtatagtggatgaatcaggaaacccagttatattagagaattttaacggatatgagacggataatcagcagccagagaatgttgtttatattaacgatataccttttaagctcgaatatgataatagcaggatatatataagtatatatgataatgccgtggataagagcgttaaattaaagaagggttcacagattataacaaaggcagcacatgatatatcaggagatgtgcttgttatacagatgggcagcaatgggggctggaatgattatgatgaacttatagaacaatataaggcaatgattgcgaattctggtacagaatgctatattataatcggtgatacggataatcctgaggagtcagttgatagcgcgaattatacgagcagccaggaggtaggaactgatgattctatgtgggaggcagcactcagggaagcctttggagaacattttatcaatatgagaacttatctgcttgaaaacgcacttaatatagcaggcttagaaccaacacagatggatgaggaagatctttcacagggaagagttcctgaaacgataaagtatgattatacacatcttaattcatatggatattatgccataggttatggagtgtatgagaagggcttagagcttggttactggtaaagaaatcagcaggtaaggaattgatatacgggaatgcctggaaatgaggaatagtatgaatgaatataatacttacaccggtaaaaaaataggaatatataaagaactggcggtagtaattgtgacagcttttactatcgctgttttggcttctctgggaacatttatagtatgcagtcattatggtgtgctggtagatgtaacagaggattgttcagattataaaagaaaatacgatattcaggttatgggaatggtaagagagcttgatagtgcccttagcaacgctatggatgagataagtgccaatgaacttgatgatgacaagaatctgggagatgccatgaagtacctgctgttaaatgacatgcttccgtttgcaacagaagaggtcaacaatatgaatataaccataacgaacagaaatggtcttgtgttatggagaaaaaatccagatgaaaatagtgatgattacagaagaaaaaaagtatacgttgatatagatgaacttgtagttaattcctatgatgattgtagtccggagtattcatttgtatatacgaaaagcataaaaaagactttatattatataatatttgaaactaatgttacaccagaatatttgtatgcagatatcaagcttaaggctgcgtgtatgtgtcttggaacagttatatttataatatgtgcgctccttatgacaaagaaaaggatagattatataagatatctttcagatgttgtcaatatgatatcaaaggggaatcttgatacgcagattgacaaaaggggacgtgatgaaattaccaatatagcgtatagtatagataatatgcagcatagtataggaagaatgatgaaagaggaacgtgaaaatgacagaaagaatatggagcttataacgaatctttcacatgatataaaaacgccaatgacaataataacaggatatcttgatgttgttataagccataaatacgatagtgatgaagaacgtgatacatacataaaaaaggcgttccagcaggttgaaaagattaatggaatgatacataagatattcatacttgcaagaaatgaaaagccatatggtaatgatggcagcaatggtatagaaagcagtaaagctaataaagaaaaatgtaatatagctatgatgcttaagcaggatgtgtcagagtttgaaggaatagcacttaaacaggagcggaattttgtggcagatataacagaaaagccagtatatgctgaagttgagatagaacagatgagagaggtgtttgataacattcttatgaattccataaagtattcaaggaagaatacggatattatagtaacacttcttgaggagaatgataatatacttataaaagtatcgaatatgacagactgtataaaaaagtcagattgtgaaagaatatttgataagttttacagagctgaccatgcaagaaattcaagcatatcaggcaatggcttaggactttctattgtaaaagaaacagtagagggggtaggtggaagtgtgctggcagattatgataatggattgtttacgataagcataaagctgaagaagtgcaatcagaaccaggaccaagaaataagatgaagttagagcaataagtacatggaggtggcaaactaatatggcagctattcttgtggttgatgatgaggaagatataagagaactggttggaatatatctaaagaatgaaggttttaaggtgtataaggcggcagacggacaggaggcattaaagtgtcttgatgatatgcagatagaccttgcaatactggatgttatgatgtcggatatggatggcatagcgttatgccttgagataagaaaaaagagcaacatccctattataatgctgtcggcaaaggatcaggatatggataaggttataggtttgagtgccggggcagatgattatcttgcaaagccttttaacccggttgaacttgttgcaagagttaaggcacagcttagaagattcaatgatttcaatgaaagaaagccaagcagtattcttgaatatatggatttatccatgaatcttgaaacacacagggtatttgctaactcaaaagagatttggcttactccgaaagaattcgctatattagagctgctatggaagaataaaggtaatgttttttctacagagcatatatataatacactatggagcgaggaagaagcatacgatattaacaatgtagttatggtacatataaggaatctaaggtcaaagatagaaccagacataaagaatcctcagtatgttaaaactgtgtggggtgtgggatataagttctcataataattttgttcagcgtacagtctatttatctaatggagctattgtaattattgtatggaaagtatcatcctcttgcttatagtattgttgtatgtgtccattatatttttttacaatgcggtgaatgctttttaagccaattccatggacggaaccatcagtttttgtagtggaaagattaccattactgtcaaatgggttaaatagacagctgtttataactttgatggctatataagaagaattttcaaccattgctattgtaaaatcaatataagcttttttgttatgaactttaacagcagcttcataagcgttatctagtaaattgtcaataagagatgtacaatcaaaatcagtgagaaatgaaagtgaagaattgcgcacattgatattaaatgaaatatgagcttttttacagagggaatagtaatgtgctaatatggcatttaataattcatttcccgatactttaagagtggattttaaggcatctgaaccaatgagagtttctatatattcagaagtttttttgttattgccagaattattataatttgcaatattatataaatgtcgttttatatcatgaataaatatatcacgttcagaattttgttgtgtaagcattttataatattcagatatgtgatatgcattttcaagctcgagctgtgtctgtgtatattgttttg

SEQ ID NO: 382 - DNA, 15005 bp, Unknown
  gut microbiota DNA sequence
atgtctgtggaagtgagatatgggacatggatgtcccgtatcgaacggtagcggcagtagtcacaacctataagaaaagtcttagaaatatccaattgaagcttctggcatcgttgatgtatgcacagctgctttcctcatatatgctgtcgtccgtatattaataatgtgtgctaaacaactatttatgcatatcaaacacatatcttatgaagtcagcagcattttccgggtgtctggcagattgtactattccgtaacatggctgatccatggtgaggtctgttttggtgatttctggtgcatttgataaatctatggcaactggaatagtttcaccatcactgtgagtgtgatatataatgtattcagaaagctcatcaagttcatctgttgagaacaattcacgtaaatcatagaaaaaacagcttgtatcaaaacagaaatggtcgatatccttgtattcagacatatatccgtcaaggttattagtctgggaaagcacatatattttttctttgcttatctgtggatcctgatccaggaatttttcttcaagtgtgtagctgtagtcaatatgaatgcgttctttttttccatcaataccaagatagttagtaaagccggttgtaagaagatcatcatctgtatcatagcctgtaagttttccatcacagacggctatatcgcacactgtatcataattgtttcgtatatatgcatgtatgaatgaggctataacaagaattacagcaattacagcggctataataagtctgtaatattcccatatgtactggaacttttcggataaggaaagctccttgaatttctttttttgttcttttatttcatcattgatagaatgtcctttggccataagtcctccattattatttcaggatgtaaatatatgcttatattcatgcctgcctgtttagtgaggcatgaagtaaacatttgttagtttatcatacaagaacattaaaaaaaacagcttttataaacatttaatcaatatatatgaaaatttctttgatttttatacaacatgtaagtataatctgatatagtctatttgttttatgttaagatatgggtgcagaagtgaattctgacactcatcaatgtcacaggttcaaaagtcttattctacaggaacaaacggcttttgttcttctgaccatttacattatattaaaattaaagaaaggtatataatgtgaaaaataagatttttcacacgcaggatttgcgcttcgcacaaacttgagatgcgcaaagaaacagcgcaagaatggaggattattatgaaaggttttggattagatggcaagttgtttaaaggactgacaaaggcgggggattttcttatacttgcacttattacatttatattctgtattcctgttgtaacgataggtgcctcgcttacggcagcgttttactcagggatgaagcttgttaaggatgaagagaattatgtgtttaaagactttataaagtcgtttaaagagaattttttacagggacttatagtagaaataattcttgcagctgcaggtttattattgtttcttgatatacgtgcgtgcgcttactgggcatttacaggaagcggttctatgattggaactatatttatgtatgctatagttggatgtgctatagtatgggctggtgtagtactttatgcatttgcaatgttatcaagatatgatgataaagcattgagaatattaaagaattcactcattctttgtgtacatcatctgccacagacgatagttatgatgattgctacatatggacttatgatattttcatatcagtactttacagcatatattataactattccgcttgttttgtatattgactcatttatatttacaagaatattcaaatcacttgaaaatactaacgagcagagagctcaggaagcagcagaagagaagaaagcggcggctgggctggcggaaaaaaatgcagcagaaaatatatcagaaaatatatcagaaaatatagtagaaaatatagtagaaaatataacagaaaatacagtagaaaatacagcaggaattgaggaaacagattttacaggtggtgattctactgataaaactaatgggatggattaaagcgtgtaaaaataggacttatgattagaagtattcatggctttatgagtgcgtgaaaaacagataaatgcataataaaaagattcacagtctgggtaaggaactgtgaatcttttttgtgcgtataagcacagcatttacagaatatattgaattaggatattctgcatgttcatacgtatatggggattgtcgtatgaatgctgcaaaaaagcagctatatatctgtatggttatgggatacagatagcataagttatatacaaaaaaagatgccactaatcgtacaattaaaatacgattaatgccatctccattgatgctttcatgctgataaaattataatgcatcgttaccacgttcgccggtacggatacggattgcatcagaaacctcatatacgaaaatctttccgtcgccatatacaccagtattaatctcttctataatctggtctataatgttttcatatgtttcatctgatacaatagattcaacttttaccttaggcagcagattgccaccaaaatccactccgttatatacctgcttatgtcccttctgactaccatatcccattatgttggtaatcataaggccatgggcaccattgctgttaagtatattctttaagtcgtcaagtcgttccggtctgatgatgatttccagttttttcatgatctttattccccttcctttccgattgacaagcttattgtaaacattttgttacgataaagtcaacctctgagtgtaaaatgtgaatattctaaagcatatttaaaaatgctgttaataaagtaagtaagaagcttgttttatgtattgatgaccaggtaaacttcatatacttagtctgatattaatcttcataaagctgtctgcttgagctgtaaacagaaaagcaataatatatagcgcatattccaactaccgcttcaacaagtattgaatataatgtaatagaagctccaaatgccataaagtgtacaaatatggcagcagaaagaataagccatgtcatctggaagttacgtgtggcagcagacttttcctggatatttgcctccataatgagagcttctgtaaaatagtaagtataatatattgcaaatataacagttaatcccatagatatggacagcatagtgcctgcggcatcctgccagttaataaagtttataacctgtgcagcgattgatgcgataagtccggcgattgacacgataccagcttttttgaaaagtgagttacgatgcatcatgtgtacagcaccaagtacaatcagaagaaaacccacacaatcgttagttatatcaatattgatatgtccaaatgttacattgaatctgagggaaataagaaaaatcccaatcagtatgagtattatattttttttgttcataataatatggtggccttataaagccgctcctttcgatgttatatatgtcttattatacatcagacatttatatcatattttagaataataataattatatatcaactatgattaactgattttagataaattttattatgtgtttatttaatgaaggttgagataagaaatagtctgtggtattatttcaaaatatgttgaaatgggaggtgtgtatgctggtatttagtgagccacaattaaaggattgtgcctggataagtaaatgtgtaaaagaatctggatatatgggaagtgatgcatcatttgcaaatatatatctgttaaaatcaaaatataatacaaaagtgtcattttataaagattttctcataagatattatgagggatatggaagcagacatggttatacatttcctcttggacatggaaaaacagataaagcactggaagcaataagacaggatgcactggaaaataacagaaaacttgaattttgttttgtgacggaagaacaaaaggaagtgcttgattctgtgtatgggaatatacttgaatataaaaaagatgatggcgacagcgattatatatatggacagcaggagctggcagaattgtcaggaagagcctatcataaaaagaaaaaccacttatcaaagtttaaaagaacttataataacataagatatagtgagattggtgcaggtaatatagaagatgctgttataatagaagataactggtataaggaacatatcaaagatgaggatgcttcaataaatatggagtattcagctataaaagaggcattacttcattttgatgaccttgcactgacaggtggaatattatatgtcaatgatgttccagctgctatgacgatagcttcctatataaatgatgatacagttgatatacatttcgaaaaatgtattggcgaatatgctgctgctggaggttatgcagccataaaccagatgcatgcggaagctttaaaaaatgtaatgtatataaacagagaggaagatataaatattcctggattgcggaaagcaaaggaatcatatcatcctaaaataatgttaaaaaaatacagtgcagctgaaaagtaatacagctgaatatagcagcgtatatggttataaatgcagcgtgcacgagaatggaggattataatgctttcaaaggtactatcaaaagagtcatgtgcaaagtgcagattctgttgttcatttagaagatgcagtctatgggaaacacctctttttccaaaggatgagtgtgaaaaattatcacatgccaatgaatataatgttatatcagagttcagaatgtatgatgattgtggacagatgaagcttgaacataaatataaaacagataatcaggaggaagaagcagcctgtgattatcttgatgtgcataaaggctgcatattatctgatgaggacaagccttttgactgtaaaatatggcctcttagaattatgaaaaaggatgataaactggttatagcatttacaccaacatgtgctgcacttggaaaagaaccttctgtagagctgaaagagctggtttgtggcagacttggtgacagcatatacgaatatgccagaagacatccatttataataaaagattataaagaaggatttccagtaataagaagtgagtgtctttcttaaaatttctttattataagtttatatgtttatatgtttataagttttatatgttttatatgttttaggcagtttctggatgaaaatggtaatatatttggcaatttgaaatatatatgtaaaaatatgtcggaatatggttaagtaatgtatgacccaaaccgatatcatgtatgcgaaaagcagtataggtaatgaaaggggtgcagttatatgttagtttcaggatatgcccgttatggaacatatgatgtcagcaaagttagtacatacaatgattcatataatgatacagtgtcagatatgacaggaactgctggtacattgcaggcagacaaagaattagaagcaaatgaatcacagcagggcagtttatttactaatcaggcacctaagcattcagaaccagctgattttatatttgatttcaggaaggatagcaggtttaatcttgaaggtgcaacaaaggactatgaggatattaatatagataaggcactttatgatatgaagaaagataccgtgcttgataaatataagttttttgttgattcccctaatcttggaactgataaagatggtacagtaagaatagtcagaagatagtattttccttttatgaaataccatgttgaaaaaaatcgaaaaaatttaaaaaaaattaaaaaaagtacttgcattattttaaaacatagtatataattcattttgttgtcatgatattgggctttcgccaagtggtaaggcactggattctgattccagcatttcgggggttcgaatccctcaagcccagctaaccctcgctattaagcgagggattttttttgcacagatacttaaacggtaaaataataaactaagaagctatataaagatagaatagaaaggagccactcacatgatacagctgggaaaaacacaatgtcttaatgttattaagaaaacagattttggtgtatatcttggtacagaagatgataaagttttacttcctaaaaagcaggtgccagaagatatagaaataggtgatgcactcaccgtatttatatacaaagattcaagcgacagacttatagccacaacaaacaagcctaaagtacaacttggcggacttgcaaggcttaaggtgtgtgaggtaagtaatataggtgcatttcttgactggggactggagaagaacatactgcttccatataaagaacagacaacacatgtcaaccagggagaggaatatcttgtagctttatacatagacagaagtaacagacttgctgcaacgatgaaggtgagcagatatcttacaacaacagataagtatgtcaaggacagtgttgtaagcggcacagttattggaataaagccagatcatggaatatatgttgccatagatgatgcatattatggttttataacacgcaatgaaatgtcagatgatataaagataggtgatgtcgtttacggacgtgttataaaggtaagagaggatggaaagcttactataagtatccaccagaaagcatatcttcagatggatgaagattctgtcagaatctatgatgctcttgttaagaacggaggaagccttggttttaatgataaagctgatccggagattataaagaagcattttgatatgagcaagaatgcattcaagagagctgtaggaagacttttaaagcaggggaaggttataataacagaagattcaattataattaatgagaaaaataaatagatatttcttgaacagccaggctgattgttatacaattagtactggttgtttttgtctgagtatgtgttgcataaaaaacaatagtcagacatttgcaatggtttgttaaaataatatgaaagtataggaatggaggattatatgcagaaggttattagtacagacaaggcaccaagtgcgattggaccatattcacaggctattgaggttaatggaatggtatatacatcaggagttattccagtaataccagcaacaggtgaaatagtagaaggcggggttgaagcacaggctgaccaggcgtttaagaatctttgcaatcttgttgaagcatcaggttcaaaggttgagaatattgttaagacaacagtttttattaaggaaatgaatgatttcggaaagattaacgaaatatataagaattactttaaggaaccatttccagcacgttcatgtgtagaagttgcaagacttccaaaggatgtattacttgaagtggaagctatagcatggaagtaaaaaaaatcaactggtttctaccgttttttctggctggatatatagttcttagtacattatcggcagtacagctaagaatgcttactgatgctggaatagcatttccacaatggattatatatatattgggtgaggcaatcacgattgtgctggcacttatatatatatttgttatgaagataagcataagaaaagatatgcagtataagtttattggcatgaaagatattattatgtcactacttacaggatatcttcttattcctatgacgttgtttttaaacagccttacaatgcttttttctaagaattatctgaatacatccgttcaggggatgatggaatatccatatatagtgcagattattcttgtggcggttattcctccacttgttgaagagtttgtgttcagagggatgttttatgggacatatagaaagtgcggaatattaaaagctgcacttgtaagtggagttgtatttggaatatttcatatgaatatcaatcagtttgcatatgcctttgtagtagggattgtacttgcatatatggttgaggcaacaggatccatatgggcatctgtatgtgcacattttgcagttaacacgtattcaataacagttgtacagatattaaagctgtgcaaaatgtacgatggagtaataaacaatacagcggtacagagtacagatattcctatgacatcaatgcttttaaaccttgtaatgatgtttgttatagcagccatatttatgctccttgcaatattgtgcataaaaaatatggcaaaacgcaatggaacactcgattctataaaagccagcttcaagccaggctgtaaaacagataaagatgaaagagaaaattcccaaagtgatggaaatgcagaaaagcgtattataacagtaccgctgatagcaacaattgctgcctgcatagtgtatatggttatgatggaaattacaagataaaaagattgccataatataatgaaaattacaagataaaaaagattgccgtaattaagaaaatatactataaacgatagatgaacttatccattaacgtatagtataaacagttcttaatacggcaatctttttgtttaatgtgcttaaaccttttaaattaaactctgatatcaatattctgaccaagattaggagttacagatgcttccatcatcttagttaaaccatctccgttagattctaatgtatcaagagattttttaaggacagcaacctgtacatcattgataacacgtgtagagctaagatccattgataaaccagctacatccattatatccataagtaatcctcatttctgcacacatacttttaacatatggctctgtatcaggtgtgcatagatacaaaccagttagaagatatattctgattagattgtagcctgtagtttaaaaaaaagcaaggctgaaataacaggtcggatatgataaatggtaaatacgtaatttatgctgcactattgtgataacaaatactgatacaaatacagatagatttgttataagtatgtcatgaaaatggcataaatacgcatttttttggtgatgttagtgaagatttcagctgtaattttgtgcaaaatatatattgtggcagtaattatggtaaaagtgataaaaaagcattaactatatttggctaattaccatatagccaagaaatgcctgttagtgtacaatatgaaatatcagaaacgcgtatgcgttcttttatattaggaggaaagttttcaatggcaagtttatcacttaaaaatgtttgtaaagtatatccaaacggattcgtagctgttaaggatttcaaccttgaaatcgcagatcaggaattcatcatcttcgtaggaccttcaggttgtggtaagtctacaacacttcgtatgattgcaggtcttgaggaaatcagctcaggtgagttatggattggagacaagctcgttaacgatgtagagcctaaggatagagatatcgctatggtattccagaactatgcgttatatccacatatgtcagtatatgacaacatggcattcggtcttaagttaagaaaggtaccaaaggcagagatagataagtcagttcatgaagctgctaagattcttgatattgagcatttacttgatcgtaagccaaaggctctttcaggtggtcagagacagagagttgctatgggacgtgctatcgttcgtagtcctaaggtattccttatggatgagcctctttcaaaccttgatgctaagttaagagttcagatgcgtgttgagatttctaagttacataagagattacagacaacaatcatttacgttacacatgaccagacagaagctatgacacttggtacaagaatcgtagttcttaaggatggtattatccagcaggtagatacacctcagaacctttacaacacaccaaacaacattttcgttgctggtttcatcggatcacctcagatgaaccttatcgatgctacagtagctcaggatggttcacaggtagctcttaagatgagtgatgatgttactatcaagcttccagctgagaagagcaagaagcttatcgatggtggttatgtaggaaagacagttgtagttggtatccgtccagaagatgttaaggatgatccagaattcatcgcagctcatgcagattctaagttcgtatctacaataagagtatatgaattacttggtgctgaagttaaccttcactatgaaattggtgatgttacatgtacagctaaggttaatcctagaacaacagctcgtcctggtgatgaagttacatttgctatggatgttacaagacttcatgtatttgataaggaaacagagaatgtaattacacactaattaccgtttctaattataatcaatttataaaatttagaggaagtgtataatttctatacatttcctctttttttttttgcgattttgctttacaatactatagtaagtgtcaaattatagttaaaccaacattaggaaggaatatgatgttaatcttaagaaatataggggcataagcttaagaaagtttttttacaatattaagtggtatgacagtaaaagattaatgatgggttttaaacttaagtgttggatgtagctttaagtaaatcgcaggtataggaataggagtatgatatgatttcaaatcagattttacagacaactgtcgatggattaaaagaaatatcacgagttgatttatgtgttattgatgcagagggtaaggttgtcgcaaaaacatttgatagtgttgcagaatgtacagctgatgcacttgtatttatagattcaccagcagatagtcaggtagttaatggataccagtttttcaaggttgttgaagatggtaatcttgaatatataatattggcaaaaggaacaagtgatgatgtcttcatgttaggtaagcttgcagcattccagatacagaatcttcttgttgcatataaagaaagatttgataaggataactttataaagaatcttcttcttgataatctgttaagagttgatatgtatacaagagctgaaaagcttcatattgaaacggatgtcaaaagagttgtatatataatagagacaaagcatgagaaggatactaatgcacttgagacaataagaacattatttgcctcaagaaccagggatttcataacagctgttgacgaaaagagtataatacttgtcagagaagttaagccgaatgagacatatgaggatcttgataagacagcagaggttgttatagatatgcttaatactgaagctatgagttcagcacatatagcttatggcactatagttaatgatataagagaggtatcaagatcatataaggaagctaatatggcacttgatgtaggaaagatattctacagtgacaagaatgttgttgcttataacagacttggaataggccgccttatatatcagctgccacttcctttatgtcagatgtttatcagggaaatatttgacggtaaatcccctgatgatcttgatgatgaaacattatcaactattaataaattttttgataacagtcttaatgtatcggaaacatcaagacagttatacattcatagaaatactcttgtatataggcttgataagcttcagaagacaacaggcctggatttaagagtatttgacgatgcaataacatttaagattgcacttatggttgttaaatatatgaaatatatggaaagtaaagatacatattagtatatgcaattattgatttagtaattgtcagaatttacatttgacacttaaatcataaaatagaaaagttatacatacagtctggaggaatatatacaatgataattatggaagatgttacgaaaacgtattcatctggatcagatgttcctgcattgaatggaattaatctacatattcaggaaggtgaattcgtattcatagtaggtaagagtggttcgggtaaatctacgcttatcaagcttcttcttaaggaacttgatcctacatcaggaaaaatatatgttaacaagaaatatctaaacaagcttacaagaaagaagcttccatatcttagaagagatataggtgttgtatttcaggacttccgtctgttgccagacagaaatatatatgagaatatagcatttgcacagaaggttgtagaagcacctactaaaaaaatcaagagtaatgttttaaagatgctctctatggttaatcttcttgataagtataagtcttatccaaatgagttatcaggtggtgaacagcagagagttgctattgcaagagcacttataaacagaccatctattcttttatgtgatgagcctacaggtaaccttgaccccactaattcaaacgaaatcatgaagattcttgatgctgttaataagcagggaacaacagtgcttgtagttactcataatatggagattgttcagcagatgaagaagagaacaattactatgagccagggtaagattataagtgatttggaaaaaggtggttatttctatgaagattagatcgttattttatcatattaaggacggattaaagaacatctatcgtaatagattgttctcacttgcgtcaatagcaactatagcggcatgtatattcctttttggattattctattcgcttgtaacaaatttccagtatatgatacataaggctgagaatgaagtatgtgtaacagtattctttgatcagggactgacagatgcagagattaagaagcttggtgatactataagccagcggaatgaagtgtcacgtatccactatacatcagcggatgaagcatgggagaactataagtcagagtattttaaggattatcctcagcttgcagagggttttaaggatgataatcctcttgctaattcatcatcatatgagatatatcttaatgatgcggcaagccagtcaacacttgtcacataccttgagaatcttgatggtataagacaggtaaacaggtctgaggcaacagcaagcggacttgcaagtgcagcaagacttgtcagttatgtggcaatagctattataattattcttcttgcggtatctatattccttattacaaatacaattgtaataggtataacagtccgtaaggaagaaatatcaattatgaagtatataggtgcaacagatgcattcgttgatgcaccattcttcgtagaaggtataactataggtattataggttctatcatacctcttgtgatacttagatttatctatgaaaatgttattaattatgttatgaataaattctcgatacttcagaatattcttgcatttatgccagtagatgaggtgttcaggatattggttccagttggaatccttcttggtattggtattggtatattaggaagtttctttgctgtaagaaaacatgctaatgtataaatgtataaagccggtacaaatgtataaagcttatacaaatgtataaagtttatacattaaataatttatagtaatgtaagtatgcagtattaacgcatataaagtgtgttataaaagcatagggatagcattatgttgtgttatatatgtgtaaaatataggactgatgcaaagttaagctttagcagaagtcctattttacaagaatgacataatgttttatggaggagttgtatgaggaaagcgttggtaaaaaaggcggttactctgttgctgcttctgacaataatcgttccaggctgctttgtcagatattatgatgtatatggtgacaataagcagaatcttgataatgctaataataaaaaaagtgatcttcagagtgaatatgataaaacacagaagaagctggacgaactcaagtcacagagtaacgatatagagacatatctgacacagcttgattcacagatgtctgcaattaacagttcacttgatgaggtgaatggtcagatagaacagatagaaacagagataacggacacagaagaaaaacttgctgaggctgaagaggatgttgatgagcagtacgactcaatgaagctgagaatacaatatatgtatgagcacaatgaggaaacatattttgctttactgcttaactcagaaagcatgggtgatatgcttaacaaggcagagtatataacaaagatttctgaatatgacagaaaaatgcttgaaaagttcaatgatacggtaaactttataactgctgctaaaataaagcttgaacaggacagggaaacgcttgttgtaaagcaggaagaattaacagataaaaagtcatcactggagcttcttgaatcaacaaagaagaacgaaatggcttcgttaaagaaaaatacacagcagcaaaaggattataaggctaagatagaagctgatattaaagcccaggataatcttattgcaagcatagaagcaaagataaaggctgaagaagcaaataaaaataataacagcaataatggtggcagtaacaatagtggaagcacaaagtatgatggtggcgcttttaagtggccaacagtatcaacaagaataacatcaccatatggagatatggatggcagaacatctcctcatcagggaatagatataggtgctgtcaacagaggcgtatcaggagatcctatatacgcagcagcagatggcaaagttgtgatatcacagtttagttcatcagctggtaactatattatgctatatcatggcgatggattatatacaagatatcttcatgcctcttctcttcttgttggagttggagaatatgttaaaaaggggcaaaaaatagctcttatgggcacaacgggtaattcagatggagtacatcttcattttgatgtaagacttaatggagtggtggttaatccgtggaattatctaagtaagtaatattgttgtttaattgaatattagttggtgacgaacggacgacaaatataagctacaggcagtcctgcacactatgttcaatgccagaagctttgattgga

SEQ ID NO: 383 - DNA, 6247 bp, Unknown
  gut microbiota DNA sequence
ctgcattttcaagtggagcctgtccatttttgcccttgtaatcttcaagttctggtaagataagtggaagctcatcatcatcaagaacgtgaatctgtccgtcttcaagatatacgataggcactggttcaccccagtatctctgtcttgcaaatatccactctctgaaatggtagttagcctttcttcttgctacgcccattttctcaagcttctgagtaatagcttccttagcttcttctactgtaaggcctgtgaattcctctgagttgataagcttgcagcccttgccaaggtaatcatacttttcaaatgccttttctgatacatcagcgccatcaataacctgtattctaggaatattgtgtgcctctgagtactcaaaatctctctggtcgtggcttggaactgccataacagcaccagtaccatagttagcaagaacgaaatcacctatgtatataggaactttcttgccatttaccgggttaattgcatatattccttcaagaacacagcctgacttagtcttgttaagctctgttctatccatatcattcttcttaattgtctctgcaatataagcttctacctcttccttattctgaattcttggcataagctctttaacgatatctccatctggtgcaagtaccataaatgtaataccatatatagtttcaatacaagtagtaaagatagagaaatctccaccaccatcaatcttaaagtcaacctcgacaccttctgacttgcctatccagtgtctctgcatttccttagttgattctggccagtcaatatgttcaagtccctcaagtaacttatctgcaaatgctacctgatcgataacccactgcttcatattctttcttacaacaggatatccgccacgctctgacttaccatcaataacttcatcattagaaagaactgtaccaagttcttcacaccagtttacaggcatatctatatatttagcatagccatcaaggtataactgcttgaatatccactgtgtccacttatagaacttaggatcacttgttgctaaagtcttgctccagtcataatcaaaaccaagctccttaagctgcttagtgaatgtttctatatttttttgtgtaaatccgttaggattgttacctgtcttaacagcatactgttcagctggaagtccaaatgaatcatatcccattggatgaagtacattatatccctgcattctcttcatacgtgaagtgatatctgtagctgtatatccctctggatgacctgcatgaagacctactcctgatggataagggaacatatcaagcgcatagtactttggctttgaaaagtcccatacatctgttttaaatgtttcatgttctgcccaatacttctgccactttggctcgatagacttgggattataagttgttgtattagccatcttaaaacctcattcctgcaccggctatgctcttccggtgctttcaatcacatatttactcactttcaaatattatcacaatgaaaggatttgtcaataactgaccacttctttatatgctcttatcaaccagaattttcacaaaatttcacagttcaataatcctacacaatataagcggatagtatgcaaagccatcatttactgtacatatctatccgcttacttaattctcagctttaatctgtatctcacctttattaaagcaatacattgcttgagcttaatctatttctttacttttcctttagcattgcttcaagctcagctattctttctaaatcttttgaatgttgttcttcatattgttccttttttatactaaactgctccttctggatatctaattgtttcttctgactgtctaactgttccttctggctgtctaattgttccttctggctatccaactgttccttctggctatccaactgttccttctggctatccaactgttccttctggctatccaactgttccttctggctatccagtatcttttgtttttcctgaatttccttcttcagattattttccatctcctgatatttttttctatattcatccaccataagtactgccgtattgtgattaagtattctcaatgcctctgaaaacatacttagcacctcctctggttttgcaagatattcgttcatctcatcaaatatctgcgataattctggaaatactttctggatagctaatgcatcctccactgattctgtcacaaaaagtgaaagatatgccagtctatcacgaagcatatcagaagtcaatggtgtaccatacatgctttcatcataatcgtattccgtaatattaacgtttccctttataatatcagaatatctgtattttctaaatgtgtcaagactaatcatatgaaagtgctgtaataatgggaaatctatctgagtattgaaacgtgttgttccaacatgaaaatataacctggaatctattggacttataagattagaattgctgttttcaaacaatacaatagtatgtacatttttcatatccttataagaaaatgtcttatgttctatcgtctgaacattctcattcattgtattatcatgtatactactattatattgtgctaacgctgatgaagatgatagtctgtgatattgtctcataattgcatctgccgagtagcagctaagtctttcccctggaaataatgctgctattttctgaacttcaatattggcaatacttccatccgacagccgtactatcatatccattattataaatgaatcttcaaaacatgaactttcagatggtagtatatcaataaccgtaactttttgtcctatgatgctgcttacaagtcttgatagtctctctctgtgttcatctccattgaaaagctttttaaaaaatggatcatacaacaatggaagcgtcttttttttgctgatataatcattaaacctatcagcccaaaccttattaaaaaagctgcttcttttaaatttatcatactgtaatgcaagattgggattattgtggactgccgataagaaatcataagcataagaattgtcgttagctgttctataactgtcagtattcgtgtctttatttaatgaatcgctcacttattatactatcgcatatatgctgttctccttctaaattattatcgttatgcatattgataatatatttataacacagtagcaacatattgtcaacaaatagaatattttatatatcacacaatatattgacatctataaaataaagtattttataagtcgtatccctttacattaccgctttaaagtgttaaactcattaaaaatatttcaaaacatttattttactgaattaaacgaaacaaagaaacgaggttaaatatattatggattgcaaagttggttttataggcttcggtcttattgcaggctctatagcacattcacttaaggaatcaggcagcaattatactattatagctacaagcagaaggcttgaacctgtatatgaagctaaaaaagatggagttgtagatgaagttcttgactctgttgataacagattatctgattgtgattttataatactatgtacgcctgttataactatgaatgattatcttaaacagttaaaaagcattgtgaaaaaaagttgtattataacggatgtcggaagtgtcaaaacttcaatacataacactgttaaagagcttgatatggaagatgtatttattggtggtcatcctatggccggttcagagctcacaggttattccaactcatcttccgcaataatgaaaaatgcccgctatgttatcacaccaacatcaaaaactactaaagaacagcttgaacgcttcaaagcacttgtgtgtgatatgaaggctaatccgattatcatggactatacaatccacgataaaagtgtagctgccataagccaccttccacatcttatatcaacagcacttgtaaagctcgtatctgaacaggacgatgacgacaggcatatgcagcagttagcagctggaagctttcgcgatatgacaagggtagctgcttcatctcctgaaatgtgggaccagatatgtgcttctaactcacaagatataagcgtactgcttggcgactatatagacatattaagtgaaatcaagaaaaatattgataataaaaccccaggatatgttaatgaactttttgagatgtcaagggaatataagaattcattcagaaaataaacttttataagactggcacataaaatctgttatattctaataacgtaaagaaaatactcggtcacaaccgagtcggttgtgaccgagtattctaccactaacaacttaagcacttattttttattataccctgaagcaccctccaccaataaactctctcattatagaattgattggaacattgcctgactgacaaggaaggaagtacgctaagaactttaacagtctctttgcctcctgatattccgggtcatcctctgttattgagaatagcagcggctctactatcggctttaaaacacacagctcatacgcaagtgctgagttaaacataacatcagcttcctcctgataaggaaagatattcttttcctcaccttttcttactgactcccacatagaaagtgtttttttagcagatgcacctctcgtcctgtaatccctcgccatacgtcttacaagacgaccgtcagtcgttgccactctgttatgctcgtcaacattaagctgtgtaagtgcacttatatagattttaaacttactttcaactggaagtgcgtaagataactcatcattaaggcaatgtatgccttcaatcacaagaatatcttcatcgccaagctgtatatattcaccattatactcttttttacctgtaaggaaattaaactgaggtatctcaaccttttctccccttagtaatgcattcatatggtcattaaaaagctttatgtctatcgcatgaatatcctcaaaattgtactctccattttcatcaacaggtgtctgctccctctcaacgaaataattatcaacaccaattgcgtgtggcttaaatccacttgcacgaagctgtattgacaatctgtgtgaaaatgttgtcttgccagatgatgatggtccggctatcataataaatttaacgccttccctttcttttatctgattaacaatctcaacaatcttctgctcctgtaatgcttcctgaacaagaataagtgaattaatatccccgcttattatatgcttattcaatgatgcaactgtatcaacaccaagcatatctgcccactcgcttctttccataagtacattaaaaagcttagcctgtggtgcaaattccggcactatttcaggattctctttagttggtaactggagaacaaaccccttgtcatactggaatatgtcaaatgtctttaatattcctgtattagctgccatataaccatagaagtaatcgtaataaccctctatgctgtatacattaacataagaactaattctatatttgaataactgtgtcttatcttccattccgaacttcttgaacagcttaatagcctctgatgtcttcattccctgcttcttaataggcagatttttcttaacatcggctctcataagttctttcacatcattaagaaattcttgtgtgattacaaaatctccttttatatcacaataaagacctttactaagcgagaattcaactgaaactcttttaatcttattacctgtatcaagcttatgtattgcattgagcattaaaagaagaacacttcttttatatgcctcatttcccactgcctctcctactgtaatgaattccactttttcatcagttatatccatatctgatatctctgtaagcctgccatttacattggcaagaataatatcatacttgtaatcctttgcagcatctgctgccatctgcgataaaagcattattattactccttccatcttcctaatgccttattaataacagcaatatcttcatctatagcatgtattctgctctttatcgatattgactgttccttattattaataagactatttctaatattgttacagcttgtcagttccttattaagatattcgtaaagcacctctgacttattatccaaaagatatcttccatatcttaattcttcctctgcgtaggctgttatctttttcttatcataatcttccttgtgactatcattgttatgaatatcgct

SEQ ID NO: 384 - DNA, 16855 bp, Unknown
  gut microbiota DNA sequence
tagttacatttagataatattcatcttgtgtgttgtatacacagtcaaatataaaataatattttccatcttctaaaagcatatgttctgacttaatatatatgcctgtttccagaaggtattttctaaaatcctttagttctgactgtgcagataagacaagctgtgtattatcccccagcttgtctatacctgcttttaatatattcttcatgagctttccacccatgccacatatcgttactgtatcaacatcacctttattaatccctttgagcccatcacaaagctttgtagttatcttatctgaaagaccatattcatcaatgtgaagctttgcacgcctcagtggttcttttcttacatcacacgcatatactttattacttatcccgttctgaacaagatatataggaagatatgcgtgatccgtgccaatgtcagccacccttgcacctttattaacaagactggcaacacatttcagtctttctgatatattaataatattgttcatacatttttcctgttgatttattatactatataaatcatcctttatcccgacataatcataaatagaaatctatattcatgtttttattattgaattctatccttaaatatatttctggatattgattagtcaagataatccttaagcttgcggcttctgcttgggtgtcttaactttcttaatgccttagcttcaatctgtcttatacgctctcttgttacgttgaattccttaccaacttcttcaagagttcttgctcttccatcgtccatgccaaaacgaagtcttaatactttctgttctctgtctgtaagtgttccaagcacctctacaagctgttccttaagaagtgttgaagctgcggcttctgctggaaccggaacattatcatcctgtataaagtccccaagatgactgtcttcctcttcacctataggtgtttcaagcgatacaggctcctgtgatatcttttggatttctctaactctttcaaccggaatatccatagtctctgctatttcttctggagatggttctcttcctagctcctgtaaaagctgtctttgtactcttacaagcttgttaatagtttctaccatatgaacaggtatacggatagtacgtgcctgatcagctatagctcttgtaatagcctgtcttatccaccatgttgcatatgttgagaacttatatcctttacgataatcaaacttttcaacagctttgataagacctaagttaccctcctggataagatcaaggaactgcatgcctcttccgacataacgctttgcaatacttacaacaagacgtaagttggcttccgctagtctcttcttggcttcctcgtcaccctcttccattctctgtgcatattctatttcttcttctgcactaagaagaggcaccttacctatttccttcagatacattcttacaggatcttcaagtccgattccatctggtacagaaagatctatcttttctatatcgatatcatcttcatccgaaagaataatatcatcttctccatcatcatcattcatcttgacatctatattgcagccttcaagaaactcgaataccttttccatcttatcagcttcaaaatctgtatcctggaaataatccataatctccttataatcaaggacattctttttctttctggctatagcaagaatccccctgcacttttccatgaatttttcctgtataattcttgcctgttcttcttctgaaagctctggctgtgcagcttcctccttctttgacttcttaggcttctttgctgccacagcttcatctgctttctttttagttgtcttcttagtttcctttaattcttcctcgtttaagttttccttctttactgccattacaatggtccacctttcgcatgtattataaactaatgtgaatattatttaacttcatctgtctgcctatgatatcctgcatagtctttgcatctgctgcatgttcaagcttataatcaaggctgctcttcttaacccttagcactgtatcattaagtgttttttctctttctgacttactaagcgactcgcttaattcggcgctgaacattgccgctatctcactatgcatatcaccatcgctatatgagccaataatagccgccggattaacacttcctgtttcatactgttcatatacctttgatgcaacatctttaaacaatggatctataaaatcatctggttgtatatattcactgactttatcatatatatcaccatcctcaatcatccacgtaagcagaatcttctctgcctgccttattccatcttcctttttctttcttgccggttccatccgcctgacaggctgtgtctgtcttggtattattccgccctgacttcctatccttataaccatttcacgcataccatcctctggtatcataaactgacggcagacagctttcatatagttatctctttcaagtttctcactaaactgtacaagcttattagcaacttctctttcaaatgctgtctcactctccgggtcacttctgttataattcttctctataataccgatttcatacataaagctgttttctgctttatctatacgctcctgaaatgcttcagttcctaaagccttgataaactcatccggatccttatatggcctcatattaataaccttagtagaaagtcctgcttcttttaatataggtatggctcttaaagctgcctttacccctgcttcatcgctatcataagttataagaacattatctgtatatcttttcataagacgggcatgtccaggtgtgagtgctgtaccaagcgatgctaccgcctgattaaagcctgcctgatgcatagatataacatccatatagccttcacatattataagattattctttcttgaacttcttgcaacattaagtccataaagattcttacttttatcaaaaagctttgtttccggagaattcaggtactttggctttccatctcccataacacggccaccaaagcctataaccttattgttaatatccatgattggaaatattaccctgttccagaacttttcccttattcccttttcataagtaaacagacctgactcttttaagagctcatcatcataccctttttcctttagcattctatataaatcacctgtaagctgtggcgcatatccaaggccaaatgtgtttatagttttgtctgaaagctgtctttttttcagataatccaacccactctgtcctgctggtgattttaactgatgatagtaaaatgttgctgctatcttgttaatctctaacagctttgttttaatatcccgttctcgtctgtcttcacctgaatattccatcacaggcagagctatacctgccctgtcagccagcatttttactgcctctggaaacgtataattctcatattccataacaaatgttataacattgcctccgactccgcatccaaaacagtgatacatctgttttgttcctgatacagaaaaagaaggtgacttctcgttatgaaacggacatagccctacgtaggaactgccacttttcttaagctttatataacctgaaataacatctactatatcgttacgcgatacaacttcctctattacttcacttgaatatattggcatattaactcttctttccctatgtattcaatatgtattcaaaaactgcctacttttaatgtattaaacacagataccttatttcctttttttattttaaatttttattctgattttcattttaatctatacttcaatttatatcctgattcttattgctgaatcctattactgattcttattgctgaatcctattactgattcttattactgattcttatttcagattcacgttataaaatcatatttaagatacaatccctccaattgcaccgcaaagtatgcatactatcgcgcctttaaccatctgtgacatatctattgatgatattcctctgcttaatattattgaaacaacacataatataagaaaatatattattccatacagtactccccacacaaggcggctatgctgcatgcctttgccaagaatgagacctccgcataaagctgatagcccataagtaacataaatccctatagatatcacattaccagacaccctgaacttatacaggcagaaagcaagcacaagcagggctagaactgttataatatatcctgctataagcgtttttaatataatagataactttttcatacattcctctgacttaatagtcatacattctttgttctctatataaatatgtaggaaatctctttcgtattctatcttttatcctatatttatcttatcatttattccaatttttcattaaagcctgattatatacagagcctactgctacttgacagtcctttactgatactgtaaaatgttaaaatataacacttaaatgtgtttactatatttttattaaggattggaggaatatttccttggacactgacagttatattcaacttataactattattattttattatttctttcagctttcttttcatctgctgaaaccgcatttatgacggtaagccgtataaaaatccgctcgcttatggacgaaggtaacagacatgctgctttagtagctaagattatcgataattcaggcaagatgttaagtgctgtacttattggtaacaacatagttaacatatcatgttctgctcttgcaacaacatttactattaatgtctggggcagctatgctactggtatcgcaactggtgttcttactctgttcgttcttatattcggagagataacccctaagaatcttgcttcaaagtttaacactaagcttgtattattatatgcgcctgttatatatggacttatgattatactgacacctgttatttttatagttgaccatcttgcaggcatcgtattaaagctctttggcgctagctccaaaggcaactccaacactataacagaagaagagcttcgtacaatagttaaggtaagccatgaagagggtatcatagaaaaagacgaacgacagattattgacaaccttttcgattttggtgatacttcggtaaaggatgttatgatacctcgtatagatatgacagtcgctgatgttaactcatcatatgatgacatcatcactctttttaagagtactatgtatacacgtattcctatatatgaaaatgatactgacaacgttataggtacacttaatataaaagatcttatagttactaacgttgatgattcatttaatataaggaagattatgcgtgagcctttctttacatatgaacataagaacacttctgagctgtttaaagaaatgcagcttaagcgttacagcatagctattgtgctggatgaatatggtcagacagccggtatgataacaaccgaggatctgttagaggaaatcgttggtgaaatacgtgatgaatatgatactgatgaaaaggatgatatgactaagattcgtgaaaacacttaccgtataaacgcctcatgtaagcttgatgacataaatgatgaattaggaaccagactttattcagaggataacgattcactaggcggattcgtatcagaaaagcttgaccgcatacctaaagcaggtgataagcttactatagataatgtttggctgttcgttgaaagatcatcttctaacagggctgaatctatcatacttaagattgctgacaagccaacagaaaacaataactaattattaaaaataatacaccaccggaatgcaatgattaagtcatttgatttgatgcattccggtggtgttattttattagaataaaatttctgttattttctgatttgggattttctgtaaagcttctacacatcatattatccccattaacttcatatactaatatacaaaaaggatgcaacaatttgtttcaaaatgttgcatcccaatataaattcttattagttcatattcttaattacgattaatatatcgtcatattccctcaacactttagcaggtttcttaataaaattctatataaattttctataacattaaaatagcaaatcaatacgcttatcgtttatgttgttttatatattaatcctgtcctcacagattaaccttaagaaacacagaatctttatcatcctgcttaataccaagatacctttttgttatctcatatgatgaatgattatatatctccatgagcattgcgggtggtgtcccacatttccacgcataatatccgaatgtttttctcatggaatgacagcttatgcccctctccatattaagtgaatacgcagcatgctttatgattctgaacgcctgtgaacggctcagatgtgttcctgcatatctacctgtaaatatatagtcacctttttttacgctatccaaagtgtccatatatgtcaaaagtccttttttagtgctgccattaattgcaatcattgattcttttcctgtttttctttcgcatattaccatatgtcttctgaaacactgttcattaaaatcatatacttctccccattttaactctaacaggtcacttattcttaatgcagtattcactcccatgcatatcattgcatagtttctcaagttaggctcttcatccagatagaatcgtctgaatgcctccagttcatctgtactccttattggctgggatgtactcatatgttattacctccatctatatgttttgggatgcaacattttgaaacagtttgttgcatagacaaggaggttaatgtgttaaaactcactatcaaacccggcgaattcatcaacatcggtgatgacgtaagggtcatatactcaggtggttcagaaggtaatatccaccttctcatagatgcaccaagagaactcaatatcgtacgaagcaaggttcttgcaagaaacagtgctaacagctctgattctgataagaaaacttcaagattcatatcaccttactacgctgaacagggactttcacctgaaacactaaacaagatacgccgtcttatcaaagaagataagcaggcacgcaaatctaatgataatacgcagggttagcatggtaacactgcttattatatatctttcataaggggaacggattcccctctgacaaatattttatttacacggaggtatgtattatggtaatacaacacaatttaacagcaatgaatgctaacagaatgcttaatgtaacaacttcagcacagtctaaatcagctgagaagttatcttctggttataagattaaccgtgccgctgatgatgcagctggtctttcaatttctgaaaagatgagaaagcagatccgcggacttacacaggcttcttcaaatgcacaggatggtgtatctgctgttcagacagctgaaggtgctttaacagaagttcactcaatgcttcagagaatgaatgagcttgctgttcagtctgctaatggtactaactctcagacagaccgtaaggctatccaggatgaaatagatcagcttacatctgagattgacagagtttcagagactactaagtttaatgagacttatcttttaaagggtgatcctactaaagcagataaagcttttttcatgaaatctggctataatgttccagctgactcattatacttaaaggatggtaatacagctcttacagctaatacattaaaagcagctcttgaaaaaggggaaaaaatatatacaaaaagtaaagatgatggtcaggctgagactgatttagctacaaaaggtacgagctatgcatatgtaacaaagctttatgatgaagatggtaacgaagtaacagcgaaaaatatccaggatagcacgaaagctgatggaaccactactgcaggtaaatattatacaagcaaagctggtatagcaggaaaaaatgctaataataatatggaaatcgaagcagctaaagcaaaagatttcataaaagactatgatgtagctggagctatctctttcagtcttcatgttggagctgattctgctgaagacaacaagattgccgttaaaattgaatctatgagtgccacaggtatcggtgttaaaggtcttaaggttgacacagaagatgacgctacagctgctatcgaccgtatcgcagaagctgtacagaaggtatcttcacagcgttcaactcttggtgctgcacagaacagacttgagcatacaattgctaacttagacaacgttgttgagaatacaacatctgctgaatctcgtatccgtgatacagatatggctcaggaaatggttaactacagcaagaacaacattcttgctcaggcaggccagtcaatgcttgctcaggctaaccagtctaaccagggagttctttcactccttcagtagtataaaaaaacaaccatctatgctccatgcacatagatggttgtttttttattgcttattattacttattaatacttattaatatttattaattattcactaaggctcatgtattatataacataattatctattccattacctgaattaataagatccgctatcgagatactgccaaaataatcgtttatagtcttctcgaagttttcccacatagttatagtcttacactctgatagattaggacacttgttaggcttgttctcaagacaggctaccggtgccagtgaaccctctgtacactgcaatatactaagcacagaatactcttccggtcttcttgataacttatatccgccaccttttccacgaagcgaagtaagaaaatcattcttacttaacatcgatactatggactcaagatatttttcagatataccctgtctttcagctatatccataagcgttatatattcaccgttatcatgctcagcaaggtctatcataaccctgagtgcgtatcttccctttgttgatatcttcatatattctcctccaattattgcaatcatactcttattgtataaacatactttaccacaatgtttgtatacttttcaagacttattttatattttatgcttttttttgctttcttccatgctttacactggcatactatctgctatacatatccttccatatcctgtcacaggattgggagctgctgcatgcatcttgattccaagcggtctggcaccacgtcttaaatacgcttttagcttctcaccatacatatacctgtcattgcccataactatcccccattgcataagcagggctgcaccacctgttacaaacggtactgcatatgaagtcccggtaacactcactatatcagtttcatatgctgtctgttttcttatctttatatccactcctggtgcaagtatatctggctttataccggcatctatgtagttaacagcagcattattgtccccatggttaacaatgttaacgttgttaaaattgtcataggtatagctgatatctttattccatacgccttttcccctgcctgaaaatgcagcatatgctcctgtatatgaattataagcccctacagatatacaaccagtggctgttgccggaatcgttatagtatcatatggaaccggttttacaaagcctgtcgcagtgtttaaagactgacttgacggaagccatatattatatactccctgacgtatgctttccccatatatgatgattttccatatccccggtgttatataatccttagaaggctgcagattaatatatatttcctgatacagattataaggtgaaggctcacctaatagacttattatatctgtatcaagaatcctgaatctgtttatatatccctgtcctgttatattaaactgcactccatccggaccagcaagcattatcctgtaaacatcccagtagtatttccatatctgtatatctatcgaatgttcatattcacttactgatatctcaactgtatctgtctgtccctgctttattatatttccataatgtactgccttgtctgcctcgtttccacttcctatgcatatactgcatttatagcctgctgcaacatcattgatatagcgttcaagcagtgtatttccatcatgatctccataattaaagccatagcttatgtttattgccactggtttttcatactccacagccttccttatgacataatctatggcatccataaggctggttgtgcgtggaaactgattattatatgagtatcccatcttaacagctattatatctgctccatatgcaacgccacttcttccacaagctattatggcaacattagtaccatgctgtgtattatcagcgcctggtatctgtatacttttcccattatatgtgttatccctatttacaatagctttgtttaaatatgcatttatatcttcctcgctgtattccgtctgctgtgtctggtcatatatgtttaatatccttgtactgccatcacttttcctgaactcttcacttaatatgtctattccagtatctataactgcaacgatgacaccatttccactaagatatgtcccattataagcattgctgatatcatcattcatactgccggcattaccagcccgcacattgttagcacatgccgctgactttgccctttcaagctggaaatatatgctctttggtttttctatatagtctatattcacttcctgtgatataagctctatcgtattcttatctgtcacaattatagcatagttatacaacagttctcttatatatacattatacttttttcttatgttttcaagagttcctgaatactttactattatttcccatgtatcatctctccagttaaaccctgtactaagactctctgaattctcaagctcttttcttgtggcagacaatgaaacgttaagcagattttctattttctggttcatagctttaccatataatatcatctttctgatattatatgatgtaagtgtctaaagtataaaataaaaagcacatccacatccaatatatactggctgcaaatgtgctttaaagcttcatattaatatacgtatgaacatgcatttatcatgttttctttataaattctatcctgcacttaggacacttgatacttatctttcccttgcctcttggaactcttattttctgcgaacagctaggacatctgaatatcctgtgtgtcttactatccgtaattctgaacttgattttattaagctttccaactaccttataatgaaatttcagatacttttcattctcctctgaacgcctggatatattacgtgaaaacaccctgaaatatgtatacacaataccaacaagtgctatcatatatataacgttattccttacgaacatagtaacgataagaagcaccaggcatattaaagataaattccttgagagctgatccataccatatcttccatacatgaatcttgccatcttatctttaaaactattcatcaaaccatccagcctttcataattatatataatatagtgcttatgtaatcactaaataatactctatcacatatataattaaatgcaattaaaaatatataaacaattatgaaacctgcataatatctaatagttcatataagtgcttccatcctctatatctttccagtagaatctgtcctcaagtatcatataactatgtgctgaattctcttttggtatagatactgaacctggattcatatatatatatccatctcttttttcacatttaggaacatgtgtatgcccacatagaagtatatctccatcgcataatgccggtatattcttctcgtcaagcttatgtccatgtgcaagaactattgaatagttgttgaagttaagatatgcctgttctgcaagaacattaaaatcaagcaccatctgatctacctctgtatcgcaattgcctcttacgcatattatcctgttgcgaagtggattaagcattgcaataacttctttgggagcatattcttttggaagatcatttcttggtccatggtataatatatctccaagaagaacaagtctttcagccttctcttccttgaatctttctaacatttgcctgcagtaatatgcagagccatgaatatctgatgctatcattatttttgacatattttattttctccaatcccatataacatgatatatgtttaattatatatttttttatcaatatatttaacaaatccaagcacataatatgtgaggatgatgttaataggcaactgtatcatattctttgcaaatcttattgagaaatagaatgcaaaaccctttccatacattatactgcaccagtatgtaccaagtaaaacatttacaagcaatgtttcaactgtaagtgcaagtatacatcttagtaagaacttaacatcaataaactttaagatgcccttcttatcaccatcaaagctttctgcaaccttcatattacagccataaaagaatagaccatagataaaacctgcaagagccgcacttaacgtccagcctgggaaatacggacctgttggcttgataacaaactgtataaggtcacctaagcctccacatacaaagcccataacaggaccaaacatatagcctatggcacagtttgcaagaaatgatactgacagccttaatgttggtgtcacctgaatagatacaaacacagctaatactgtgtgcagagcgatgagaagtgcagccgcaacaactgacttaatgctcttaaactcttttgctgaaaatgcaaaattcttcaataaaattgacattaaaaaaacctcctttgcagtaatcttcgctctacataggaggttgttcgccatagtatgtagcagcgggatgcggattatgtatcgcaagaaaaccttttcgtccatatggcaactccctgtccatacagcacttaacgcacatattcctactctgctttatattttaatattttacagaaactaatgttgtttctgtagtacaggcattattatatatattgtatacataattgtaaagtacttttttcattttttcataactcacaatcgtgccactctttgtactgccggaaccttatagtcagatgcataacttaaatactgctgaagtgagttctcaaccttatacatatcgagcacctttttcataaatgctatcgtacttttcttatatttcatatgctcaagtacattgacagctgctgcatcattatagcttatggcaaactgcttggcaaaacgcgcgaacttaagcttattcagttgttcaatattataataattctgcatgatttcaagtgcctctataaccctggcgttctcaaaatccagctgcactcccggccgctttacacatatattgccaacctcacaggttcttgattttagtacatttgaatacagctctatcctgtctgtctgataagctgaaaccatatacttgttatacagcctgtatcctatgaataatccgttatcgttattctctccaaagaaataattaagcagtaattcttcgatattcttatctttatcagctgctttaatatacattccctttccagcccttatgataacaccatcatcacataatctctcgactgccctgaaaaacgcatcatgactcatctttgtaaagccattttcatacatatcattggcaactatgacagcgccctctggtgcatcctcaaaatactttataagcttatctctgtatttcatacaacaccattcccgctttaattcatgacattattatatttcttcaagattaatagtttctgttttatcaacatctgaatcatcttctatttctataccttcaagaacatcttctgtttcttctgtatcgtcttctttttcctggttttcttttgtttcatttataacctttacttccacatcatctgattctggaaatgctgcatcatcatcaaaatcttcctcaacatcttcatcatcaacatagaaattcactggaataacttcaacactgccaagtactgctttaccaattatatatacagtatgaataccttcttcatctgtgttttccacataattatgtactcctgcaagctttttatcgatatcgcatgtaacatttactccatcaggaagtatgatagaaacattgctgattatactttcaaagttaatataaacatccttttcaaaaacagccagtgaaagatcaactgtaagcttagatgctatcgccttaacctcgcagcccatgaactcttcgtcttctatttcaacatctcttttttcacatactgcattatacttacgtacttcaagctctgcactatcctgttcttccttagtaagcttattcttagctgccttaaccttatcgtaagctacctttcctgcaactgctgctgcacctacacctactgcaaactttaataaaccattcttctttttagccatatgcttatctcctttacattttactgatatacccgcctggtatatataactgattcataacattttaccattacatcatattatttttcttctcttttagaatatacacagccacaataattctgtctatatagattatactcttttgacagctctatagatcttttatagccttcttttttcttaaaatcagataaaagatactgtgttcccatcccctgtgccactttaagtcctgttttattcaatatgacactgttttttaaagggcttatcgtaagcgttgttgtaaaataatcaaatcccagctgtttagctaattgggctgtttttctaagtcttagttcatagcatttaaagcatcttttaccaccttcaggctctttttcaagccccctgactgttttataaaactcttccggctcataatcaccttctataaaagataccttataaggtgtgtcaaactcccttatgaatcttatctgttcttcaaccctttttttatactctgcactttctgatatgttgggattatagtaaaatacagtaacatgaaaatattttgataaaaactctatgcagctgctgctgcatggtgcacagcagctatgaagcagcaacgtaggcacctttccttctgtctttagtttttctaccattttttcaagttctttatgaaaatttctgttttcaaatggtacagccatatttcttcactcctgtattttattcataaatattttaataacattatagatacgcacttataatcaggctactatatctgataatgcctgtataagtttatccatctgttcatctgtaccaaccgatattcttaaataattatctatacccggctggttgaaatatcttacatatattttctttgctttaagcttttcaaatatttcctttgctggcacactcttatgtgtggcaaatatgaaattagcctttgaatctggaaatgtaaatccaagctttgtaagtgagccttttgccttttctcttgtttcaatgatttttcctacacactcatcaaaataagccttatcattgattgatgccacaccatatttaatagatgtcatattcattgtataagagttaaaagaaaacttaacatcattaagagcttttataagttctggagaaccaaatgcatatcctattctcatacctgccatagaacgtgactttgaaaatgtctgtacaactaaaacattgtcatactcattaaccagctcttttgctgactgtccaccaaaatcaatatatgcctcatcaactataacaacaacatctctgttgtgttcaatgatatctcttactttatcaagtcccatatataatcctgttggtgcgttagggttagggaatataactccgccattttccttataataatcctgtggctttatgttgaaatcttcatccagcgcctgcttctcataaggaattctgtacaggtctgcccatacactgtagaaggaatatgtaatatctggaaaaagtacaggcttatttccattaaaaaatgtaaggaagcacatagacaatacatcatctgaacccactcctacaaagacctgattcttattcatgccataataatcagctatagcactgacaagctctgtgacatccggatcaggatataatcttaatctgtctatatctgtatccataactgcctttgctacttcaggcgctggtggataaggattctcattagtattcagcttaatcacatctgtatcttttggctgctctcctggaacatatggttcaacttttcttatattattctcccatgctttcacgttttcttcctcttttcatatctattcttatatattcatactatgatcagttcttcttaactcccatttcctttgcaacctctgcaaactttggaagagagttaactatagtatcgtaagaaacacaataagccattcttacataacctgcacaaccaaatgaagaaccaggtacaataagtatattatgcttcttagccgtttcgcagaatatattttcatcctctgttggtgacttcacgaaaagataaaatgctccttctggcttaacacactcaaagccaagctcagtaagtccttcatacaatgcttttctgtttttatcatatgcttctatattaacctttgcattaagacatcttgctataaccttctgctgaagtgatggtgcattaacaaaaccaagaatacgtgtggcaactgatgctgctgccttcatatctgctgaatctgccacctcatctggtataacaagatatcctatacgctcaccagggagcgaaagtgacttactatatgagtaacctacaatagtattatcataatacttagtaa

SEQ ID NO: 385 - DNA, 33629 bp, Unknown
  gut microbiota DNA sequence
catctacaccatcatatgcaagctctctatatggttcatctgctataaggaatatctcaataccaagctccttctgcttatcctccataatcttagcaagcttttttatagtttcttctgaataaacaacacctgtagggttgtttggattattaattataactgcctttgtattcttgttaataagcttttcaaactcatcaaacttaggctggaatgtgcttgtatcaggagataccgcaacgagctttgcgccaaagttggatgcataattcctgtattctccaaagaatggtgcaaatgtaagaacttcatcacctgggttaataatagtcttaagtatagtattaagaccacctgctgctcctactgtcataacaatgttgctgctgttaaaatgtgtatcaaatcttttattcagtgactgtgcaacagcctctcttacatcctcaaagcctgagttactcatatatccatgaaggactacagaatcttcttcatcaactacatccttaatcgcctgattaacctctgccggtgccgctacattaggatttcctaacgagaaatcatatacattctctgcaccatatattctggcaagtctgttaccctcttcaaacatagctcttattactgagcttcctttaacaagtgctttcatagattctgctatcatcttattgtcctccatcttttacatgtcaatgtccataaagacatcatatagtctaattatatcaaatcctgcaatttattcaataatcattcaacaatcatttttgcacagtcatttttttgcatagtcatttttgcaatcattcatataatacatctctgaatacagctatctttccctttgaataataaattgtttcatatctgctgtcctgcaaatatttattttcatcataatctttattatgtcctcttaaatcaagtgcgatatattctgtacttttatccgtataatataactcatacaattcttttcgttctgataatctggcgcataaaaatgttgttgctgtaacgctcgcatcatcaggtatatatgacagtccttcatctattatcctgtatgtttcctgcctgtcctcattaaaataaccaacagcatttttaagctttggcatgttatatgacgtaaagaatattatcgtagcagaagctgttatatataacattttcagccgcttatgcatatccatatctgacacattcagtatagtaagatatataagaaggacacccgaaccgaatacgtagtgaaaatatatactatgcatatattgataatctgtcacaaggttaaacagcacatatggacctgtcaggatgtatcttgaccactttttagtaacaagcggtaaaaataaaagaacacccatagtctggattataaatgttatcttacctgatgaaaatatctgtgtcacaagatatgctggattggcaagcgctgtctttatgaccgaaaacatatttccatcgcccttgggtatcatattattataacgtcccgacataacaccagtacctatattttttaaaatcaggcacacgcataaacaatacaaagctgatgatataaaaagaataataccctttttacgttttctgctatcgcacatcatatatagtccaacaaacatcataagtacacttgcatcttcttttatcagccatacaaacaccgctgatatacacattcctatattgttatctttttccataaacaaaagaaacatgcacaggaatagcggaaaaaacatattttcatgtatgtcataaaaacagcctccgcttataaccggataaaagctgtatatgattataataagcgacgtttcccaccttgacagctttctgcttcggcatattagtgctaatggcactacagctgaagctatgagcagaggctgtagtatttccagcgtgacaggtgatgaaaacagcatgtatacaggtaatataaggtaaaacactggtgatatatgcacacacatatgtgataaaaggtagtctctttcacttgtagtattcatcgttcctgttgttttcatataataaaacatctgcgaaaaaagtcccatatcaaaattaggtgagccatatgataaatatcttgtcaccatacagaagctgacaaagcatgtatacaaagctgctgctcctgctataacagcaatatatctttttctcgtaagtgtcactccatttattcctgcatatcctgcataatatataatcgacagtgatacaagtgctgccattgctgctacaaaatatatatcattatactggaaaacgcatatgcatgcataaacaagcacaagcactataagcatgatcccctctatatgacgtgacatatatcccatccttttctcaagcttataaaatacataatataatgccagagtgagtataattatgcatgcatacatgaccggcatgttaacaagcttcacatattccagttcatttattgcagtattcatgctgtttatagttatagtctgtattatacaaataaaacaccacgccataacaaatctaacgacgcagtgttcaagactgattatattctttaatttagttgtagtaaatcccctcatatatcccctttctgattaacatagtaaatcttcgtaaatcgctccattctcatgtttggcgggtcgcaaatacacaaagcctttttcgtgctagcacgaacggctcttcgtccctctacttttgataatacctacgaattgcttcgcagctttgctgctctcgcaattctccaaacattcgaattccgctgatttactttgtaaatcgctccattctcatgtttgacgggtcgaaaatacataaagcctttttcgtgcgagcacgaacggctttgtgtattttcgcccctggtattatcatattatcatatgctgtttatgtagtttgtgaggaacattatggcggctccggtatcggctcgtttggaggtgcattgtgatagtgaaaagtaacttccatctgtatcaaaagagaactttgatgcaagtctagcttttatgtcatccacgtatcctgtaaggtatcttgacataactccacctataataatatctctgtcgaatattacataaagattgttaatacctgttgtaagattatcaagatattcatcaaacagtcttgtacacttatcatctttttcctctaccttttcaaagaactcatcaagtgtcattcctatgtctgttgatatgttcttcgttgacacatatccttcaagacagccgtttcttccacacatacacttcttaccacctggataaagtgtcatatgtccgaattctccatatctgttatgttcacccttcataatagtgttgttgcttacacatgcgccacctacaccatcgctgaccataagatacagcttttcttctaattcttccctgactgtattctcattcttatgtgaataccagtaatccgcaaatgcattagctcttgcatcgttctggacaatataatcatattgtatatgctttgttatattttcagtcttataattcttaaccttaagaggtggtgaaaatataatcatgctgttatcttcgttaaaaatacctggcatagtgattccaacacctaaaagattgtcctttgatatatgattcgcctttatgacattttccacaagctcggataccttgactccatactcactatcagtagcaaactccgtcttaaggcttatctcatcttttatttccccattaaggtctatgagacttgtccttatctctaaaggacatatattgacacttacagcatatctggccgctgcatttacagttatcatctgtgcttttcttccaccagtagaatcaaagtttccctccagaagaataagtccttcttcttttaaaagctttatattctggttgatagttggaagtgataatccaagcttatcagcaatctcctgtcttgatatgctgttactgttatatatgagcctgaatattctgtttttattatattttctaacctctgatgtggttattctagttgtagatatcatttattcaccaaacactgccttataatctttctggaacttttctatacctgcatctgttaatggatggtgtaccatctgctctataaccttatatggaactgttgctatatcagctcctgcaagtgcacagtctgtaatatgtattggatttcttacacttgcacagataatctctgtctgtatatcatagttagaaaatataccaactatatcttcaataagctgtatgccaggctgtgatatatcatcaagtcttccaaggaatggagatacatatgcagcgcctgccctggctgctaaaagagcctggttagctgagaatataagtgttacattacacttaatgccctcagatgaaagtaccttgaccgccttaagaccttcaactgtcattgggatctttactaccatgttaggatgaatagctgctatttcacgtccctctttaatcatgccttctgcatctactgttgttgcctttacttctccactgataggaccatcaactatacttgtaatctcttttattacttcattaaaatctctgccttcctttgctattaatgaagggttagttgtaaccccacatataactcccatatcattagcttttctgatatcatctacattagctgtgtcaataaaaaatttcatagtgtaatctcctcttattcataatctgctttgataatcttataaatacacataaaagataatctcataaatccacataaaagcacctgtattatgcatatctgtatgattaagccatgttatatacagctacatctcatcaaataccggctttaatgctggatatatctgtttaaatgtattataacgtgaattgtatctgtctgcaatcgctttttgtggttctattgttttacatatcttaactatattatctgctgcttcttttacacttccatattcgccagctgcaaccatggcaagcatagctgctcccatagacggaccttcctctgattttaaaaggtcaacctttataccaagtacattagccataatacggcaccacagctcacttttggcaccaccaccgcacattctggtttctgttatattaataccaagccccttagctacctcaaaggaatcccttattgcaaatgctactccctcaagtaccgcctgtgtcatatctgttcttgtactatccattgtcattcctgtaaatgtagctcttgcaagtggattgttatgaggtgaacgttctcccatcagatatggcagaaaataaacatgattgtttcctaacatatcatctgttatacattcctgtgctgatttataatccttatctttaagaatcgtatccatccaccagccattgcatgatgccgcacttaacatacagcccataagatgatagtatccatccgcatgatcaaacgaatgcagagcattgttattatcaacaccaaactctttgttagagatgaatattgttccacttgttccaagtgaaatgttgcacataccatctcctactgttccagttcctacagcagctgctgcattatctcctgcgcctgcggctactatcaccttgtctgtcaatccaagtgtatcagctgcttctttagtaaggcagccgaccttttcatagctttcataaagcttaggaagctgttttctggttatgccgcatattctgatcatttcatcagaccagtcacgtttctttacatcaagcagtaacataccagatgcatcagaaacatccgtacaatgaacccctgtaaatctatacgctatataatcttttggaagcattattttagctatttttttaaaattctgtggctcattttcctcaacccacagaagctttggcgctgtaaagcctgcaaatgcaatattagctgtatattctgtaagcttatattttccgataacattattaagataatcacattctttagttgttcttccatcattccataaaatagccggtcttataacattatcatcttcatctaatataacaagcccatgcatctgtccaccaaagcttattcctgcaatatcgtctttgttatatcctgcaacaagctctcttatgccttcacatgttttatcataccagtcatacggattctgttctgaccagcctggcttaggaaaatctatcggataactcttagaaaccgtgttaactatgttacccgaagcctccataagtataatctttactgatgatgttcctaaatccactcctatataatacataaatgacctccttgttttgcaaagcaaaatgcgactgcccctgcatgagcagatgtatttaccgctgttcccataaaataagcatttgaaacttaatgacactcatattatctcattttatattatctaataaaaaagcggaatggactaatattatgatcaccagataagcgatatgctgctgtaatctcttatgtccatcccgctggttaactggctaaagcttaactttattctttagcttagctttagtaagtaaatatattaaacctgacgtccaaagctatgcaaatggattctcagacttgtaaagtacacctgctggctggttataagcaatatcttcaacaccgatatatttaaatacatcaaataatgcttttccaaaatgtccaaatgcaactgcaccatgatgaggataattcttctctataagtacatgtctgtagaatcttcccatctcattaattgcaaatattccgattgaaccgaatgaacgtgttcttacaggaagaacctcaccctgtgctatatatgctcttaactggctgtcagaagtactttgtaatctgaagaatgtgatatctcctgggacaatatctccctcaagagttccattagtaacctcttctggaagtgaacgtgccatgatcatctgattcttcatctcacagaacgcaagtttgcctgaagctgtgttaccacaatggaagcccataaatgtatctttgattgtgtagttaaacttacccttgatatcttcgttataaatatctgaaggtaccgtattgttaatatcaagaagtgtaacggtatcgttacttacaacagttccgatgaactcactaagtgctccatatatatcaacctcacatgatacaggaatacccatagctgtaagtcttgaattaacatagcaaggtacgaaaccaaactgtgtctggaatgccggccagcattttcctgctatggcaacatactttcttgagcccttatgtgcctctatccagtcaaggagtgtaagttcatactgtgcaagcttagaaagaatctctggcttcttgttaccagctccaagctcatcctccatactctttactactgaaggaattctttcatcaccagcatgcttgttatagctttcaaaaaggtcaagctctgagttttcttcaatctcaactccaagattgtataactggttaataggtgcattacatgcaaggaagttattaggtcttggaccaaagcttattatcttaagattattaagtgcatatacagctcttgcaactggaaggaactcatgaatcatatctgcacattcatccgctgttcctacaggatagtcaggaatataagccttaacacctcttagcttaagattatagcttgcattaagcataccacagtaagcatctcctctgttgcctacaagtccgccattggctgatgtttcctctgctgctgcaacaaacatcttagggccatcaaaatactttgcaagcatagtttctgatatttcaggaccaaagttgccaagatatacacaaagtgcattacagcctgcttttcttatatcttcaagtgcctgctgcatatgtatctcactttctactatgcatactggacattcatagatatctgctgcatcatacttgtttttatatgcttctacaagtgcctttcttctgttaactgataaactttcagggaaacaatccctgcttactgctacaataccaatcttaatctctggtttgttattcattgtaaaatcctccattctgttaaacctgaatatggaaaatgcatatctgttatcgcattttccatatccggttatagtaaccctgtacttttaataaatacattgcaaaaagttacttatataatattatttttctttgtattttgcaatatgtacaatgatttttatttaacattttttaaaccagccccatacataccagttatatattttatctgttttctggtgtatgccatttccattcctgaacctcaggaagatccatgccatactcacttatatactgcttatgtgcaacaagtgtgtctctcatcttctgcagaaggtatgagcccttgtttccaagctgaggaagtgcattaataactgcctcaacaagatgatatctgtcaatctcattctgtactctcatatcgaatggagttgtgattgtaccttcttcctgatatccgaatacatgaagatttctgttatgtctgtaatatgtaagctcatgtataagtgttggatagccatggaatgcaaatataattggcttatcctttgtaaacaatgcatcataatctgtatctgaaagaccatgtggatgctgtgtattagactgaagcttgaacaggtcaactacgttgataaatctgatctttaactctggcatgttgtctcttaatatagttactgctgcaagcgcctcaagtgtaggtgtttcaccacaacctgctattacaacatctggttcttcaccctggtcattacttgcccattcccagatacctacgccctgtgtacaatgcttaacagcctgttccatagtaagccactgtggtcttggatgcttagatgtcacaagaacatttacataatcacggcttcttatacagtgatcaaagcatgaaagcaggcagttagtatctggtggaagatacattcttacaacatctgccttcttatttgcaatatggtcaaggaagcctggatcctgatgtgtgaatccattatgatcctgctgccatacatttgatgaaagaataaggttaagtgatgctatagactgtctccatggaagctgtgaacatacctttaaccactttgcatgctgagcagccatagaatcaactattcttataaatgcttcatagcttgcaaagaaaccatgacggcctgtaagaagatacccctctaaccatccctcacacatatgctctgaaagcattgaatccattacacgtccatctttagaaaggaattcatcattatccttaagtgcattgttccagtctctgtttgtttcttcaaacacctttcctaatctgttagacatagtttcatctggtccaaagattcggaaattctttgtttcttcatttagcttaaagatatctcttataaagcctccaagctcaatcatatcctgaccttccttagctcctgggaatggaacatcaacaccataatccctgaaatcaggaagtcttaagtctcttaaaagcttaccaccattggcatgtggattagcacttattctatgatcaccttctggtgcaagtgcttttaattctggtatgagtctgccattttcatcgaacagttcttctggcttatagctctctaaccattcattaagctgctgtaaatgttctggcttatccatcattattggtacctgatgtgctctgaaggttccttctatttctttgccatcaacaaccttaggacctgtccagcccttaggagtcctaagaacgatcataggccagaatggacgttcagtttttccttcttgtcttgcctgtctttgtatttcctttatctcttcaataacagtatcaacagtctctgccatctttttatgcatagtcataggatcatcaccctcaacaaagtatggcttccagccacagccatggaagaagctctctatctcgtcatgagatatacgtgagaatactgtagggttactgatcttatatccattaagatgtaatataggaagtactgcaccatccgtaacaggattaagaaacttattagagtgccatgcagttgctaatggacctgtttcagcttctccatcacctacaatacatgtagtgataagatccggattatcgaatactgaaccaaatgcgtgtgctattgaatatccaagctcaccaccctcattgatagaaccaggtgtttcaggggcaacgtggcttgagattcctcctggaaatgaaaactgcttgcaaagcttcttaagaccagccatatcctgacttacattaggatatacttcgctgtatgttccctcaagataagagttagctacaaagaagttaccaccatgtccaggaccagatataagaaccatatcaagatcatatttcttaatagccctgttcatatggcaatatacgaaattctgtccaggaactgttccccagtgtcctactatctttttcttaatatgctctgcctttaaaggctctcttaaaagagggttatccaaaagatacaactgggctgctgataaatagttagctgcacgccaatatgcattcatcttctcaagatattcttctgttatcggcatcttttcaacacacatttcattattcatcttaattctgtacctccattctgcacattattgtacatactgttacttttttattctttatatcattttgaaattgcttttataaatgtactttataaaagtgattttatattagcacattatgttcaaatgtcaatacataaaaaaataaaatacaaacaaaatacaattatatttactatatgtttttaaataaaagaaaaaatttaaaaatattactttacaaatataaaatatagtgttatagtaacaacatgaaaagcgcttatcattatatctaagagaattcatattaagttttatgcttatacatataatagttcgatatgtatcaactcaatatgcattatcattacctgtcaggtattttgtttcccattaactttatttttttataagattattttttgttttatcatttcatttactttatatatcaaaaggaggtattttatatgcatgatatcatagaacattacggaaaggtcataatagcccttgcaggagtacttgcagcacttcttctaacagctgctgtcgttacaactatttcaaacaaaaccaaaacagctgtcagtggaatcgaatatgaaacacagatccgcaatgcttttaacacgccataatataatgcagctattaacctgttgtgatgtgattttgctgcatttttaacagatgtgcagaacattgtagtaaagacgaggagattatgaacagcttagacttaaaagaattaatagaaaaaaacaaagacgaattattcagcgaaatatcagacgaaatagataacgaaaaaataactgatattgaatgggatggctataatctatggataacagagcttggcatcgggagctacatatcaggcaaggaactaagcgacaagtatgttgaaaatgtatccataaagcttgctaacattatgggtgtacagttcaaccgcagccgccccatacttgaagctaacacagagaacttaagaatatctatatggcatgaatccagatgtcagaaaaaaagtatgtccatcagaaaaatacctgaatatctaagattcgaccatatgacacttatcgaatccagatacgctcctgaaagtataataaatcttcttgaaaacagtgtatctgcacatcttagtattgttgtcggaggccagcctcatgctggtaaaaccgaacttgtcaaatatctcacaaccaaaatcccacacaacgaaaaagccggtgtatatgaagacaatcaggaaatccactatagaaaaatcaatcctaacaaaaaatgtgttgagtttttcgtggatgataagattacttaccctgatattataaaagcagggctaagacataacattgactggatcctgctgtcggaatcccgcggtcctgaggttgcacatcttctaaacagtttatcaaccggctcatattgtatgacgactatgcatcttgatgatgtacgagatacaccggaccgtatgtataacatgcttggaagcagcaacataaacgaaagattcataaacagcatatataaatacatcgatctggtcattcttatcgaatgtgataaacatgaaaaaagacgtataaaacaggtaggctttttatcacgtgaaaacggaaacaaccaatgtacaataatatatgaggatggctctttcacagatgaaaaaataccggaaactattataaacaaattcagtaaaaaggggattatgaatatatatgaaaaagttaattaaatacttttccttaacttctatatcaggtgatatatctgaatatggatatagcttttcactacgtaaatacatcatctcaataataggtgtaactggctgtattacattggttggtcttattttcaagctgaagcttaaatatatactatgcataataatatgcagtcttcttattcttcctcttcttataagaaaaaagtaccacaataatcatagaatgaaagaattctcagatgttgatatttatcttcatcagatggtttattcttttatacgaactcccaaaatacacactgcactatcagatacttatgctattgctgatggtcatttaaaagaactgcttaaagaagcacttgacgaacttgaatatggtatgggagataatgtatattatgaagctcttgaaataatcgaaaaaaactataactgcagccgtgtacgtacactgcaccatttcctgataaatattgaaactaaaggtggcagatataaaaacgccctgcaggtgcttcttaaagactttgacagatgggtgaaaaatatatatcaatacgaatatgaattaaaaataatcaaacgtgatacaactgccggcatatttataagcatcggactttcattaataaccatgcttatgtgcagcattcttaacaagtataatacaggctccgtcagtataaccaataactatatcttccagcttagctctactgtctttttactgctctgtatcttcttctacgcatatacacagaccaattatggcagcagcctgctaaacgactccgacaaggaagagcaatctgtccgtaactataagcttgcttataagactagtatttcatctgttattctgcacgtattaccgctgattatcatacttatagctattcttatatttatgataataaagaaaaaatatctgataacagcttatatttcactcgctgttttaaccattctctcatacccttttttaaacaaaagaagagctaaaaaacaggttataaacaatctcaggagctgcttttctgactggttaagaaacgtagccattaaccttgaaaacaaaccacttattgcttcaattgaagatacatatgatgattgtccttatcttatcaggctgtcacttgataatttcatacgcgatatagaagctgatccatcagacataaaaccatactatgaatttctttccgaatacaaacagaccgatataatggcaacaataagaactctttactctgtatcagagcttgatgaaaaaggtattgatgaaacaataagcactcttatacagcgcaataacgatctaatcaacaaacagactgagcttagctataaagacaaagaaagcatattaaaattcatggaatacatacctgtattttttatggctatgaaaatgtctgtagacatgatgttaatcataaccctatatctttaatcacacaaaaatcatttaaaggagtacttatggatattattattgaaaagcttggcgaaattggtgtcgctatcatatttatgctgcctgccataggcacattttcagaattattatataaaactatgacttaaaggaggctgctgttttatggaatttattataaaagaatatggcggaatcataatactgcttatctgttttagtatagctattggctttatatcagctttccttacaaaatgtgaatcgattgaaaacacactgcttaatgttttgttttatcactgacatcataatattcagggcaaagcttatctgattttcatggtcctgaataataatacatctaagaaaggattatccagtttaatatgaaatcaattattgaaagctctgtctatcttgtcataatggctcttatctgcataatctcacttgattttatatttatcaataaaagtatatgcaagggtcaggaattacagcaatatataaaagatacaataactatacatgccaacagctctccctcccacgatatcgacaacctgacttaccataagataaacaatctcgctatgcagtataacagctctatagacttagaatattttgatacagttaataattacgactactataatgttactattatgtatcctgttaaatccggcatatttaatatagaaaaaatgtgctcctttagttcaatagtatcagttattaaagaaacggggtgaacttatgcgcattgcaatcagcagcagctgcttaaccattataatattactcgtaattatgattcactgttcaatcatcaataaaaactatcgcgacatggaaataaaccagaatatcaatgatgcctttgattatgccgtaaaaaagacaacgtcgtcttataattctggtttatctggttttacatctactgtaaataatagcgaatctatgctgcatgatatgatgcttatatttaacgaagcctttaaaaaaagcatcaattctgatggaacttttactatttctgttttatatgctgacacagataatatgcttatagacatacttattacagaagaatacagctatggatttatgaatcagaagggaaaaacaagctgtgaacgtactataagatttaaaaattgacataaccaatgtttttatctataatttttacatatttttaacattcaatgaataatagaaaggattacttatatggaaattcagatattacactggtttgaatctcttcataacccgataacagaccctataatgtactttataacaactcttggtaatggagggatattttggataatattagctgctgctatgcttattatattgccaaaacgatataaaaaggttggtctgtcaatggcaatagcccttattctttcactcatcttctgcaatggtattatgaagcatatgtgggcaaggcctcgtgcgttctgggttgaaggccagaattttgtaatcagtaacaattttgaaaatctttacggaatatttcagacaatacatgattattcatttccttctggtcactcctctgcatcatttgcggctgcaacagctatattcatgtggcagaaaaaagaaggaactgcagcacttgttcttgctgcattaatagctgtatcaagactatatttaactgtacactatcctacagatgtattagcaggaactgtaacaggcattatatatggcatagctgcttactatatcacaaaacttcttatgaaaaaaataccagctatgaataagatatttaatatatagaattatattttaatgaagccgggggcaaaaaccccaggcttgcttttatacacacggattgttcttatgttacgcactcccacaatcccggtatcattttaattctttgtaagctctgtttcgccagaagcacttgtaagtgtaagctttttacctttattagataacttgtatgtataatcttctgtctgtgttccatcaagaacagtcttattgattgtaagcttctcaccatcaactgaataacttatatttaactggataccacttatagacattacacctgttccatcctcattaaaagtaaaagctatctcatagcctccgttactgcctgtccagcttcctgtaagctctgaatttttgctgtttttacatgccacaaaggacaacataagcataattgcagtaacgcatattataattcttttcattttcttcatatatttattctccgttctgtaatctgttttattgttctgacagcatagtaactatcctgtcaaagttcatagcatgtgatgcctttataagaatactgtcaccattttttaaaatactgccggcttctttttcaaaatcatctatagtttcatagctgtgtatatcacactcatatgcttcataatgtgtttccttgtaatcagccgctcccatagctatatgctttgcaagctcacctatagttattaacacatctatattccttgttcctatatactgccctacatcataatgaagatttttttcatcacttccaagctcgaacatgctgcctaatatacatacctttcttccaagcgccatattaactacatcaaccgatgctttcattgaaacagggttagcattatagcaatcatctatgattgtatatttatctgtttttattatattgtttcttcctgctatagtttttagtttagagattcctgtctgtatctggacactggtgagtcctgactgtgcacctacgcaggctgctgccagtgcgttatataccatatgatatccaggtactggaactgtcacttcaaatgctttgcttgtatcatcacagctaagaccattgataacaaagcttgttccatctaacccaagattcttaatatcactcgcataaacaccatccttgtagctgattccgaatcttaccggtttttttccatttacctcatcaactgttataagcttatcatcatcaccattaagtatggcaataccatctggtttaagatgtttaaacatctctgtttttgccttcagtattccatctcttgtcttaagattttcaagatgacacaaacctatattagttataacacctatatcaggctgtgcaatctctgatagtctttccatctcaccaaaatcacttattcccatctcaagaactgctatttcatcatcatctcttaatctgaatacggtaagcggaagtcctatttcgttgttgaagttgccctctgtctttaaaaccttatatttttcttcaagaacatagcttattgtttctttcgtacttgttttgccaacgcttcctgttatgccaacaactttgatatcaagattatttctgtacaataacgccagatccttcaatgcctgaagacttgactttaccctgatatatgaattcttctgtcccggaagttctttttctgatataacgcagagagctcctgcttcaaaacagccatcaatatacttgtgtccgtctgttctttctccacatatcgcaataaacaggcttcctttagtaacctttctgctatcagttgttatatcagaaacttctttttcaagattagcttcatttccataatatacgccattacaggcttctgtcatggctcttaacgtcattccacgcatatttgttctccatatttttattcatatcttttaagcgatatctctattatcttttcagttaattcatcatatgaaataccagctgcctgtgcctcctgtggtaaaagacttgtagctgtcataccaggaagggtgttaatctcaaggcagtatatgctaccatcttctgtaagcagctgatcaactcttgcatatgtagttaccccggcagattcacatgctttttctgcccatctctgcattttttctgatatctccttaggaaggtccgctggacatgtctctttagttgctcctgccttatacttgtttttataatcatagaagccttctaaaggttctatctctataactggaagtgcttttccatcaagtacacctacagagaattccctgccctttatatattcctccacaagtatattatcctcatacgaaaatgcttctgttaaagcactcttgaattcagattcattggaaacaatagatacacctacacttgaaccaccacagcatggcttaacaacacaaggataaggaacgtattctatcttatgtcccttcttaagtgccactcccttaggcataggaataccatctggaacaagtactttctttgtaagctccttactcattgatatagcactgcttatatagtctgtacctgtatactttattcccataagctcaaacactgcctgaatcttaccatcttcaccattgcttccatgaagtcccatgaatacaatatcagccttcaaacagagtgctaacacattatcaccaaagaagcccttgccgctcttttttctatctgcaagctcatcatcaacaagaatatcttttttcttcatatcagctgctatcttttcaagatcattgccgttatcatcaaaaaatgtctctgccgccttgtcttctattccaaaaaatacatctataatattagcattatgaccatttcttctaagtgactcacataccttaacacttgtcataatagaaatgtctctttctgtacttgtacctccggctaatactactatattcataattgacctccatcatcatacctatgtgattatttaatttctcttgttaccgcgtaaataatatcacttattaacaacttatgcaatcagtattatatttagtctaacttttccatatacttttccacaatatccacatagttatacacattttaagtgaattgcaaattttattgaatattttttctttttatgcatatattatgttaattgtcagataattatgttattcaaaacaactattttactatattatctgaatagtttattattttttattattgtcttaatctaaggccttcatattttgtatgtgccatcagacattttctaagtgaattatatctgtctgttatgtctccctctggaacagccacctctattgactctgccatgatatctataagtccatcattaagttctcccctcattgatgtgagaatatcaagcttctctttataatcatacgcatcaaggaatcttataagcttgctgtcttcctctgattcttccgattcttctgattcttccgattcttctgattctttcgattcttctaattcttctaattcttctgatttctctgattccatattctgattgttctcttcataatcagcttctagtgatttacctgtctttatatcaataagttcgaatctgtatttttgtaccacatcaggatattttatatgatcgacttcactaagaaacatatcatatggtcttacatacatctcatagctaccataaagtccctgatatataaccatcttttccttagtttcagaatgtattgctgttcctttaacctgatataatttatctttaaaatgtctgtaaaatccaccaatgactaattgtcttgccataataaacctccattcttgcgcagcttctttgcgcagctcaagtttatacatagtataccatattctatgtcatactctcaatgaactatgtgtgaaataatttatctgaaatatctataaaatattcaccaaataatttatctgatgaaacaacttatcaatgatttatataaacaacaaaaccatgcatttatacgttttatgggttataatacatctaaaataccagatacattttaacttgagatgcgcaaagaagcagcgcaagaatggaggattactatgaaaaaggttgatttacatgttcattcaacatattctgatggaaccaacactcctaaagaacttattaaacttgcagagaatgaaggcttaagtgctattgcacttactgaccacgatactcttgatggtatacccgatgcccttgatgcagctaaaaacagctctgtcgaattaattccaggtgttgagctaagcactaactttaataacaccgaggttcatattgtcggactgtttttagatcataacaacaaacagattaatgattatcttatataccagcgccagtcaagaattgacagaaatatccagatgtgcgagaaattctgtgatatcggcattaacatcacttatgataaaatgtgtgagctttatcctgatgctgttattacaagagctcattttgctgattatcttgtaaaaaacaaatatacaggtgatagaaatgaagcctttgacagatatttatcacctggaaagccctgttttgtaaacagacacaaggttgacccagaagaagcaatagctgtgatacataaagctcatggtgctgccatactggcacatcctgttttatatcacttaggaaaagaccagatgaatgcattgcttgaacatgtatgcagtgctggcattgacggaatagaagccatatattcaacatacaagccggcagatgaacgctatataagaaaaatagccacaaaacataagcttcttatatcaggcggctctgattatcatggtgcaaacaaaccaaacatcaagttaggacgtggtcttggacatcttttcgtgccttatgaagtacttgaaaagctttctgaaaaagcttctgaatattaacagccatataagcaggatccttattttcaggttgcagacaaacgcctagcgttcgtctacgacctggaagatgtaaaacttaagatacagtgattcatcagccgcccataatataggatggtcaggagactgtgttctgtattctatctgtcttagtcttttatgtacatttcttgctgcttcaccgatagtcttggtaaatagctctggatccataaaatgtgagcatgagcatgttgcaagaaatcctccgtctttaacaagcttcatacctcgaagattaatctccctataacccttaactgcattcttaatagaatttcttgacttggtaaacgctggtgggtctaatataacaacatcaaacttttcgcccttcttctcaagctctggtaaaagatcaaacacatctgcacactggaaatgaactatattctcaagtccattaagcttcgcattctctcttgcctgacttactgcaagctctgatgcatccactccaagaacgcttgtggcacctgatattcctgcattaagcgcaaaggaacccgtatgtgtaaaacagtcaagcactttagctcccttacagagatgtccaatagcccttctgttatatttctggtcaaggaaaaagcctgtcttttgtccatcctgtacatcaacataatatttcacaccattctcggctatctctacctttgtatcgaattcttctcctatgaagcccttgaatctatccattccttcaagaagtcttactttggcatcgcttctttcgtatacgccacggacagtcataccattttcagctaaaaccatctttagtttatcaactatcaaaggcttaagtctgtctataccaagtgctaaagattctactacaagcacatctgaaaacttatctataactatacctggcagaaaatctgcctcaccaaatataagtctgcatgaagatgtatcaactgttttaagacgatattctactgctgcccttaccctctgttctataaatgcttcatctatatttctttcatgtcttgataacattcttactgttattttagactttctgttaacaaaacctatccccataaaatatccatcaaaatcatgaagctctataagtcctccatctatgacaccactggaatatgtatcaatttcgttatcatatatccacataccaccagccttaagttcacgtccgccgccttttttcagtgttacttctcctgttactttaaataaatcttccatgtatatcaacctctcttatctattatgattttatcattatttatactttattatgactttctttcaagctttattctatgcttatttttcttaattaaaccatacactatatatttagattttttagtttttcgttcacgcacattatatattttttttgatattttgtcattataattgtatgatgaatgagtcaaaatttacttttgacattcacatcattatattagtttaaatcattaaaatactaagtgtatacatttttatgactcatttttcccgaccatataaaacataaacacgcctccggctgctattatgagtgcaagcagtttaagccacgaaaactcagcttttttacttccaaacaatccaaaaagctctattaaataagctactattacctgtgacaccactattgttatttctgctttggctattccaagctctgatacactcttaactactgtaaatgtaataaatgctcctataacaccgcctaacagtgacaccttgttatcaactcttaacaccccgctaacttcaggtcttccattaaaaaaccacataataagacacgttgcaagtgctgtcagctgtacaaagccagctgccacccatatactgctgcttttcgtaacatttgtgttaaatattccctgaatactcataagagctccggatacaatagcaataataaatcctgccatctaaccaacctccataattagtttaactactaattaatattagttaaatagcaggaattatacccgttttatatatgtttttataacctttacagctcttataactataaagtccttatcttatagatgtaagaaaactctctacgcctttatggaactcattgtacgcatcatcaacactctttccatcccatatctgatgaataagtatttcatatcttgtatatatattctgtacgcccacatacttagctttaactatactatcagaatatatatcatgcaacatattataatctgtgttatctgcttttctcccttttttaataaggtctgcacgtgcactcacatgaccgctgagtgcctgcatatccgctgcataatcatatgatatcgctctggcaactgtctttgcaactgaaatatcagatgtatacggattgacaacagcaagtgtcgttatagacataggaactgattcaagaccctctgaaagataaggaaccggtataatgccatatgacacacctgaatcatcaatcttttttaaatcacttgtatttactatcgtatacagaagtttattctgtataaactcatcaagacatgattcgtgtgttgactcatttctgtctattccaaatgtgttttttaatgaagcatattccttaagtgctctcttaaagtttagctcatctatcgtaaatatatcagcattctctgatacatctccacctatattcatatatcgtccaacgtatggataattaataagcatatctgatgcatcaaaatcaaataccttctttatattctggttttcttctgtaacctggtaattatcacttatctgttttatctcataatatgaatcaacagatgaagcatattttttattatataccataaccggcatatcaaagcttacgggataaccatataactttcctttatatgatgctgatttaatagcagcttttccatatatattttcgttatatatatcaccgtatgaatcattttcaagcataagtccaagaagatatgccttatcactgttctctgcagacataagatatacatctggtgcattattgtttcttacagtttcagtatataatgtgtctattatatcctgtgcttcaatatacacaggattaaccgtaacaaggttattagcagctttaagccctgatgcaacggtattaaggtatctttcataatctttattatcataccagacattaatcgttacaggtgtttctatatcaagttttcttgcttcctcatccctgtcagtcccgccacatgccgttactgatataagcataacacataccatggttactgatataagtcttttaattatcttcataatctttccaaccttttcatatacttaaggaacactcaaccagataatccaccattgaccatacgatgttttttatgctttagaatgacttctttaatttatctatcatttcatcaacatcactcttagttatcacaagtggtggaaccattctgattacattagttcctgctgagaaaagaataagtccgttatctaatgccctggctataacatccttaggactgattgaaagttcaagtccctgcataagtcctagtcctcttctttcaactataaaatcatagtccttcacaagctcatcaagcttcttttccagataagctgatacttccttaacattagcaagtatattctgtttctcaaacaactcaaatactttcgtagctgcagcacatgcaagtgggtttcctccatatgttgtaccatggtcacctggaactaatgcctttgccacctcttctgtagcaaggaaagctcctacaggcacaccacagcctaaagccttagcaactgtaagaatatccggctttacgccatactgctggaatgcaaacattgtacctgttcttcccataccacactgtatttcgtcaagtataagaagaatacccttctcatcacagagctttcttacaccctgtatgaactcattagttgctggatatattccaccttcaccctgtactgtctcaaatataatagcacaagttttgtcatttaccaactgtttaacgctttcaagatcattataatttgcaaattttattcctggtatcataggaccaaatgcttcctggtaatgtttattacctgtaacagcaagtgctcccatacttcttccatgaaatgaatgatgcattgcaatgatttcagaatctgttcttcctgtctttaaataagcatacttcttagcaagctttatagcaccttctatagattctgtaccactatttgtaaaaaataccctgtccatgccagatgccttagttatagcctgtgcagcgctgacagctggttcgttataaaaatagtttgatgtatgaataagcttatctatctgtgacttaagtgcatcgttatattctttattgttataaccaagtgcgaatacagcaatacctgcaccaaaatcaagatactcttttccatcagtatcatataaccttactccatcacctttatcaagtacaatctgatatctgttatatgtatgaatcagtttttcttcagctgtttctataatctgtttagtttccatatacttttcctttcctgatatacgataaaaaagaataaaaccatatgctcttttttatcatacattttatgacgttttatgatgttggaatcattctgctttcttaagccttacgatattacagatttgtttcaaaaaacttctctgctccttctgaaagaatagctgtaccaacacccttgttagtaaatatttcaagaagaaggcaatgtgggatacgtccatcaagaatatgtacccttgaaacaccatgctcgatagcatctatgcagttattaagctttggaagcataccaccgcctattgtaccacctgctaaaagctttcttgcctctgttgtagaaagctctgatataaggcttgatttatcgttataatctctgtacacaccctctatatctgttaagaatgcaagcttctcagcattaactgcccttgctatggcacatgccgcatcatccgcattgatattatatgaatggaaatcatcatcatatcctataggacatataactggaataaagtcatccttaagaagtgaatgtataagagttgtgtcaacatcctttacttcaccgacatatcctatatcctcaccctttgaatatttcttttctaccttaagcattccaccatctttaccagatatgccacatgcctttacaccaagctcctctataagcgatacaagactcttgttaactctgttaagaaccatctctgctatttccatagttggctcgtctgtcactcttaagccattcttgaattctggtgtcatgcctgacttttcaacccacttactgatttccttgccaccaccatgaacgataataggcttgaaacctacaagctttaaaagaactacatcctgaataacctttcttttaagttcttcatcaaccatggcgcttccaccatactttacaacaataatctttctactgaacttctgtatataaggaagagcctcaactaatacctgtgctttttttaactcttcttccatatctattgtactcatttttgactccttaatataatttactctttcttaatccgtacactcacgaacacgcgctatcgcgctcttccgtcctgcttcgcatgactgttcgttcgttaatggcgcatgaaaagtaaatgtctgcttcgcagacgcttccttttcatttgcgctcattataatataatttactctttcttaacccgtacactcaccttgttaggaacgataatctgcatttatctttatataatcaaatgtaaggtcgcagccccatgccgtagcctctgcgctgccctgctttatatctgctatagcagttacaggattctgtgaaagtatttctgttgctttctcctcgctgtaatcagtagcagttccgtcctttactatctgaagctttccagctgaactttcaaagaatatatcaaccttttctggttcgaaatcaacgcctgaataacccatagcacaaagaattcttccccagttagcatcgtgtccgaatattgcagccttagtaaggttagatgtaactattgactttgcaagaatcttagcctgttccttatctttagcaccctttacctgtacctcaaaaagacatgtacagccttctccatcacctgcaatcatcttagaaagctctgtaagaacatagcttaaagcctcatagaaggtatcataatctttacatccttctgtaatcttctcgttaccagcctctccattggcaagaactaaaactgtatcgtttgttgatgtatctccatcaactgatatcatattaaatgaatcctcaacaatatcacttgtcatcttctgaagtgccttcttatcaataacagcatcggaagttataaagcaaagcatagttgccatatgtggatgaatcatgcctgcacccttacacataccaccaactgttactgtctttccacctatttctactgtacatgcaacctgcttgcttcttgtatccgtagtcattattgcctctgctgcaagtgtacctgcttctttagttgaatcaagaagctctggaagtgctttgattccagcacacattctgtccattggaagctgcatgcctataactccagttgaacctaaaagtactgacttagctggtactccaagtacttctcctgctgtctttgcttcaagtgcgcaggcttcatcaccctctgtacctgtgcatgcattggcaacaccgctgttaacaactattgcatgtgccccctcttcactgtatacaatgctcttgtcccactttacaggtgctgcaaacactctgttaagtgtaaatgttccagctgttacacatggcttttctgaaaataccattgccatatcctttttgccatttttatacttgatacctgctgccatacctgctgccttaaagcccttagctgctgtaactccgccttcgataatttccataatcactacctccgaatttcaatatatattattaacattgctttgcaaatttcgtaatttttcttttcaagttgcctatgcaacttgtatacatcggattgcccctgcaatccgatgtattattatgggaacataggtgccattttaagtccctcattctcttcaaagccaaataacagattcatgttctgtactgcctgtcctgctgcaccttttacaagattatcaagtgcacccatagctatgattctgtttgttcttggttcaagcttgaatcctacatcaacaaagttgcttccttcaacccatcttgtttcagggcatacatccttaggaagaactcttacaaaatattccttatcataatacttatcataggctgcctttacatcttcataagacacatcctttgcaagattggcatatgctgtaacaagtattcctctgttcataggaaccagatgtggtgtaaatataagcttaaggtcatctcttccacatgcatatccaagctgttcttctatctcaggcgtatgtctgtgtgttccaactccataagccttcatgctttcgtttacttcacagaaaagatttgctaccttagcacctcttcctgcaccagatgtaccactcttggcatctattataatagtatccggattgattattccttcttttacaagtggatataatgtaaggattgatgttgttgtataacaaccaggattagctattattcttgtatccttattcaccttatccctgttaatttcgcataatccgtaaaccgcttcatcaatatactgtggagctttatgctctaacttataccacttctcatatatatcaacatcctttaatctgaagtccgcactaaggtcgattatttttacctttgaaagaatctcatcattaacaagagatgcacataagccctgaggagtagctgtaaatataacatctacttcattagcaagctgatccatattgtcatccatacattttgcatcaacaagcttaaacatatttctatatacatctgaataattctggtcaatatagcttcttgaacccagccatacaatctcaacatctttgtgtcctaaaagaattcttactaattcgttacctgcgtatccagtagcaccgataattccaaccttaaccatacgtcctccatctgaatgtgtaattattcattcgtgtgaatattttcatcagtaatccacatataaaaatggattaacaaaaatgataaattacattatagcaacttttttccttatgtaaagggtttattaggcatgtttttatatttatgcataattaatgcataaagttgcataatattcattttttgctattgcattttaggcataagtagtttattataattggcagagtttataaatatctatggaggtactttttaatgaaagagaaagttgttttggcttattccggtggacttgatactactgctatcattccatggttaaaggaaacttttgattatgatgttatctgcgtatgtgcagactgcggacaggaagaagaattagatggccttgaagaaagagcattatcatgtggcgctgcaaagttatacatagaagatgttacagatgaattctgcgataactatgttgttccttgtgtacaggctcatgcagtatatgaaaacaagtatttacttggaacttctatggcaagacctgttatagcaaaaagacttgttgaaatagcacgtaaagaaggcgctgttgctatatgccatggtgctactggcaagggtaacgaccagatcagattcgagcttactatcaaggctttagctccagatatcaagatcatcgcaccttggagagattcaagatggactcttcagtcacgtgaagatgagattgaatactgcagacagcatggtattcatcttccattcagccctgactcaagctacagccgtgaccgtaacatatggcatatcagccacgaaggtcttgagcttgaagatcctgctaacgagcctaactacaagcaccttcttgtacttggatgctcaccagaggatgctcctgatgaaggcgaatatgttactatgacatttgaaaagggtgttcctacatctgttaacggtaagaagatgaaggtttctgacatcatcagagaactcaacagacttggtggaaagcatggtatcggtattattgatatcgtagagaacagagttgttggcatgaaatcacgtggtgtatatgaaacacctggtggaactattctttatgaagctcaccagcagcttgaggaactcatacttgacagagatacaacaacagaaaagataaatgttgctaacaagtttgcacaggttatatatgaaggaaagtgggaaacacctcttcgtgaagcacttcaggcattcatcgaaaagactcaggaatatgtaactggtgaagttaagttcaagctctacaagggcaacatcatcaaagccggaacaacatctccatattcattatataacgaatctatcgcttcattcacaacaggagacctttatgaccaccatgatgctgatggtttcatcaacctctttggtctttcacttaaggtaagagctatgaagaagcttgagaacgaaaagaagaataacaaataatactttaaaaatattatataacaagtattataaaacaaaatcaggagctgccacatatatatgtagcagctccatttttcatcttttataatgttttatgagctcttataaactctaataaactcttatcaaacattaatctcagatatttctatattctttttctcctgtttttcacaaccattccatatatcaaagtaataacatatgaagctgcagccaatatacacataacgcccataaccctataagcaatctgagtatctataaacacagttcttcctagatatctgttacttacagccgccatacatctgtttccaattatatttgcaataaaaatatatataccacctgttatgacaaatatacatgggagtgtgtaccttacaaccctgacaggattaaatgcaattataacaatcaataatgtgatatatatgaaaagcatcaatatcttaaacacagaagaagttattattccatatacttttataagcggctgcagacgataagatatatcaccatatataccactggcataattatttatagcttcatttgcagcatttttactatagctaagagctgccctgactattgtttcctgtatatttcccatattgatattagatgctattttgttatatgtcatatccataagctcatccagctctgcatctatattaatctctatatcatcaaaggatttttctttaagcatcccatcaaccatagccgttgtatatttctgtgctattctgtctactatcttagaatcctctatacttgtctgaattctggataatgcctccatattatccccaagtgaatcaaaaacagtatccataaaacggtgcgatatagcagctgacagtcctgcatcctttaacatgcttgagacatacataggtgccgttacacatacaataagtataagacctgctattacagatattaaaccaacacctatctgtgtccatctatgagcagtatccctgtattgtctgtatccatatgacatatatattccttctttctgtttagatataacaattccgtaatcttacaacacaatcacattaaaacaatcacattaacataatcatattaacacaattatattaatacaaccataaaaaaatgtaatagatttagtgctttcttacattttcctgaatctgttataccgctgttttacaagctcttccttatccatatcaatatatctgtacataaaatcgcatatcatgcgtttcatatataatgtcactctttttatattattttcatttataaccggatattccggaatgaccttctctattatgccaagctcatataaatctgcagccgtcagcttcattatttccgcagcctcttttgctttcttagaatccttccacagtatcgatgcaaagccttctggtgaaagtattgaatatatggaattctccatcatccatacctcattggcaacacctagtgcaagtgcaccaccgcttccaccttcgccagttactattgacagcaccggaactgtaagactgctcatttcatacagattctttgctatagcttctccctggcctctctcttctgcaccaagaccgcaatacgctcctggagtgtctataaaacatataaccggtctgttaaatttttcagcctgcttcataagcctgagtgcctttctatacccttcgggattaggcattccaaagtttcttgatatattctctttagtagtcttacccttcatatgtcctatgactgttacaggaattccgccaaatgttgcgattccacctattatcgccttatcatcaccaaagtttctgtcaccatgaagttcaaaaaaatctttagttattttttctatgtaatctgcggcgttaggtctttcactgcttcttgctatttcaaccttttcccatacatcatactcattatacagattattatcagcctcagcctttttttcttcttctctatctatctttttgaaatatatattatcaagatactcaagatacttcttcataatatctgaattgctccggtatgtatccacattttctttaacttctgtataagctccactgcacttatgtatatcaagcagatacgcaagtgtcttctttagctcatcccttttaactatcgcatccacaaagccgtgctctaacagaaattcagctctttgaaacccttctggcagttcctgtcctatagtctgtctgataactcttggtcctgcaaaacctataagggcacctggctctgcaagtataatatctccaagcatagcaaagcttgcagttacacctccagttgtagggtcagtaagaacagtgatatataaaagtcctgcctcatcatgtttttttaatgcggcacttatctttgccatctgcataagagatactattccctcctgcatcctggctccgcctgagcacgtaaatataataaccggcagcttctgctctgtagccttctcaactgcccgtgtaagcttttcacctacaacttcgcccatgctgcccataagaaatcttgtatcacagacacctataacagctttgctgccatctatctttccaacgccggttattactgcctcatcaagatttgtttttcttttaagattctggattttctcctcataacctgggtattcacatggattgctctcttcaatgttagtatcccattctgaaaatgtattcttatccactaccatggatatccttgttctggcatccagcttcatataatatccacattccggacatacacaattattcagatacatgtcctctgttaagattatttttgaacaaaccggacatttcgtatataatccatctggaacatttatattactgctatccagattgttgattttatttttatggatattctttttaaacaagccttttatctgcatataaatcctcatttccacgcactcttactgtgcataacgaacaactattttttacatacctgtggatactcctctggtatgaaatctgtactgacatcacctttaataaacttctcattctggcatatatcatacataaaatctgtatttgttgtgacaccttcaataataatctcgccaaggacacttctcatcttctcaatcactgttttcctgtcgtttgcatatgtcataaccttcattatcatggaatcataaaaaggaggtatcgtatatccactataaactgcggtatctattcttacaccattaccacctggta

SEQ ID NO: 386 - DNA, 2025 bp, Unknown
  gut microbiota DNA sequence
tctctgtaataagctgtgtaatatgtcctacagattctgtactgttttttgcaagtgaacctatctcagaagcaacaactgcaaagcctcttcctgcttctcctgctcttgctgcttcaatagatgcattaagtgataagaggttagtttcatcagcaatatcacctataagcttaataatatcgactatttccttagaagccgagccaactttattgacagcttcctcaagacttcttattgataactcaatattgttaagtgcttcgctgacgtgttccatatccattcgtcctttttcggatacttcaactgtctcacgcattttaatatcaactgagtcgccatcgttcttagtttctgcagcaacacctgcaagctgtgtaacattttctgctatctcattaactgacactgataactggtcaactgtatcgttaagttcatgcatcgacttggactgtatatctgccgcagtattcatctcgcctgatatattcttgcttgagactgcctgctcctttaatcgtacagatacatcaccaatctgggatatcatctggcgcatagcctgaataaacttctgtatgctctgtcccataaccgcaatctcatcattgcccttaacattaactgatacagtaaaatcgccagaagccatctgtgtgatagctttagtcatattctttactggcttaactaccacattagtcattctttcaacaagaatacaaagaaccattatacatacaattcctacaattatcataatagttcttaaacgtataagttttgcaagtacaatactcttaggaatatatgatactaatacccagtcagtaccatcgacctccttaaataccgtcatattgccatcaatagttgcggaatcataatcatttgaattaaattggcctgctaccttctgataatatacactctgtccggaagcaccaagcttctgtgatattaatgaagattctctatcagcaagtataactcctgtattcttatcaacaagaaatgcctctgcattatccatatcaatgaaagaatttacaattatagtaattcggtcaagtgtcatatctgctgatattatccttatattatcagttccgtcattaagaatacctgaagcactaattacattaaccccctcagcgttcttatatgccgaaccaacagccatattaacccttgtaagaccttccttataccatgtgctctgtacaggattgctctccttcttagttgacttatctgcctttataagattaccattagagtcagatacatataaaccatctggataattatcattatagttataatatccatcaagaatagcctttagctgtgtatcatctggatgaagattttctattgtggtctttgccatctggaaagaagcaagattctcacttaaccaggcttctatcttagatgactggttacttaccgatgactccagcaaattctgtgaataatcttcaattatgcccgctgatgcctgataagcaataagcacaagtactgctacgatagcaataacaactggcattatgcttcctaaaagcctggctttaattgatattttcctttgtttcttcatagttacaaacccctttcttatgtattcaattgtatataattttcacgcaaatacactatatttattatatcactttacaattatataacaatctttttgttacaattcactattgccattgcacatatgaacattggaaatgttattacttccaaaatgttacctgcaccgtgcacggcatacactatgtaaatagcattttaagaacaaaaaagtttataaaattaagaaaaaatttatatttagcattgcattatcttcaatatattgatattattagaaagtaaaacaaaaatacactaaagataaagagattttaatttaatacactaaagaaaaatacacatataattaaaaatacgaaagaaaatatgttaaaagttaaatatacgaaagaaaatgcacttaaa

SEQ ID NO: 387 - DNA, 3757 bp, Unknown
  gut microbiota DNA sequence
agctaatatactaaagacaaggataccaaggataataatattaaagtatactaaagataaagtgtataatatcagatatgatacatattgttttacaaagtaattaaatgggagagaaaaagatgaatgaaaagtttgactggaaaaagtatctgacattagacaatattgaaagatatgcgcctgttgcagcattctttccaataggaatgtctattgtaacaagcattgtaggcgttgtattatcaatgttttttggatggtttgcggtaggatgtattatacgcaacattctggtgggattgctaagaattattttttgtgctggctctatcggtgcagcagcaggtcttgtttatgttgcacttaagacaaaggatacgagtaaggtgaatacctggatagcaccagcagcagttatatgctcagcgatttcatgtatcggaatagcatttcatgtaggtgtacttggctggctctttggaattatttcagtagttgcaggagtagagcttcttgcaagaattaccattgcagctaatccaatggatacaccatttaatccgggtggagcatttaatgtatataagaaatattatgaggattataaggctaagaatccaacaacaaaggacttggaaaagacagaggttattaatcctgagatgtcatactttgatggaaacggagcagagttatttggatatactatattaggaactataatctgtgtagtgacatgtggtatagcagcaccatggattatatgtaagatatatagctggaaacttagtcatacagttattaatggcagaagattaaccttcgatggaactggagcttcacttcttggacattggatagtgtgggagcttttgacattagtaacttgtggtatatatagcttctttatgtatgtagctcttagaaagtgggagatgaagcatacatatattgatggtgagacagtagttcctaatgaaagcagttcatactttgatggtaacagttttgagtatcttggttatgctgttcttggaggaatccttacatgtgtaacatgtggcatagcaacaccttgggcagtatgtatgatacagagatgggacgttaagcatcagaatattaataacagaagacttgtgtttagtggtactggattgggctttcttggagagtatattattatagcacttctaagcctgattacctgtggtatatattcatcatggggacaggtaagacttcttaaatatataacaagacatacagattttgtagattaatctgcaacatataaaaaagtaataaaaagcagccggcgcactatgggacttttataaaatgtttttagtaaacttattgcaatatggttgacattatgcctctaaagagttaatatctaataactgaatgtgttgaaataagtacaatacagataagaacgtgtgcacagtttttataaataaccagttaacagttataactttaagattagtttaattaattgaactacaggagaaatattatgaaaaagaagtcaatagtagctgcaataagtgcgttatcacttattgtttcgatgaatacaggcattggttctgtatttgcgggtgagcagagtacagtcccaggtactgctgaacagccatttgttgttacagatggtttatttgaccagactaagacagagtcagatttaggactttctaagattgaaggagcagaaactgttacagtatttacagcaacagatgatacagaccattactgcaatggtgttgttatgactgaattcaagggaaagctgtatacacagtggcagagttcagcaaaggatgaagatgcagaagatacgtgggttgcatatagcgtaagtgatgataatggagctacatggagcgaacctaaagtgcttgttcctacaatagataatggatattgttcatcaggtggatggtttgtaagtggtgatacacttgtatcatatattaatgtatggtattcagataccacaccaagaggtggttttgcatattatgtagagtcaacagatggtgaacactggtcagagatgaagccggtattaatgaaagatggaacacctatggaaggtattatagaacaggacccacatgtacttgcaagtggaagaatagttaatgcagctcatttccagccaggactttttgcatatccaatatatacagatgacccatcaggtactaaaggctgggttaaggcacagtatacctgcatggaacagggcgaaggtgcaacaacttcaagagagatggaaccaagcttatttgtcaatgaagatggaactattgttatgactttcagagaccagaaaagctcttttgtaagacttgcagcaataagtacggaccagggtgaaacatggagcgaaacagtaagtactaatatgccggactgccgtgcaaagcagagtgcaggtaatcttccagatggaacagcttaccttgttggatgttcagttaataataaaggcagatggcctttgacaatcacattaagctcagatggcaagacatttgatacagcatatgtactccgtactcatgatgagttcccagagttaaagtatacaggtaaagccaagagattaggtttccattaccctaagtcagttgttataggcgattatctttatatttcatatgcaacaagtaaggaatatgtagaatatacaagaattccattagacgctatttcacttaatgcagacaaggaagcgccagttatcagtggtattgaagatggtgctgagtacacagactcagtaacatttacagttgaagatgctaatcttaagagcgtaactgtgaacggagaggcattaacagcagaagatggaaagtatactcttacagtaagtgatggacagcaggttgttgttgcagaggatgaagcaggtaacaagacagtagttaaggttatggtaaaggcttcagctaacaacagcactgaggatacaacaacagcaacagatgcagcagaaaatactaatactaacagcgatagcaatagtaatagtaatgtaagcacacctcagacaggtgatactatgatgcgagttgcagctataatggcaggattattattggccagcggattagttatatttgcagcaggaaagaagcgcagagcttagtttgaaaatgtgagtatatcagaataaaaaaaacgccgccttaaacagactctatataataagcagcatatggtagcaacatttgactacatattatatagacattgttttgatatgtaccccttttactggatatccagtgaaaggggtatttttatgcgttacagttacgaattcaaacgaaaggcagtcgaactatgaagctgcgctactcaaggcgaaaaagcagcgcttatcaaagaactcatagaaaaaggatatcaactaaaacatctattaaaagctatgaatatggctaaatctacatactattttgaaattaataaaacggatttagttgctatacgaaacgaagaattacttataattattaaagaaatatttttagtaaacaaaggcagatatggcgtgcgtagagtttatatggaattaaagaatcgtggctacgacgtgaatcacaagagagttcaacgtcttatgcatgatgctggattattagggaaacgtccaaaagaaaaatatcattcttataaaggcgaagtgggcaaggtggccgacaacgtaataaatagggatttt

SEQ ID NO: 388 - DNA, 1342 bp, Unknown
  gut microbiota DNA sequence
ccaatggcattaagttaagggcgatgaagagaagttagtatcgttttttgatattaacttctcttttcttttttatgtttcagttagaattcatacgtgcaggctttttaagtacgacaaatagacaagggtgttcccttgtcaaaaaattatacatttagaatgatttatgctactctatacatgaagcttattgcttgtttgactttcatatcacgaggtctggaacgccctgggcgaataggcgttatatatctagctataagcgactcaatatcaggtggaatatttgcttttaataggaattcgcggcatatatgtactgagacggaaaaattgactttatagtcatattttctgtttcccttttcaataactacgtgtgaggtaatcagttctgaaaaattgtacattattaggctggcaaagatttcttgaagaatatattccactttttttgaatgaaaatgaagtaaacctactgtgtattttaaatccctgaatgaagtttctattccccaacgcattccatatagtttctttaattcttcgggtggaaattcttcagaatctaagtttgtcacaactacttcataagaatcatctgatatagggaaacgtacaattctaaatggcagatggtacagtacagtcgcgtcagactttttacttgttgaaggtagataatcaaatgttttattatgggcaattcttcgatatttatttttcatcttaaataatgttttcatttcatttgtctgtttacgagtcaagtttaaatcaatacattcattaaattcttctgcattaggtaattccagaccatctatgatacctgttttatgttttccaaaatcctttacacgtattagataaaaccatcctttttcttgaatatgtgccatgacattataagattcataacctctatccattattacgattgctttttcgttaatagtagacctgtctaccatttctgttaaagctttcttttcaaatgcctctttacgtttaaaaacaatggcatcttcgtaggtatgagctaagagattatataatgcattcaggtgaagaaggttataaggttttgcgccttcttttgttataaaaagagattcaatatcttctagatttgttggtatttgaatgtccgatccatcaacagctagaagtcgatatcccttatatgtatcattttgagatgtttgagaaacaaaatcttgaaaaagtttttcgagtgcaagcggaagtattttctttcgttgctgtacaaatgcagatgatgttgcagttgatgcatcacatccaaactgccttaataattcgtttgttaaagttg

SEQ ID NO: 389 - DNA, 23482 bp, Unknown
  gut microbiota DNA sequence
gtagcagttcttcttactataggtgtacagagaataactgttgtaccagctgcctgcgcaggcttaatatagttttcatataatgagttagcaaatgagccagctgtcttataatcaccattagggtctgtatatctgtctgcttctgccttttcatcattatgaccaaagcctataagaagataatcaccctgcttcataccggctgtaagttctttatactccttatcattaacatagctcttagaacttcttcctgataaagctatattcttcacttcatatgttccatcaagatacttatcaatctgtgtaccccatccatatcttggataataataattatcagcaaaagaacttactgtagaatcacctattatccatactgtaggcttgctgctgtctttattaactgcatcatcagccatagccataacgctccagcctatgctcataacaagcagaagcaaagcgctaagcagacaacttatacgttttctgtttcttttcttcatcataaataaccttccctttcttttctggacaatctgtcctttttatggaattataaagtatgaaccaatgtcaaggtcaatatctttttgcacatttaataatgtattgtacataaatccatacattattatatttcaaaaaacattcaggcaaataatattcaagcaaataatattcaaacaaacaatattcaagtattcaaaaaccagacacacaacaacctaagtcattgtgtatctggctttattcaatgccaatcaatactaatcaattctaatcatcactaacactagtatctataactattatattatttattaatcagccttttcttttttctatcttcattcacaagaagtactattccagctaatgccattgtaaatgccacactatatcccatcacgtgatatacatctgctgtttttacatcatctttagaagcatctggatttttatcgtcagatgatatagcattgtcatctttcttactgtcactacctgacgtagctccatcatctttcttatcgctgccaccctgttctggtgctggcgttgggtctggcgatggcgttgggtctggcgatggcgttggatccggtgccggcgttgggtctggtgctggcgttggatccggtgccggcgttgggtctggcgatggtgttgggtctggcgatggtgttggatccggcgctggtttctcactcttattaagttcttcattcttagcacttattacacctaaaaggctctggccttttgttgtccagtacactgcatcttctgtgaagctgccatttgcatctgctgctttagcagtaagcactccgttcttatcaacaacaaacacctgctgtccatccggattaacacctgctactctagatggtgctttaacagcctttgaaagtgatatattcatattctggatctgctgtgcaaagagttctgctgttatgaaaccaccaagcttattgctatgtgtgctgtctcctgctgacataacctgtgtaccattaacagacttgccattagctgccttttcatctgctttgtatgcttcctcatacatattctttgttatctcaaaaccatcaataagtaatacatcctgttcctttgcaagctgtttaactgcttcaacatatgcattatttttagttacaagtgttcctgtttccgtatctgttgaatcatgatgtggtttgatagtaccatcactagtataataaagtcttgatactggtgttacaagaactggtattgcacctgcttcctttgccgcatcaacatattgcttaagataccatttataagtaccaccacaatcatatgaatagaatgtatctccatactttgaagtaagtgatgatggtgttgccactttagttcctgctgttaccggatatattccgttggcatctggctgtccaagtggtacatatctatcttcaatgtatccttttccattggcacagtcattgtgtccaaactgtataaacagataatcgcctgctttgatattggcttttatcttatctaatgagccctcattgataaagtttcggctgcttcgtcctccattggcatagttctgcaccttaacctttgaagaatcaaagaacgcctgtaaatattcgccccatgagccttcagcctgagccttaccgctcatatacatacctgatgctgaataatccttaacagtagaatcacctgctaaaaatacatttactccatcaccaagttctatatctgttgaacctgtaggatcttcatatccatctcttacatatgcctctgccttatattttactgttcctgacttaacaccacttaagttctcaggtacaacttcaacttcaatatgctttccaatagcatccttagaaatcttatatgtattatcagcattggcagttgacgattttgcaagtgttctgctgccatcctcattaacaatataccagcggatcactgatgcatcatttttatcattcttctctccaagagagtatataacagtaagagtatgtcctggatatggtgcattgatatctccattatcaacaagatatggtttttttacaaatgctactgtgctctcatcagccacataagcatcaggtgtccagcctgaaagataatcattcacaacatctttctttgcaacactgtcatctgttgtaactcctgttactctcttagaaacatctactgctgttccatctgtataaaccgaattatattctgtataaccagccttctccggcttattgccagacatttcaaaccagccttcatccttaatgtaactaccatttatcttagtattaaggaaggttacttttgcatcctgaccccaaggtcttccaagatatcctgcacttacctcaagttcatcactgcctgttattgtacagtttctaaatacatagccaatcttagttgctgcagcagaggttggcttatgtgctgtaatataaccacctgtagagccagcactataacctgcgaatctaagctcacatccatcaaacactgcgtttccatcaccaaatatgtaatctgtattaccctctatatggcagtttttaaagtacatattagttgctgaattgccagtatataatgtatcctggcttccaagaaatgcgcagtctgtgaattcaaccttatcagcttctatagccatggctgttgctctttctgttgctgcctttgatgtaacatctgttgcgtagtttctgtctggattcttattttctgtaggtgtcacaccatcttctatttcttcatctgttaaataacggttaaacgaagcttcaaatgtgattccatcagcactaaatcctgttgctgtatttttaagcagtactgaacagccccattttgctgcagctgccttctcgtacttatcatatgcattttcagcattataataacctttagaatctatgctgtaatacttatatcctattccataataccatgtaagaagcacttctttgcctgatgacttttcatcattaacaagtcttacatatggagttgatataataacctgttctctatatgtaccaggagcaatatgaatagtaactccattattctcatcaggagcaggtgtcattaatgatactgctgatactgcttcttttactgtattatagtttacatttcctttttctttatatccgacatatatatcagatactctttcaatctgttccttatctttagttgacaccattaagatatctttagttacatctgcatcattgactactatatgtgttgttgttctatatccatcagctactgcttcaacttcatatgaaccatttcttaaagaaacttcatatccatctgatgtaacctttcctgtatacacatatttgtcatcaacattgataaacttaatatctgtaactgctgctttagcatcaatatctgtaaatctacctgttaccttatataacttcttagcagaaacgcttatatctttagagtaatctgtctgacctgtaacctctttgccatcagctacttcataatcattaactccactaagctcaactgtatacttaacatcaggctcaagtgttgctttgaaagctttgttatcatcaagcttaagaaccacatcatccgctaatgaagatgggtctgctacaagcttaactgataatccagatgtatcataatctgctgcaaagcctgtaacctttcctgtatatgtatatactttcttttcttctacctttaatgtaactcctgtcttgcctgtcagagcttcatctacagttgttgtaacattctttgtatcaacggaaaatccatatcctgctgctccggataaaactgctgtataatcacaacctgctgcaagtgtagctgtaaatgtattgccttttacatctgcatcatatgtgatatcgttaacatcatccttaaataaaaccttcagaccgcttacctgtacaccttctattgttccactgacttttactcccggaattcttaccaccctgttatatataggttttcctgctgctgcatctgtatataccttatatgaaccactatacttagctacgaattcatacttagctcccttgttagtaaagcttgctttttctacctgttcattatcttcaccaagatacttaaaaagaagtgttccattagcagcattgcttgatgccatgtatacaactatcttatctccggcttctacattgttaatagcaatgtatcttcttccttctcctcctgtaccattacagtagtacataccggatgctgtatatccatcatcatatgctgttgttgctaacgcattgcttccatagtttttgcctgatgccgagaataatctgtcattggcattatgattgattgtaagatcaccaaatgttgtttctccggcaacgaatttaccatcctttgaaacattgtcacaattctcccagtcagcagcagtaatatgattattatacttatctgtatctgcttcctgtactgtgcccatgtcccatacgtcaatctttcttgttgacgcttttgattctgctgcaaatgcagttacgtctatgcttgtaacaagcataagtactgcacacaaaagactgctaagacgtcttttagttgttttgcgcatattgacctccctttctgcctttaaaggcattataacattatatatctgcatggatactgtcagggtctgtttataaaacctttttgatatccataatacaaactataaagtatgaaccaatgtcaaggtcaatatcttttacatatttaataaagaattgtttttatatgcgaacataatatctcataattcactgtttttcatgccgtacaggaacactcataagaatatacatcacatgatcatcactatcatcatccttaacctttgttataactatacctgttatatcgccatcaaggacaagattatgctctttcatatacgcaagatgacgccctatcataatctccttaatctcatcctgtgaataatcatatatactgcttaaccttgccggcacctttgatatacccataactgacggcttaggaatatacttctgtgcatattggttaatatgaagatgatacttttcaagatgctcttccttaatcgaataaccacagcttacagtaaaacgtcctgctttcatctcactctcaggaattatgtatatatgctgtatttctggtgaattgtataaaaactcgcttagctgctccagtctttctggctcctgaagcagctttccgccattcttatataaaacataatacataggaagactttgtttttcatatatatctgtattagctgccgccttattcataagcacacagtcatccttaagcctgtgtcttaaatacgtcatataggctatctgcctatccatctgctgcatgtgttcctgacacgcctctatagtttcaccaagcgtataattctgcatcttacttatctgctcatgcgtaaaaccatactttatatgcattttagcattgagcacaccaaaaactccgtcatcatcataatacctgtatccgctgttctcatccctcacagcagatatataacccatatcctcatatcttctcaccgtatttgtagatacaccaagaagttttgcaagatcacttatcttatacctcatatatcttttgcctctttcatttgtacacatttctttatatcatcataatatcagtactataatactatttcaatactgtttaaagacaacatttccataatccagactatatcatgcccgcttacataagctcagctatgcctgacagtctcacatatctgtctgatatacggtaccatgtcggaaaatcaacgactcctgtctgtggcatattgttaatcctctgaaactgtcttaccgcttctgctgtctgctctccatatattccatcaactgacaatggtggtatagccttgtaataatctcctatgagattcagctgctcctgaagctgtcttactttctgacccgatgaccctatatcaagattggcaccaggccatgatgaaggaataccctgtatctgctctgctgtatttatatacatatcatcgccataataatatcttaatatatcgattgatgaatatccctggtcaccaagatacttacttccccactgtgtcatccagttcggacagcttgatttttttccatcacagtactgtgtaagtattggctgcttaacattcggacgtgaaagataattatcaaatatttcatctactacatttgatatactctcaaatatatttctgccattcacccatttatgatcaaatgctgttgaagatgttatagtaaaattataactctggtttctataccattctgtatacaccctgttcaatgtaaatgacatgattgcaagtatattagcctctaacgtctgccttggccatgttgaatatatctcgctgcttgcaacatttttaatataatccttatacctgacataataatcaagcgccgttgaatcagtaggaacaccatcatgcacaactatagtttcaggaataacaacacggcttagtactatctcaccagactggttaagtggctttatctcactctctggtatcttggctggatagtttccatacagggtattaaccggaataactatattatcttccgcaactgcatactcattttcattaagatatacatcctgtatactcgtttcccctgaaaagacatctattccggatatgttagtctcctcatatccgttggcactgacatcaatcgtatattctgcaaatggctgtttttcccctggctccatgctgtactctatcggtggtgctaaaagttcatcaagattaaccgccccctctgaatccgttacaagttcatttattatcgaatccggattacctgtgtatgacagagtgattcttgcatttgcaagcggtgctccctgctgtttatcatatacatttatgtgcatcttccctttatctatcatatcctgtggtgtttccatagtatgaacatacaccattatacccccattctgtatacacctatatacaaaaatcaatattttttcattattatatgtatctttatatatttttatgaataaaataaaatgataattcccttaggagcggatatgtcaaaatataaagtagctcttgatgcaggtcatggtggcagcgatcctggtgctgtttataatgacagacaggaaaaagatgataccctcgacctggctcttgccgtcggcgatattcttaaaaaaaatggagttgatgttttctatacaagaactaacgacgaatatgagacaccttttaaaaaggcaactgatgctaacaactcaggcgctgatcttttcgtgtcaatacatcgaaactcttctgaaaagcccaaccagtattctggtgttgaaactcttgtatacaatgattcaggatttaaatcagaggttgcaagaaacataaacaaccagcttgagaatgttggatttaagaatctgggagttgatacccggaaaaatcttgtggtacttaagagaactaagatgccagctgtccttgttgaagcaggctttataaataatgaaaaagataattatatatttgaccaggaattcgataaggttgcaaatgctatagctgatggaatacttgaaagtattccggccagtgcccgtaataacaataatagtcatagcaataacaacaataataaaaatgataatacaagcaataatagccgcaatgataatatcaataataataatagaaacgattataataacagcaataatagtaataaaaacagtttaagtcctgctaatacaacagacagcatggccgttaccagttatataagcaacggagctgactgcggttgtaactatgatgataatacagataactcctacacaccacaaccactttacagagtacagactggtgcttacagaaacaaagaaaatgcagaccgtatgttaaactcactgctcattgacggatttcctgcatttataatatatgaagatggctattataaagtacaggttggagcctatgcacatttggccaatgccattaagatggagcaaagactaagaagattccattacaatacttatataacaacttaacaacgaaagactaaaagcaggctctgatttaaactgactaaaagcttataatagcaggaatatataccatgaaaccagggtcaaaaggtctaaacccacatgagcttgctcatagatggatgaaagaccttttgacccgccctgatattcgcatatattttatctttttactctgcctttatatccccggctgcctttaaacgcatattgtgtctatggtattttacatctgtttcaacatcatacttaatattatccatatcctgcatatccagctgaattgatgcatttatataattgttatttatcactgctgtcgaaactgtcatatatatactgtcatacaagtttttttcaccagtaaatcttactgatatattggcaagcctggtatctgaatctgacttaaacgcaaactctgctccggtcagtctgccatcatcgtccatatccatagtaatagttgtgtatacaccctctgcatacatattaaactttgactttatcttatcaatagttattccatgaacattcagaagagatatatatggaagaatggctgaatctttatacatttcttctacaaatgtattaaaacctgctataagtgacttatcacttatagttatagtacatccttcatcggatattgtgccaattgcagtcatagaaccatcattcttgtcagacttattatcattaccaatattatcaaaattatcttttacagccacttcataaccattcataatatgcgaaagtactgccattaacatagcttctgtctgtcctgaatctatctttgcaagaccatatggtaatatatcgtttttatcgacaacaagtgtaccatcttctacctgtggcatagaaaatgttatattgttattatctgtaacaacactatatttatggctgttattcgttgtatccggtctataatccgtgccatcatatgtgaattctgataccgttatattacctgtatatgtatggttgcccattggatcaagctgcaccactttatcaacaaaacctccaagaacctctttgagtgtatctgctgactgtttcatagtcttaatcgtcttttcttttggtgatgcataaagatgtggaataccataacctgcaaaaactcctgcaaatatagcagatataagtattcctgccattatatgccttattttctttccttttttattcatgccatccctcacactctctggtatcgtacaaactcataacataaatcaaaatacgtatgttcatcacttcttgctgtgactttccacccatcaagcttgtcaaagtcagctatatatgtatctgcttcatatgtataatcaactcttgttatatgcgcagtatcgcaatatggaataaactgctcatatatctgtgcaccacctattatataaacatcatctgaattatactgttttagttcctctaaaacttcatcaacactgtggcacaccattgcatcttttgctttataattcatattgttagtaaggactatgttctttcttccttcaagtgcagactggttaggaaggctttcatatgtctttctccccataacaacaacttttccgtatgtttctccacggaaaagcttcttatcctccggaatatccacaagaagccgtccgttattaccaatcccccactttttatcagcaagtgctattatattcataatatatacttatgcccctttcttttttctgacatcatctcttattcataacacatatatatacatagctttgcacaacagatacaccagctgcgcagcggttgcacaagccacacacaacagatgcataccaggcgatacaccagctaaagtttaccaccaacccatgcaggcacatatcctttaacctttatgccatcctgtgtatattcttcactttcaagctgtccatactctcttataagctgaagctttcctgcctcattatatggaaataccctttctatctggattctgctcttaaggataatatcctgtatatccatcaggaaactatcaagtcccataccagtttttgctgatatattctctacataatcagctttactatctttaagtataggtatctcatcgaattcatcacatttgttaaagagtgtgataaccggcttatcacctacatccagctgtttaagggtatcgtataccgttgccatgtgtctctcataatcatcattagaacagtcaacaacgtgtactatcatatctgcatatttagcttcttcaagtgtactcctgaaggcctcaataagattatgcggaagctttcttatgaatccgactgtatctgttaaaagcactttttcgccattcgcaagtttaagtgcccttgtcgtaggatcaagtgttgcaaacagcttgtcttctgataacacaccagcatctgtaagcctgttaagaagtgttgactttcctgcattagtataccctactatggcagccacaggtgttgaactgttctctctgttctgtctttgtatatcacgatggctttttatttcttttaattctgctgataagtgggatattctgtcacgtattattcttcggtccgtttctatcttcttctcaccaggacctcttgttcctataccaccaccaagtcttgacagtgttattccaagacctgcaagtcttgttgacctgtacttaagctgtgccatctcaacctgtatcttgccttcacttgatgacgctcttgctgcaaatatatctaatataaccatagttctgtccataatctttgtatcaagaacatcttcaaggttccttaactgtgcaggtgacagctcatcatcacatataatacctgttgctccaagctcctgtatcatagctcttaactcttcaagctttccttttcctatataagttgcaggatggaagctgtctcttggctgtatcatctttccaactgtaactgcccctgctgtctttgcaagctcagatagctcctcaagtgatttctcacaatcatctgccgggtcaagctccacacctacaagtataactttttcctgctcttcatctgttacatatatcgccatatgttcctcatttctatcatttttattatcacattacttattcattatgacatttattcatagcattatttatccgttatgtcatctattctttgtattatcacatacaacatattttataatgcactgtcattactatctttagctgtctgcttagatgtttcagctcttgatgatatataatcactcagataattcgatacttccttttcctctgaatatcctagtatattccctgctatatcaccagcttctttcatactccatgatgcaatctcttttcttacctcaagcacacggcttacaccgactgaaaactcatcaagaccaaaagataaaagcagtggtatcatacgttcatctgctgccgcctcaccacacatacctacatcaatacctgcgttatgcgcacattctattattcttttaatgcttcttagaactgccggattaagtgccgaatacagatatgaaacattttcgttacctctgtcaacagcaagcatatactgcgtaagatcattagttcctatagagaagaaatcgacctgccttgcaagaacatctgccataatagccgctgctggtgtttctaccataataccaactttaatatcagtatcatacttaatatccttcttatcaagatccctgcatattcctgctataatctttttaacctcgttgacctctgaaaccgatgttatcataggtatcataattctgatattaccgtaagcactagcccttaatatagcccttaactgtgtcgtaaaaacatctatcctgtcaaggcagaatcttatcgccctgtatcctaagaatgggttagtttctttagacaatcccatatatggaatatctttatctccgccgatatcaagtgttcttatagtaagttcccttccatcaagaagaactgctgctttcttatattctgtaaactgttcttcttctgttggaagcttgcttccattcataaaaaggaattcagtcctgaacagtcccacaccttctgcaccatccctgactgcctttgcggcatcaagtgcattgcctatattagcagccagcatcacacgtctgccatctttagtaactgtttgtttattgatatatttcttaagttctataacactctcatcgtactgttttttctttttggcgtatatctttttagttatgtcacttggagatacaaacacttcaccatatgcaccatcaactattatgtcttctccatccttaacctcactgcatataccctttacactaagaactgctggtatctccaaagctcttgcaagtatcgatgcatgtgaggtgtctccacctttttcagatataatgcctgctatatgcacagtatccatattcgctgtcatagatggatgtatctcatcagctataataatcgtgttatcaggaagctgcgtaagatcaatactcttaacaccaagaagtattgctgtcaatctctccctcatatcttcaatatctgttacacgctgggctatagcctcgttatccatacttagaaacagctgcttcaaagattcgcaggcctcataaagggctgcctctgcattaatattattcttctttataatattacaaacctctgacgtaagctgtatatcaccagctaaatattcctggttcttaagaacaagtgcattcttatcatcgccgtttaacttagctgtcagcttctctatgaattcgtctgtctcctttatgaatgtgtccactccatccttgtatctttgaagttctgcatctacatcatctattttatacttttttacctcgcaccctgtattttttaacaccagtgcctttcctatacctatacccttagatgtacctattcccctaagcatacatacctccttgttttgcgaagcaaaatgcgactgttatttattaaatacatatttgatcatatttgtaatagtttcacttgtattccttgaatacacaacctcccttgcaataacaggttcatctgttattatattatcaatacctttattagcaagattctttatagatgtatcgttattagctgtccatgcatatacctgtttaccagtattatgtatggcatccactgttctctttgtaaggaatgaagcgttaacactaaagaagtctacgttggtattctcataaaatcttccatatgcaacagacagtatatagccagtctgtatatcctcatctatgctcttaactgctagaagcgcatcataatcaaatgaagttataacacaattctgttccatggaatattgctttataagctctataacctttccagctgctatgctgctatccgctgatgactttatctcaacattaagctttatactgacaggactgcttttaacaagctttaacacctcttcaaaagatggaaccctttcacccctatatttttctgaaaaccagtacccggcatcaagcttctttacttcctcatatgtcatatctgttatattcctggctacacctgttgtcctatatgctgatgcatcatgcataactactatataaccatcgcttgtcatctgcacatcaagttcaatataatcagccatatcatctatggcacgctggaaagctgccagggtattctccggtgcttcccttgatgcacccctgtgtgctgttatcttagtatcatggaatatagcaactctctcaaaagggttgctgttaaatgttaacaccacatataacacatccaggactatcgacatcacaagaacaaatgaatatataatcctgtttatccttgcacttccttcatctatatcaacaaactcaaaattaatatccgaaagattctcatacttgtaatacatatatgatatcatagagaatgaacaaggtatagataaaaatacaagaaataatcttactatcgtccttaatgtactaagcacagaaagatacaccgcactacccatataagcaagatcaagcagtttaactccggcaatcagtacaacagatataattatataaaatgtataaatagccgctaaaagtgcaagattatatagtacaactacacccactatcttcagtacattatttttaacaatgcttctgcttttagcacatgactgtctgaagttttttccctccatcatatatatgttaaatgaaaaaatatcccgtataacaaagtaaaacaggcatattatgataattgctgtcacaataaatataacagttctgtttcgttttacctcactttttataatattttttacactttcgctaaatataatattgccagtaactgtcacattaataactattatagatatcagaaaatataaaaaaagcggtatgctctgaatcctcaacagctttttaagccgcaaaaaggcattatatatgttatcaataatagatgcctgtataccttttctcttggtttcaaaacatactgcaagatatgccatttcatataagcagtaaactatgaatcctataacccctaagaggcagaatatgattattacaggattcataaacgctttcgctatatattcatttgtaagataattaatccctgttattctcatgcacaaacggataacgcccgtaataacaggataaaacactgctaatgcaaggagcttatatgcaagttcaaacaacaatacatgtcttttactgctttttagcagtttcatgttatttctaagactttctaacatatctcaccccgaaatcacctatggaatctgttaagaagattactgcagcctgatgcatgtttaactgcatctcccattcttttgtttaataaacgctttgtaaaatgatatgaaaaatcacatacatatgacacaacaagaacaactgaaatcactgtaaccgctgacatacgcatagaaaatactgcctgttctacaagcctgttaaacactccgaatataagcactgccagaaatccccagccaattgtgctctgaaggcatattatacccttataattaaatctaaggtgatcatagttccaccatacttcgccgaacagctttaacataagcttcgccgtcatatactcaaatattgttgcacatacagcaccaaatatatataatgcaatatagttgttttgtataggtgcaaatatattgaaagctatatatgttccaaaaccgtatattacacaaaatggcagctttgcaaaccctctgttttcccagtagccaagctgctttcttataactatgcactccattgcccatccaaaaaagctatatataaaaaaccagactgcaagctggttaatattcattcccctgaaactgaaatctaataatatattacgcataacactccttaagttacgttctgtttcatacctcttacaacataatctgctccattgatattataatatcaatggagcagttaattatacattaattcataagttcatcaagcgttgcccttactgctttgataaaatcctgtgtattaagtgttacaggattctctaatgttgttataagtgcaagatcctttgtcatcttaccatcttctactgtcttgatacaagccttttcaagtgtatctgcaaatcttacaagttcaggaatagaatcaagttctcctctctttcttaaagctcctgtccatgcaaatatagtagctatagggttagtagatgtttcctctcccttaagatgcttataataatgtctctgtactgtaccatgtgcagcttcatattcatagaagcctttaggtgatacaagaactgatgtcatcatggataatgaaccaaatgctgtagcaaccatatctgacataacatcgccgtcataattcttacaagcccagatatatcctccctctgaacgaataactcttgctactgcatcatctattaatgtatagaaatattcaatgcctgcttccttaaacttatcagcataatcattatcatatatttcctggaatatatccttgaatgtatgatcatacttcttagatattgtatccttagttgcaaaccaaagatcctgcttagtttcaagagcaaagttaaaacagcttctcgcaaagttctctatagaatcattaagattgtgcataccctgtatgataccagcacccttgaagttatgtataagctctcttgtttcgttaccctgttcgtctgtgtatacaagttcagcctttcctgctgctggaatcttcatctctgaagccttatatacatcaccatatgcatgtcttgctatagttataggcttcttccatgtcttaacgtaaggttcaataccattaacaatgataggagccctgaatactgtgccatcaagaatagctcttattgttccattaggactcttatacatctccttaaggttatattcttttactcttgctgcattaggagtgattgtagcacactttaccgcaacaccatactttttagtagcctctgctgaatctatagtaacctggtcgttagtatcattacgatgaacaagtccaagatcataatattctgtgttaagatctacataaggaagtaaaagttcatccttaataagtccccataacactcttgtcatctcatctccatccatctctacgagaggtgttgtcatttttatcttttccataccgcaatcctttccataatggcaattatgtccaaaatatataaaaaatctgcttttaattataaaatattttaatgattttgtaaatgcctcatttcattcttgttatattaccagcaatatctatcttccatatctgtacacaactatcattgctataatccttaagactttttatactatagcttccaactgtgtcataccatgcttcatctcctgatgtacgccgtataagtgtatcaaagtacattgttgatgctgcttttgttatattactctcagagttgctttcaggtattacttcttcccatattgcataaaatcctgtatctttttttattgatattttatcacctggattataagtgtttattccatctgaccagccagttaactcaaaaccaggcttcgttacctcatctttatctggcagtgtgattttactttcttcccacttcgcataaacagtttcgttacatgcatatggataactgtaaatatcggctttaccttcactgttataccagtaatcattcacatcagccatttcttcaatattaagactgattttccagctgccaaaactatctggcccatactctggtccccggtacctgattcttatactgttaaccttattaacatagacatctacatagttattatcatttgaatgtggtaaaaaccatatttcctcgttatcactgtcaccatcaagagtactccactcaacattaacagaaacctcttcatctgtactattataaccatcatagtaaaaatacaaatagccagtatatggtcttgttaatgttactgttgaaataatagaattatcagcattagcatctgaataattataactttcatttaatatacttcccagactgacttcatttcttttttctttcaacatatatcctttaaacttattaatctggattatatcagataataacagtctgtcattatagttatcatcatcataaaatgaagctttatatttctgttcaggaactgttatatcaggcaatcccttcctgtaagataccataactgattgtgttcccctttttgttgcatcctcctgcgataatgtcaatatgaattttcttgatatatcaacatattttttacaagcctttgtcactgtatatcgtaacgacgaaccatctgcatatgtatctggaaactcatataacgtggcatcccaccttgaatcctgtttaatatcttcaactccaaaaccaaacgatgtaccactatctacatgccacagaaagttctcccgatagccatcaggtgctttctttgttggtgtatgccagtatgtgcttgaatattcaccccatgaaccatccccattctgatacctcacatatatctcctggtcattctgtatttttaatctggctacacttatataactagtttttgcaccacttactttataggcaaaggatgttccatcatcaaactgctctggcatcctgtataagtttgaattccattttgaatttccagttatattcttagtatcaaatgtatatgttgaaccacataatacattttcagttattgctgacgtgtcatcccatctttcccacgtaccattctgattctgatatcttatgtatacagtctgcttatatgattttataacctctttcttcttagtatgaatataaatgctccggctcctattcatagtccagtagttatcccatcttttacatgcttcattccatgtggaatcataccattttttgtcaccttcctgtatataatcaagttcatatccatctttaagatatatccatgtaggaaccaatgtaccttctttatatgtaatagtctgtccatctgaataccgcatatcaagaccactcgtgctgtgtcctataacatcactgactccagaatcccattcgatgttaaagttgcatgcccatcctaatgtgatagttaatggttttctttcaccggaatatttatctccatcataattgatattacagccagcttcaaacaggtaaccgccaagcatttccttaacattgttgtctggattgtcccaattgttatagtttttatagccagtgaaatccacattgaatatacagccttctttcgaaatattgtatacacgaagatacggcgtatatccacgacagttcacatgttctgtaaatgttccttcatgcggtgcctcattatcactataaaaaggtatatcatcaaaatatatctgtttattcttatcattcatatatacccattgtaaatcagctgtgccaccggcaaaatcaacggttatctgtcttttaaaatcatcatctgtataactgcccgcttgatacgcatatgccagacctacaaatgataataataacaccaataccgataatatatataataaagtcactctttttttgtccttcataggacatgctgccatatatacaccccctttattccactattccaagacatgtaaacacaacggaaccacatctatatatacccataacaccctgaaacatagctgtatctgcgttaaacaacggactccccattgcatcaaccaggcaatcaagaatttcggttttatctgaaactgtataatatcctttatatgtatgataaccacaatgctcatcatacataacccttgttgtcataacctctataggatatggacattccactgtacttcctgtattaacatcctttcccatctgtgcttcacttgcgttttcaccatattgcagtacgccattagctatatagatttcatgtccataaggactatctgttatggctggttcctgcttttcttctgtatccgacttcccttcggactctgactttccttctggctctgatttctcttcaggctctggtttctcttcgggctctggcttctcttcggaatctggtttatcttcaggctctgactttccttctgaatctggcttcccatattcttcttgttcttttatatctatatctattcctgaatctgcctgttcatttgattcttctggctctgcaaggtctgattctatttctttttcagtttctttttgttctgcaaaatctgattctatttctttttgttccttatattcttttagttctgcaaaatccgattctgatactgttgctttttttgtctgtatcgtttcaactgcagcactatttttttctggcactttgtttttagcatccgcattcttcttaacaacggccgcagctgctaataaagctccaatcgtcactgttattaatattattttcaataaaatatttcgcttcattctcactttttccttctttatatttatcttatatttgttttatatttgtcttatatttatcttatatttgttttatatttgtcttatatttatcttatatttgtcttatatttttttagaataatatgcttatgggtactgtcaaatatcatcgttcgtccactttgtcttatactttttataaaataatatgtacacaatcctgttatatctaagcatgacatgcacaacatgtcttatataagcgtattgatattgttaatataatattaaatgtcttgtggaaattaatatgaatcaatgtgacattacgttatatattcacatcagatgaatagtttttattaagattaccagattaaatattctttatgctgtcaataatatctatagagttattatcctgattttgtcatcttgtgtttatatcaggaatgtcatatatattcttccaatcaatcatctcctgtctttttgttaccgcgccataactttattatttaaactaaacatatcatatatatacttaattgtcaatatcatgggtattatttttttattatttatagaacacgcaataacgcataatattattacattttcttgtattaaatactctggtttgttataattacataattgatttataagatatatgtgtcagaatttccttttgaccccatatctttatctcacaaacaacatttagtttatgaaaggacggttttgtaatatgtgcggttttgctggatttacaggataccttgagaatggtaaagatgttcttactgatatgatgaataaaattatccacagaggtcccgacagtgccggtcagtatatagataacaaggcatatatgggctttagaagactttcaatcatcgaccttgataacggaagccagcctatgtttaacgaaaataaaaaaattgtcatcacttttaatggtgaaatatataattaccaggatttaagaaaagagcttattgaaaagggacacacttttgcaaacaactccgatacagaggttcttattcatgcttatgaagaatatggtgaagatatgcttaataaacttcgcggtatgttcgctttcgttatctgggacagcgaaaaagaaactctttttggtgcaagagatttctttggtattaagcctttttactacacaatagttgatggaaatataatatatggttcagagattaagagcatactggctcatcctgcttataagaaggaagttaacgatgtggctcttgagaattatcttactttccagtactcagtactccctgagacattctttaagggtgtatacaagcttatgcctggacactgcttcactttccataacggacagattaatataaaaagatactgggaacctacttttgaggctgatgaaaacaagtccctggatgattttgtacaggagattgatgatgccatgcatgattcagtagaacatcacaagattagtgatgttgaggttggctcatttctttccagcggtgttgactcaagctatgtcgctgccaccttcaatggtgataaaacatttacagttggtttcgactacgaaaaatataacgaaatagattatgcaaaggctttatctgaaaagattcagatagacaactattcaaagcttgtatcaagtgaagaatactgggctgctatccctaaaatccagtatcacatggatgaacctttagcagaccctgctgccatcgcactttactttgtaagccagactgctgcaaagcacgtcaaggtttctatgtctggcgaaggtgctgatgaattcttcggtggatacaacatttacaaggaacctcttgatactgcaggttacagaaagcttccaaagggtcttcgtaagggacttgctaatgtagcacaggctattccatttaaatttaaaggtaagaatttccttataagaggcagcaaggatattgaggagcgtttcatcggtaacgcatttatgtttaatgaaaaagaacgcgcaaagatattaaagaaccctactggaaagtacgatcataaagagcttacaaagcctttctatgataaagttaaggataaggatgatgttacgaaaatgcagtacattgatatcaacttctggcttattggtgatattttgcttaaggccgacaagatgagcatggcacacagccttgaagtacgtgttcctttccttgacaaagaggtattcgatgtagcaaggactatacctactaagtataaagtaaacaagtccaacacaaaatatgctatgcgtatggctgctcataagtatcttccagatatggtagctgaaaagaagaagcttggattccctgtacctataagaatctggctcaaggatgacaagtattacaatatgataaagaaagccttcacaagcgaagctgcagaaaaatactttaacactaaggagcttgttaagtaccttgatgaccacaaagagggaaaagccgataattcaagaaagatatggacagtatatatgttccttgtatggtataacgatttctttggtgattctgaatatgcagcatagaaatattggtgtttaattcaatattagttggtgacgaacggacgacaaatataagctacaggcagtcctgcacactatgttcaatgccagaagctttgattggatatttctaagtcttt

SEQ ID NO: 390 - DNA, 2818 bp, Unknown
  gut microbiota DNA sequence
accacaatcaaacttcaagtgcatttcgcatagtatgcaggactgcctgtagcttatatttgtctgtgttgtggcataatttaatgctgaatattcaattaaatcaaggggacgaaacagggcggaattgtgcactttgcgcacaattccgcccatcatgcctctcccctctgatttagacacacattcattttcataaattaagacaacgtcagacagcacatatgagaaaagcaggtgcgcaaacatcataagatgcacttgaagttcaattgtgatagttcttagacttttctttctctacccagctatccacagacacggatgtctgtggaagtgagatatgggacatggatgtcccgtatcgaacggtagcggaaactaccattacgtatatgaaaagtcttagaaatatccaattaaagcttctggcatcgttgatgtatgcacacctgcttttctcatatatgctgtcgtccgtatgttaagaatgcgtgctaaacaacaagttcctcttacaccttatatcccctgcttttaagcgtatcctgtgcagtttcgttagctccatatcttgaatacgtaagtcctgaatataccttctctgtattcttcataagtggcttggaatcatcaagctgactcacctcaagaaatgaggttcttaactttccaagcattgtaataactctgcttacgctatcgcgttcaccggaaacctgcgcacttataagtgtacgtttcatgtaattatacagctgatacaactgcactgatatctcatactccatatcaagccctgtaataagctggtctatgccacgcatcgccatgtgaagcttctctttatatccactgctggtatcatcgtttagtgcttcgttaagatagtctgttataatatcatatgtaataacaacaagctgagaccttgtagcctgcgatattctatatgaatatgtccttatcatatcgttattcatacaaccggctcctatacgtttttcctctacgttttatatggattattgttccacttttttatttatttctgaagaagctgtaacacctctgatggtctttgattagcctgtgaaagaatagatgttgctgcctgtgtaagaactgtctgtgaagtatattctgtcatttcttctgccatatctgtatcaatctttgcagacaatgctttagttacattctcatcagacacctcaaggttattattggtatgctcaaatctgttttcataagcacctatctttgaacgtactgagttaacatatgatatggcagtatctacagtatctatagcaagctgtgctgtatatcctgtcattacattaatgttatcagtacctatcatatatgttgttataggaggaatatcaagaactataacctggttctcattagcacctacgtgaatactcatagttcctacatctgtaacctcctggttaatatctgctgctgtaccgcctgatgccacagattttccattcttctttgcagctactgtatcatcaaacactgttcctgcaacatttccaggaatatccataacaaactctttattattaacatccttaactgtaatccttgttcctttagtagatataacagctgaatcctcaaagcctgccctgcttccatcatcagcctttgcaaactcggcttcaacatcactgccctctgcatgtatacatttaccaagacctgttggatcgtatgcatctgatatgccaagaagtcctgcaagttcttcgttgtcacatgaaatatcaagcttctggtctcttccatactgctctgtcattataacaagcctgtttcctgtataagaagtttctggcttataaccagcataatctgttccgttagttttagtgtctgatgtagtctgcgataccgcaaatgcttttccaccagtaagtcctacacctgtcattattctatccataacaacatcaagtgtatcaccctctaatatatttatctgataaccattaacagatattgttcctgcctgctcactgcttattgtatctgtagaagacatagttatctggctgcccacagctacagcctgtcttgcatcctgtgtgatagtcactccatatatgccagctgtaaagctgtctgatatggaaatctgattaaccccctgatagtcggaatatacccttcttgaaagattaccattgataaggggctgtgtattgaattctgtctgctctgatattctgtctatctcagcattaatgttgtcaatctcctgctggatggctgagcgctcatcatctgagttaacatcgttggctgcctgtactgtaagctctttaaaacgtgtaagcattgactgtatctcaacaatagcaccttctgctgtgttaagcactgaaataccatctgtagtattattctttgcctgctcaagacctcttatctgtatcctcatcttttctgatatggcacatcctgctggatcatcagcagagctgttgattttatagcctgaagaaagtctctggatagaacctgataaagaattctgcgccttctgtaatgcattgtttgatataatcgctgatatatttgtatttattctcatataatctccatttctgcttataaaaacatagcttccatgccatctatatttatattatcaatcctccgtgattgctctcatataaggtatatcggatattctttatatttctttaatctgtctgcagctgtactctgtgttctgtgctctttaccttctgcgctgtgttctatgctctttgctctattatctatgctttacttt

SEQ ID NO: 391 - DNA, 16285 bp, Unknown
  gut microbiota DNA sequence
aagtcttagaaatatccaattgaagcttctggcatcgttgatgtttgcacacctgcttttctcatatatgctgtcgtccgtacgttaagaatgtgtgttaaacaacaatttaatcattctactcattcctcagtgctgtcaccggatcgctctttgatgcctttttagaaggaatcaatccaccggtaaatgtaagaaatacactaagcagtataagcaccatcgctggaattacaggaagtactgcattgatgttgtccacccctgaaagtgcatgaataacagcatttataggaagcaggaaaagtaatgttatacctatacccataagtcctgagcatagtccgattatacatgtttctgcattaaatacagccgatacattcttcttggaagcacctattgcccttaatattcctatctccttacgtctttcaagtacacttatatatgtgataacacctatcataatagaagatactattaaagatatagccacaaatgcaatcagcacatagcttataacatttactatggtagtgacagaggacataagtgttcctaccacatctgtgtagcttataacctgttcatccttaccctgctttttcatgcttgtattatagttatcaagtatatttactatcttatccttactttcaaaatccttaggatatatgtctatttcacctggtactgacaaatctgcatagccaagctttttcatattattgtcatatgaggcaacatccgtatcagacataagtgacttcataagatctgaaaggtcactttcgttcatattcatctttatcgcatttgcgaagctgtctgtatctataccaaatgcgctgctaaaatcatagtcatctgtatctgttcccatgcccattgaacctagtacagctgccatattatttcccataagctgcatggcattcatcatggcatctgtcatagaggacatcatctgtgtcatgactgtctccatagcctgctgcatattccccatgatactttccatcatcttgttcatggcattctgtatattggcagtaaactgttccttaagactgttgatcatattgtttatgactttatcaagaataccatctatgttctgatatccattctgcttggcatattctgcgtatccatctactacatcctttttaaatatactccagagctgttcttttgatatatcaaatgtcacagcatctttcataagttcttttgccgaatctgatatctgttttcttgcctcatctgtaagcaggaacttaaatacactttctgctgttgtatcctcaataccattctttttaatatattccagatatctggcttcaagcttgtttacctctttaagcactctgtcctgtgatatatttacatgcattgaatcagtaataagctgtctgatatccttacttaactgggctgatacttcatcagaggacatatattccttaaaaccatataatacttcagatatagatgctttaacttcatctgtaagactgtctgataccagcttctttaatgtgtctgcatctatactgcctatatcaaagtccataccattttccccgaaagcagaagatatatctccaaaactatcagggttaaacactgatgaatccatagaatcaaacatagatggatcaaatgccgctgatatatcatctggattgatcaatgcagcaaaatctggcatactcatattatatatactatcatccaccttaaatgcattacttattgcatctgtatctatctgaaaaagtgattccatgttaaatttacttttactgtcactacttataccaaacttttcaccagtaaatatgttggtatccttcttttccttctgtgcctttactacatcactagctgtagaatattgtataagctgtcttgtaagcccggatgtatatgctatacccggtgtaagcattgctgctgtggttccctcaacctgcttaactatacctgatattttcagatcactgcctttgcttatcagttccttcatatattcttcattaccagttttatccttccatatatcatactctgtatcatactgataataatcagcactattcaccactttaaaggtcatgccaataaaatcatcatatgaaaagctgtcgttattctcaggaatatctatctctttttctgacataaatgcagatatcatattctcatattcagcattatcccgcagacctagtgtgtactcaagcctgtcacttatgttaccgcttgaggaaagcacaagaacacattcattataattctgtggccaatgtcctgcttttacttcatactgttcttcatataaactgctgtttgagggcagctcataaaacacatttgtagacatgccagatgtcatggaattctcatatgatgaagacattcccatcatctcatatgacttgtcaggatttatctgcctatatcctgtattatcctccctgtatatctgaggagttactatatatttgtattctatggcatgcacataatcttcaatattttccggattgccttctatatatgttttaagcgatgccagatcgttggtactcatcttagagaacatatcagaaacaacaggtgtaacaccgatatcgtactcctttttgttgtcacctgatgctgacataccgaccatcatcgctgtaagatcaaagcccgtactttgtatctgtaacggatattctgacagagtatcctcttccatcgcacttatatatccactgacaccattagatatggaaagaataagcgctatacctataattcctatagagcctgcaaacgatgtaagaagggtccttgcctttttagtcttaagattctgaaagcttaatgaaagtgctgtaagaaacgacattgacgactttcccatattcttatgcactggtttttctataatattttcatctatctctaacggatcagaatccgataatatctttccatctttaacttctactattcttgtagcatattcataagccagctcagggttatgagttaccataactacaagtctgtcctttgatacctcttttaaaagctccataacctgtacgcttgtttcactgtcaagtgctcctgtaggttcatctgcaagaagaatatcaggattattaacaagtgctctggctatggcaactctttgcatctgtccacctgacatctggcttggctttttatgtatctgctctccaagtcccaccttttcaagagcctctttagcacgtttccttctttcgctccttgatatgcctgatattgtaagtgcaagctcaacattagaaagaaccgtctggtgaggtataagattatagctctggaacacaaaacctatcgtatgattacgatatgaatcccagtctctgtctttatattttttagttgatattccattgatgataagatccccactatcgtatctgtcaagaccgcctatgatattaagaagtgtagtttttcctgaaccacttgggcctaacacagcgacgaattcactatcccttagattcagcgacacatcatcaagtgctttctgtactaactttcctgttctatattccttacggatgtgttgaatctgaagcattatctatctcctgttcattttattatcataattgaattttattataaaacaatgtatacttttattacaatacattttggttataaaaacattactattttataacattttcataaagttatctatattttttctactacatgccgttacataagcatgttataattataagataaaatactaggaggtaaatacctctgctcctgcaagggcagtcgcattttacttcgtaaaacaaggaggtatacaaatatgtgggcttatgaaagtgttttttatcagatatatcctctgggattctgcggtgcaccttatgataatgatgatgtccttacacatcgtatccttaaggtcaatgactggattccccatattaaaaagctgggtgccaatgcaatatatttctcacctgtatttgaatctgatacgcacggatataatacccgtgactatacaacaatagataaaagacttggaaccaatgaggattttgccaatgtatgctctaatctgcacaatgaaggcataaaggttgttcttgatggcgtatttaaccacgtaggtcgtggtttctgggcttttcaggacgttcttaaaaaccgtgagaattctgcttatgttaactggtttgcaagaatagattttaacggcaactcgaactataatgatggtctgtggtatgagggctgggagggctgctatgacctcgtaaagctcaatctatataatgaagatgttatacagcatatttttaaggctatcaaaggatgggtaaatgaattcgatatagatggcttaagacttgatgtagcttactgcttaaatcacgacttcttaagaaggctacgctccttctgcgattcgctaaaacctgatttctttcttcttggtgaaactcttcatggtgactataaccagattatgaatgatgaaatgttacattctgtaaccaattacgaatgttacaaaggtctttattcaagctttaactgcatgaatatgtttgaaataaatcattcattattacgacagttcggaccagaaaactggactctttataagggaaagcatctgctctcctttgttgacaatcatgatgtaacaagagttgccagtattcttaataacgctaaccaccttcctctcatatacacccttgcattcggaatgcctggtattccttgtgtatactatggcagtgaatggggtgcaacaggaagaaaagaggatggtgatcctgctctgcgtgtttcctttgatacgcctgtatggaatgacctcacaacatttatatcaaagctggctgtcgcgaagaagtcgtcaaatgcactgaattacggaagcttctcatctatcgtgctcaccaatgagcagtgcatcttcctacgtcagtataatgatgaacgtgttcttgttgccataaatgcatccgagcagccttactttgcttcgtttaatatcggaactgatacatgcactgaccttataagtggcagcgaaattaagcttaataacggaatggaactgcctggatacagtagttttatacttcagccattctcttaagctccggaagtactgtacatagcattgttataaaacagatacttcctcctattacatttgataccggctcagctaagaatactcctgctgtccccatattaaatgtatatggcataatatatgtaagaggcacgactataatgacttttcttaataatgaaaagaatatggcgtgcttctttttgttaagtgacttaaatactgtctgtccgatatattgcagatccataaatataaatgctgcaaaatactgctttaatgcaacaatagcatcactaagcaggctgctgtctgagctgaatatgcttattaatgctcccggtgcaaatataataatactccacatgactgcagtataagccagtgtcataataccaagaaccattattgcttttcttatacgtgccggctttcctgcaccataattataactgataactggcgaagagccttcattaatagcatgaatcggagtatccacaagctgtcttacacttgatactattgtcattactgatatgtaaatatctcctcctgttactgccaatacattattgcagcatattgttacaagactgttagtaacctgcattataaatcctgctgtgccaagactgataatattcttagcataacctgcacactctgcaagctcatttttctttaaaaatcgcatctttaattcggatttatgtgtcaggaaatatattgtaaacatcgctgagaagcattgtgaaataactgttgctactgctgctccctttacgcctaagccaaaaacaaatataaatagtggatccagtataaaattaagaactgctcctattgcaactgatatcataccagttgtagaatatccctgtgcattaatatatggatttagtcctaaggcaagcatagatggaattgttcctataagataaatcatcatatatggatatgcataaactattgtactatctgatgcgccaaacaccatgagaattggttttgaaaacagcataccgcatgacatcaatataaatgcaccggcacaaagcattgaaaatgatgtatccataataagtgcagcttctttatttttctttcttcccctgtatatcgaaaacagaggtgttccaccgcttccaaacaagttagcaaatgctgtaataacaacaattaccgggaagcatattcctactgcacctatagctgttgtaccgatatgtggtatacgtgcaatatatatcctgtctactacgttatacaaaagattcaataactgtgctacaagcatagggattgatgcacttaaaatattatctgtaattgttccattctcaaagtctatttttttcatttctattacctgtcctgcgtattatattatactgcatattatcatattaggagacaaaatattccactgcgttatttggaaaaatttctttaaattctccatatagctgcgccgccaaagtcttattatgtgcaatgatcagcgtcggtttattcaactaatttaaaattataatccggaatcaataatacacatgtactcaacacccatataaatcctttttcaaaatttctgctgacttcattttgtacattcagtatctcagataaatccatctgttcaaattgctttctgagattattttcatttgcatcttccttttgaattctggctgccttacgaatattatgacatacgatctcttgtaaaacttttctcatatgctcccaatatgttcgattctcacatgtatatccaatttttataatccaatcttttaattgatattttaatgtcttttccttcttctcatctcctacaatacacaatatttcttccaattctttttctaactcattcgcagaaatcttcaatattgcatcacaacatccatttcttttttcaacatcacttacccgatatctatctcctgcaagtaaatcatcaattctatgtggcaactcaaccgccttttcaataacactttctgcccttactaggcttttatacttgtctcccggctgcaatgataccggaatttttcgatttatatactcttcatctggtatagattttaaatgcaaatatgattcaatcattggataattcaggtacaatttccccatatcagtcgagtccgcaaagcaatgctgcatttctaaaatcttttcttcagaaaatgccggatcatgccgttcataatcaaatacaagaataatattggtaaaatcatttctataatagattgtctccggatgttcctttttactgattacaaacggtaaatcaacatccatttcatcttttgcccaatcatttccgtattcttttacaatatcctcatataacttataaatattcgtaccgtaaatccacacatcatctatatcaatattcatttctggaaaacatttaaaaacaagccaaaacaattcatccttttcatgttttccctctacaaccagtaagcttcggctacgccgccttgtctctactgcgtaattattcatatttttcaaactccccacttatatacatcttttcaagattgtgaccttctctcagctcccgttcagttgcattacaaagagccgttaatgttccctttcttgataaaataaacagacaatccggtctcataattctatttgtcatcaagttcgtattatgcgatgtcataataatttggcattttggatacttctgtttaaagaaacaaatcacattttctgccatttcataatggtaaaacgcatcaaattcatctaaataaatcaaggatgcatcccatattttcggaaccagtctccgatacaactctactaatgccaatgtaccacttgatgcattttcataaaatggaactaattgttcatgtacaaaatacaattctatctgcccatctggtaatttttttaataccaatttacattcaatacccattgcatttaaaaaatcttcaaaatctttcagacgttccggattttccaaactctcataaaatccctgattcattcttccaaaccgatactgcatcctatttcccaccgtaatcatcatcattcttctaacataattcgataaccggataagagctgaatcatttttcaaagccacattactaatcagccatctcaaaaatggaagcttaggttcgctgatttcatcatcttctccatcttctaaagattgtaaatagcgctctatattggcagtttctgcatcaatataatctaaattatcaaaattgtattctcgcaaaccaaaattacacttaaaaatgctttttccatttacagataattcttcttcacgtaattcctgatttgataatctcgaatatttgtaacttaattctgtatcttcaaatctgaattcatattgaaacattgctgcatcttctttagaatccgcattgagtaaaattccattactcgcatatcttgttccaccaaacattgttgaactaatatcaagaattgctcttccaagattcgtcttaccagtcgcattacgtccataaatcaacattttgccgataataccatctgatagacaatctgtattaaactgataacctgcaatattttcaaaatctatcgtaatttcatctttaaaatttttgtaattctttaaaatgaattttttaagcatatcttataccatcctctcaaaagattattaatgtataattctatgcttaaagtataaccaattttcactctgttcgcaacaatatgccgtaaaaaaattacggcatattgtgacatagttttactctttatatctcccaatccatccttcctgtcacattcaacatcttttcttctcggaaactgagcatccttccattagttccaccgacaatgatatgatccaacaattctattcccaatagctgtccacacttctgcagctttctcataacgatcatatcctcttttgacggtttcacattgccactgggatggaaatgtgtatgttctcattgaataagttccacagaacttattcacccattaaaaatgggctaccgtttccagtagctttttaacatatttattatccagtgagcatgtttgtccactaaatatcaccctatttgtgactcctaccgactaactgacataatttttttctctattatacatattcatctggaaatttcaatttctaataatcatttctgttcaagcttcttcatgctatgtcacagacacaacgctgttctaacagcttataactcttcctgttctagctgtaaccctgtgtgagattgatataacagtcctgttttcagatacattttttaatgcctttagtacttctctttctgtatcagcatcaagattagcagttatctcatctaaaagcagaagctgtggattagctgcagttgcccttgcaatagacaataactgccattgtccctgcgaaaatatttcctgtgtgcagggtgtatcatatcccttatcaaagctcataattgtatcgtgaagtcctgcaagcctggctgcattcacaacctcatccatagatatagcttcatcatataatgtaatctggtctttaactgttcctggcaccatatgaaatgtctgttcaacataaccaaatattcttcttttcttattatcaggtatattataagaatcgattccatcaattagtatctgtccctttaaaggcctgtataagcctaaaagcagcttgaatattgtgctctttcccgcacctgtccttccctgcagtgtaacctgttcacccatatcaacattgaagctcttatctttaattataatatggtcagcttcatatccgaaggttacattattaaactggacatatggtgtgcaggctttcctgacttttaatttttcactattattgatgttagctgtctgtgtttctaacacaacattaatatctgcatttacatcagacttaaaatccgccttaatatctgcattaacagcttcaattgctggaagtgtcgggagtgcaaagaattcatttattcttcttacaccggcaattgctgactgtatagtctggatttccataccaaggctctcaactggtgcaaatatctgtgatatgtagttaataacagctaccgccgtgcctgccgacattccaaaaagtgtaagagcctttgcattgcccgatgctgaaaacaacataactaccgctactacaattgcatttagtataagaataaccggtgaatatatggcatcgtaaaagttggtcttttccatagccttatagctgtcacctatatattcatcatattttttctccatatacttttccttgccaagattatgtattgtacggatgtttcgtagtgtttccggtacatgtcccgaagccttgcttactgcacgccggtttcgcagctgtgcttcaagcatattcctctgcacatatcttgtaaaccagaatataaatggcagtaatataagcaataatattgcaagccctttatttctgaaccatataactgcaagaatacttattatcttacatgtatccgcaaacatactgactatacctgaggtaaacagattctctacagtatcaacatcaccaacgaatcttgacactacagctcccggctcctgacggtttaatgaatctgctgtcagtctggtaaaatgctccataagaccactacgcagagcatgcgttatcttttggccaaatacagtaagaagcccttcccttgtagcctccataagacctgtgatcacattaaataccatataaagaaatataagatataaaggaacctgacatcctgctgccaatgtatctactattcttccaagtacaagcggtggataaagtgcagttataactgcaccacatactgctgttataataccaagtgaaagccactttttctttattgtagtgtgcaatattattgagcctacactaagtactttgccgccattatcaacattactattatgtttactcatgcttatccactacccttctgctgttttccacttccttagctgcagccagcccttcattctctgtttctacagctctgcattcttcaacacttagcgtttcatacatttttctgtatccaggacattccaacataagttctttatgtgttccaacatttgccttaccggcatccatccatataaccttatccatcttcggaaacatatagagacgatgagacataagaataacgatattatctgatgccatatctttaagtttcttatatatctgttcctctgtattcctgtcaagtgctgaaaaaggatcatcaagcacaagcaccggcttcttatggcaaagcgttcttgcaagtgctattctttgtgcctgtccaccagacagcctgattccttcacttccaataatggtatctgctccctgctccatagcctcaacctctttatccatgcatactgccctgaggtattcaaaaacatcataatcatcacctaacaacacattattccttacagaatcgttaaataattcagaatcatgtccaagatagcttattattcccgaccttacattatccgcagcgtttcttagttcacatccgttatacatgatacttccctcatatggatattcacacagaaatgtccttccaaaggttgacttaccactagcaaccggacctgtaacacctatgatctgtcccggctctgcagtaaaggaaataccattatatacattttttccatctggatatgtaaagcttaaattttgtacatcaagccttcctgatgtctgatttttacaatctgtatccttagcctgaataatcataagcggcttaatacgtttccatgaaacctgtgccttatgaactgcattaaacagcttcgccgccttcgaggacttatcagataactttataaagcaggccaggaatgttgtaaatgctgcaatatcccaggttctccatcctgttccaagtacatttctgctgccaaaatataatataaataaaatgcccatcattgatattattctatataatggtgtaagagaagaattccatatattagcataaatagctgatttctcatactcagccagattatcttcgtacgcattttttctgtcagcttccctgccataaactctgtaggttatagcattggttgctctgtcaagtgttgcattactaaggataccagattgttttttatactcagaacctgttttctggactattactttcatcttttcagcaatgatataagatataggtggaaatatcattgcaataagtgccagccttacatcatatacaagcagcattcctgcatatgcagccagcgctacgcctgtatcaaacacctctgttgtaaactttctcatgccctcagcacaatcatctacatcaagtatggcctttgtcataatatcacccataccctcaccttcaagctctgtcctgctctttaatacaagtgttccatataatattttcttcattcttctattaacattattggcgaatctacgaacataaaaacgttttatatatcttgatacctgaactactccaattgaaatcacatatgcaataacaagtataagcatatccttgtatacagcattctttgccaatatatctataagacagcctgccatttttccttcaaaccatggtccaagcaaaagtccaagattgtatataacacctgacacggttattataagcagtaccttccactcttctttaaaatatgatagtattctgtcggctttaaatgttttatgcgcggtcacatttttgttatctgaaggatttactccattatttcttaatttaaaatccaatctcatctggtgccacagaacatttccatgagtggatttatctgttatcccctcatcaacgaatccaaacttggaataatatggaacaaggctttctttacatgttaatacaagccctttccggttctgttttctggcatctaagatagccttcttaatcagctctttcgcacatccgcatctgcgataatcaggaagagtatttacaccaaaaatcatctgccatgcaccattctcattatgcattgatgcattttcatacatgtcatctgtaagatcagcctcatccgtaacaaaaccatctacaaacgcaatgagtttaccctcatcaaacataagccagaaatgatttccataatattttattctctgctcaaattcttctttagttgctgcctctaaaacaggaaaacactcggattcaaccgatgtaatatcgtctaaatcagccattgttgcatatcttatattcacaatcgttccttctttactatgattttttcattatagcttcctataaggcagataatgctcattatatgtgcatatctaatactttctactcaatcacatactcatacattctaaactgcctgtttccaaccacctcataaaatatgttttcagtacttacatatttaaagccagctctgatatataacttgtcagctagtgtgttcttatctattacatcaaggtgaatggcttcaatgttttccaacttagcatatgatattaagttttttacaaattgagtagcaagacccataccgcggtactcatatcgcactgcgagagcatggattatccatacattattatctctttcatttactttccacgctacctttttatactctttattagaattactgttaactatggcacatgccttaattattccttcatctcttaatacgaacaactctttcttaacaataccagccattaaaaaatctgctgaaggatgtacacccttttcccagtcaggaaaagaaggttcttctttgcttttatctattaaatcccaatagagattttctatctcattaaaatcctccaggcatgctaattcaaaattcatatatctgtctcctaatttttatttaactccagctcttccagacatccggctggtatccaagtgttgatacttttccactagtctctcaaaagaggcttcaaagtttaaatcatccttatcacttctttttcttggacctttcatgtggtttttactgcttgcccgccttgccttcttacttatatgtctttccattaacataagatcaatattttcgtttgtataccatttcccggactgatgaatggcatatgcacccttacttaatgccatggcagcaacaccataatcctgcgtaactactaaatctcctttttcacaaaggcttattaacttaaaatcaaccgcatcagctccggcacccacatataccacttctgaatagtctgatgtaagataatgattagtatcacacaaaagcgttacggcaatattatgactcttagctattctttcaactatcccaatcacagggcatgcgtcagcatctacatatatatgcatactcttatctctttcatttacaatcaattgttatatacatttaggaacagtctctatttcattcccacagataacttataccagcgttttatgtatggatcatcaaaaagctcaaggtcgttttctataagtctcacgaaaagatcggtaagcccgtcatactcattaatgtctcctgcaggatacagtttccagtttagctgctctaatgtccagttactcttaactgaattgtgaagcatagacgttgtcgcataattagacggattatcctctcctccaatggcaataggaatgatgtggtcaattgttgggaccagttcccagtaggcactgtgacattcttccatcttccaatggctctgatatggaaatgcatccggcatgtaatatgataacacctttaacaatcccggattaacaagcttttccccggtatatctgtctataaatccgtctcttacaaactgctcatacttttccttatctgtatagcttcttccctccggttttaacttcttaaatggatattccttatttataagattctttgccgattcgatattacctgtgagaatactcttagcactttgtttgattgttgtaatcttatccataaaaacacacctgctttcctttatcagttttataaacaggaagttaccgagttatgctttcaattatttcttttgcaacactatcaatgctcatgttagacgtatctattatgcttgcatcataatagtgattacttaaatactgtgttgcctctggcatataggttactgccaaatcgatgtctcgattttcttggttatttatgcgttgatgtaggatttccgtcttggccgttaatataaaatggtgactctcaatatttgcgaagccatctataagtttctgattgcaataatcattaatcaatgcaactggaatgactaaacagttgcaacctccttcttgtattatttctgttatttcatcaacgagagcatcaaccaaatattttttagcttctggatatcttctcccaaaacgatcagaatctgaagttggcttatatttttcttgcaatgcatcgaattcaagcagatgtgcctgtggtattttcttaacaatcgcagcagcaacagcagactttccaattccaaaagtaccatctatccaaatgatcttcatattcttctcctgtaaattccgattttcttaattctacaaactggaattgagatttcatatattccaaaggatttaataactgttatattttattatcaaatatctctcaatcccttgaaaacacaaagtttatcgcaggtgagctttcccttattgtttcccttgcgttatatcgtcccaccagtgtttacgaactctgataagggcaaaaacaagggcaagaaaattatataaaacagtataacacaaaataaaagtgacattgtgaactgattgaaatgcttctgatttttgcaacaaatgattgatttaacgataaggagatttaatacgatgagaacaatatttgcagaatacaatcccaagcgcaacagtattgatgtttacacctctgttggctatatgctccgcattgactgttctcccaccgcaaaggattgtatcaagtgccgccctaaatgtg

SEQ ID NO: 392 - DNA, 1897 bp, Unknown
  gut microbiota DNA sequence
aacgattacacaaaacttgaaacggtctcaaatctctcgacttataactgccctgacactgtatacttatttaacctaactataatttttcaacctctacactttgaaaaacttgtaaaggaaaagaatctaccatagtccttattttaggtttttctccaaatatcttttcataaagttcctcacttacttcttgtttacaaacaatggtcatttctttttttaactctgtcataatatactcataaaaccctctcatattgtttggaatccactcatttacaagtgtgcatacgtcaatattatcaataacattttcatctacgccgtactttaaaagaatttttattagattctctctataacaaggtttaataatttctacttgccttctattttccattgtctttttaacattttttatctgataatacgcaccatccaaacacaattgttctaagtaccaatactcatgcgtaactgcagcgtcaggtacaagactattatcatataactttttccacgaaatcagtttttcatcaaataagtctacctctttttcccaaacaataatagatactgaatctgtattatcacatggttctaatatttttcctatcgaatttatacacccagttatagaatcactaaagcaaatacgttgatatgattcatcttctccattcatcggattctctggcaccctaggaataaaaactttatgtaagggttccataatattaaagctcacatgaaataatctaatctttttttccattaagaattttcctttatcaattccaatactctctctagggctaattcgttcgtccattttaaagaattattcaagtaatcaaaatattcattctctgtggcaatcgttattatatccgtactccttatcaaatctgctatgattgatttattcttttcaaaatcttcttcacagttaaaaaaatccaaatctatatctaaaatatatggcttttccttagccctatcgcaaaacatttttacatcattatctccaacataattatctaaaacaagataatgcttatatccttcagaataatcttgcttgtccttacaaacgcaaaaaaaatccaaaatgtattccatattatagccaaccgatatatgttcatcatgaaacacatatagttttgtcatttcttcaattttgtctatatcgtatttatgttttatatacatctcatatatttttctctgttcctcatatgaatttacccttgccatatctccattgcattttctataagcatactgtgaaaaaataggtcttgtatccatatgatagtcaaaagttattaagcgatattcctttttggttatcgcacaatattccgcccatactggtaatacaaaattatggctcttaactacagaaactttctttttctcaaataaataattttttctattattctctaaattctcttggcgtatcataatattctcctcatacaaagtctatctcaaaatagtcctgcaaataattttctaaccaatcatacttttcttttattgatatgctcaacttttcatcttcacgctttttgcttctttcaatttggcataagcgaaaaatcttcatagcagtttcatctgaatccggtataaaagaaatgctatttaaataattcaaataatacaatccgtctgtatcttttctaataatctccccattcatttctcgttgcattgcattatctcgatacattttttcattataatccataagctcttgcgcatactctggatcaataattatccttggaaacctagctttttttgcctcgagaaagtaggctttattcatacctggtccaaaccaaacctgtccactttggaccgcctcctattctcttta

SEQ ID NO: 393 - DNA, 285 bp, Unknown
  gut microbiota DNA sequence
aatcaatttctaatgattcgctgagaacccatgacagcagttccttggtacaggcatctataattgttgacatatagcaccggggtgcttttccatttattatatacgtgatatctgttaacagaatttttcttggtccatgttcctcgaattcacggtttactatattgggtgcggtatatgcagttgccattgcttttgccattctccgatagggatttgctttgcggataggacactgtaagttatatttcctcatcagccgacggatttttttgatattca

SEQ ID NO: 394 - DNA, 448 bp, Unknown
  gut microbiota DNA sequence
atatctgtcggctgaaaatcggataaaatatttagaaatgcaactggcatataaagatcaggagattgagtttctaaaaaaaattgtatctttaaatccgaaggctccggaataatgaaaataccagcccatgcaaagtatcagattatttatgatattttgcaaaaaaacgataatctattgaatgtagctgccatgtgcgaaattgcaggagtatcccgttcgggctattaccattatctctcaacagaagaccagcgaatggaaagagaggaacgggacagacaggattttcttttgattctgaaagcataccagtatcgaggatatcataaaggtgcccgtagcatatatatgaggttgttacacatggaaccgcctatagtgatgaatatcaaaaaaatccgtcggctgatgaggaaatataacttacagtgtcctatccgca

SEQ ID NO: 395 - DNA, 5312 bp, Unknown
  gut microbiota DNA sequence
tatgtaggttattacgttgtacgcgttaagtatttaaagaggaatgataagaagcctgaattgttaagtttattagtttactgatgacagctattcagaagcagatttcgttcaatgcgggtggtaccgcggataattatgtattattcgtcccggaatgctggtaaggcattccgggttttttgcgtgcagataacgattgctgctaagttatatcgttacagcctttgcaggaagcaggagcaatatatttatcagctgcaacaagacacacattaacaatataaaactataagagaggagctattaataagatggcaaacatttacagagatgtcacattacagaatgtaagtgaaaacgacattggaaagcagatgaaggtatcaggatgggttgagaacatccgtgaccacggtggagtttcatttatcgatttaagagatatgtacggagtattacaggtagttatccgtgaaccagaactcttaaagggtatcaagaaggaagagtgtatcagtatcgatggtgttatggaacagagagatgaggaaacatataatcctaagattccatcaggaactattgaacttgaagctaagaagattacagtattaggacaggtttaccagcaggttccatttgaaatccagacatctaaggaagtaagagaagatgtaagacttaagtacagatatttagacttaagaaatcctaaggttaaggataatatggtattccgttcaaaggttatatcattccttcgtcagaagatgacagatatgggcttccttgaaatccagacacctattctttgtgcttcatcaccagaaggcgctagagattatatagttccatcaagaaagtataagggtaagttttatgcacttccacaggcaccacagcagtacaagcagcttcttatggtatctggttttgataagtatttccagatagcaccttgcttcagagatgaagatgcaagagctgaccgttcaccaggagagttctatcagttagactttgagatgagctttgctactcaggaagaagtatttgcagttggtgaagaagtgcttacagaaacatttgcaaagtttgcaccagaaggttcagttgtaacacaggctccttacccaatcataagctataagcaggctatgcttgagtttggttcagataagccagaccttagaaacccacttagaattatagatttgtccgatttcttcaataaatgtacatttaagccattccagaacaagactgtaagagctatcaatgttcatgctaagctttcaaagggacagcatgagaagcttcttaagttcgctacaggaatcggtatgggcggacttggttaccttgaggttcttgaagacctttcatataagggacctattgataagtttatcccagatgagcttaagggcgagatcagagagcttgcaggacttcaggcaggagatacaatattctttatcgctgataaggaagataaggcagctttctttgctggacagattcgtaacgagcttggcgcacgccttgatttaatagagaaaaatgcatacagattctgttatgtaaatgacttccctatgtttgaaagagatcctgaaactaagaagattggttttacacacaatccattctctatgccacagggtggtcttgaagcacttaatactatggatccgcttgatattcttgcttaccagtatgatatcgtatgtaatggtgttgaattatcatcaggtgctgtgcgtaaccatgatatgcagattatggttaaggcatttgaaattgctggatatgatgaagaagtacttaaggctaagtttggagcactttacaacgcattccagttcggtgcaccaccacatgcaggtatggcaccaggtgttgaccgtatgattatgctccttagaaatgaagagaatatccgtgaggttatcccattcccaatgagtggtacagcacaggatcttatgtgtggagcacctaatgaggtaacagaacagcagttaagagaggttcatattaaggtcagagattaattgaaaaaatccttaaaccaaagattttttccatacaggatttgcgcgtgagggcgcaaacctgtctgacatgatagaaaggatggtatgttatggctaatgtgattagtgatgaaactatcgaatatgtaggtattcttgctaagcttgagctttctgagtcggaaaaagaggatgcaaagaaggatatggcaagcatgcttgattatatagataagcttggcgagcttgatacaacaggtgttgagcctatgtcacacgtattccctgtgaataatgtcatgagggaggatgttgttactaatggtgacggaagcagtgatacacttgctaatgcaccagaggctaatgaatatggatttatagttcctaagacggtagagtaataatactgtattttattgtgttttacgtcaggcatatgatggctacaataacgaaatatattatgtacgataacaaaatgcgttatatacaataacgaaatatattatgtacaataacaaaatatatgcaggaaaggaaaaatgctatgagtttattagattgtacagccgttgaacttgctgcaaagattaaggcaggtgaagtgacagcggtagaagctatgcaggctgttgttgctcagattgaaaagtctgaagacaagcttaactgctatgtgacatttgacaaggaaaaagcattacaggcagcagctaaggctgacgaggatatcaaggctggaaagcttacgggacctttagctggtgtaccttttgctattaaggataatatgtgcacagaaggcatgcttacaacatgttcttctaaaatacttggtaactttgttccaacattttcttctgaagcagttataagacttcaggaggcaggtgcagttattatcggtaagactaatatggatgagttcgctatgggctcaacaacagaaacaagtgcattcggagcaactaagaatccaagaaatacagagcacgttcctggtggttcgtcaggtggttcagctgcagcagttgcagcaaatgagtgttttgcggcgcttggttcagatacaggtggttctataagacagcctgcatcttactgtggtgttgtaggtatgaagcctacttatggtactgtttcaagatatggacttatagcttatggttcatcacttgatcagataggaccattatgtaaggatgtaacagactgtgctactattatggaggtaatagcagcaaaggatgataaggattctacatcagtaaagagagaagatacagcatttacaaaggctttagtagatgatgttaagggacttaagataggtattccaagagactactttggcgatggacttgatcctgaggttaaggaagctgttatgtcggcagctaaggtgcttgaagaaaagggtgctatagttgaagaattcgacctaagccttgtagagtatgctatacctacctactatacaatagctgccgctgaggcaagctctaaccttgagagattcgatggtgttaagtatggttacaggacaagtgagtatgaaggtcttcacaatatgtataagaagacacgttcagagggctttggacctgaggttaagagaagaataatgcttggttcattcgtactcagctcaggttattatgatgcctactatttaaaagcattaagagtaaaggctcttattaagaaagcctttgatgaagcatttgcaaagtacgatgtaatacttggacctgttgcaccaacaactgcgcctaagataggctcatctttagcagaccctatcaagatgtatcttggcgatatatatacaatatcagttaatcttgcaggtcttccaggaataagtgtaccttgtggaaaggactctaagggacttccaataggtgtacagcttataggcgactgctttaaggaaaataatataatccgtgctgcatattcatatgagcaggcacgaggaagatttgaataaggaggaggtcaggcaatgaaagattatgaagtagttattggtcttgaagttcacgttgagcttgctacaaagactaagatattctgcggctgctcaacagcatttggtggagcacctaatacacacacatgccctgtttgtacaggtatgccaggctctcttccagttcttaacaagaaggtagtagagtatgctatggcggttggtcttgcaactaactgctctataacaagagactgcaagtttgatagaaagaattatttctatcctgataatccacagaattatcagatatcacagttatatctgcctatatgccgtgatggccatgtagacgtaaagcttgaagatggaacagaaaagtctataagaattcacgagattcatatggaagaggatgcaggtaagcttatacacgatgagtgggaggatgtatcctatgttgactataatcgttcaggtgtgcctcttatagaaatcgtatctgagccagatatgagaaatgcagaagaggttattgcttatcttactaagttaagaaatactatccagtatcttggagcatctgattgtaagcttcaggaaggttctatgagagctgatgtcaatctttctgtaagagaaaaaggcagtacagagtttggtacaagaacagaaactaagaatcttaattcattttcagctatccagagagctattgaggctgaaacagcaagacagatagatataattgaagctggtggacaggttgttcaggaaacaagaagatggaatgatgataaggaatattcatatgctatgcgttctaaagaggatgcacaggattatagatatttcccagatccagaccttgtaccaatccacataagcgaagaatggctagatactatcagggaagcacagccagagtttaaggatgagaaaatgcttcgctataaggaagagttcggaattcctgattatgatatcaatatgattacagattctaagaagcttgctgatatatttgaagaaacaacagccttatgcaataagccaaagaaagtatctaactggcttattacagagactatgcgtattttaaaggaaaagaatatggatcctgaggatatcacattctcacctaagagtcttgcaagaattattgagcttgcagatgagggctctatcaacagcaatgttgccaaggaaatatttgagaagatatttgatgaagacattgacccagataagtatattgaagagcatggacttaagcaggttaacgatgaggg

SEQ ID NO: 396 - DNA, 34250 bp, Unknown
  gut microbiota DNA sequence
actatgaaggctatgcagggtaaggctaatccgggtatggttaataagctgcttaaggaacttctttaaaaattttgttgtttaattgaatattagttggtgacgaacggacgacaaatataagctccaggcagttctgcacactatgttcaatgccagaagtttcaatcggctgactctaagacttttcatataggtaatgataggtgacgctaccattcggacgcgccgtccgtggcgcggcctcattgcttcgtacatccatgtacgaagctagctgaaagcgaaagaaaagtctaagattcagcacgattgaacttcaagtgcatttcacatagtatgcaggactgcctgtagcttatatttgtctggttgtgttgtaattttacttacggatattcaattaaatcaaggtagcaggaaagggcggaattgtgcgttttacgcacaattccgcccactcatgcccctcccctctgatttaggcacacattcatttttcgtaaatcaagccacaactagacataatataagtgaaaatcggtgctgcgcatacatcgtgagatgcacttgaagttcaattgtgatagttcttagacttttccttaacaacccagctattcacagacatggatgtctgtggaagtgagatatgggacacggatgtcccgtatcgaacggtagcggcagtagtcaaaacctataagaaaagtcttagaaatatccaattgaaacttctggcatcgatgatgtatgcgcagcaccgattttcacttatattatgtcgtcagttcgcaaaccgaatgtatgctaaacaacagtctactctgtagtttcacctgcctcagctgcctcagcctttcctaattctaattcatattcatcgaagatatagttaagaataggagctaatccaacgaattcacagccataggcatataggtcggagttatcaagaggctggcatcttataattttaataacacaatatatgacatcttcttcagagcctaacttcaatgccgcgttgaaataaaaatcaataggaagaatgctttttgatctgaatccgataccacttttagatatgtcggttacggttattggtgaatctatatttcttatgtttacattattctgcttgaaaagattggatacattaagcttaaggtcagcttttaatcttttatagcgtcttttttcgattccatttttaatatttttatttttcacactatttcccccttatatgtgatttagcttgtaagatgcattttgttgtgtggattatatcccttgttgtttaacatactctaatatgttcagattatcataccgtgattattatgtactttcatatgtacagaatatattcttgtaaaactgcagaaattagaatattccccgggttattgtgaaatgtatatatatttcttttttataatgatactatcttgtgcaataatatgcaagtttgtctattgattttgaatgtaggctgttatataattttttagtgttgggtataaattgtacctgcatatattctgtttattgatattagataatataagtagaatacatgctatatcagctaatcagtaatcagaatacatttactaaaataagtatttaaaggatggacgcgatcatggaaaagtttgagttactttatgaaggaaaagtcagagaagtatatgatataggagataagcttgttattgctgcaacagaccgtatatcagccttcgaccatattttaaagaataaggttacagataagggtgctattcttacacagatgtctaagttctggtttgattatacaaaggatgttattcctaatcatatgatttctgttgatgttaatgatatgccagaattcttccagaatgaaaagtatgcaagaagaagcatgatgtgtaagaagcttactatgcttccagtcgagtgcatcgtaagaggatatataacaggaagtggctgggcaagctaccagaagaatggtacagtctgtggaataaagcttccagaaggactagaagagtcagaaaagcttccagaaccaatctatacaccaagtacaaaggctgagattggtgaccatgatgagaatatttcatttgaacagagcattgatgtattagagaagaagttcccaggcaagggacttgaatacgcaactaagattaaggatgcaactattgctctttataagaagtgtgcagagtatgcattaagcaagggtattattattgctgatactaagtttgaattcggtcttgatgagaacggagaggttgttatcggtgatgagatgcttacaccagacagctcacgtttctggccattggaaggatataagaagggacagggacagccatcttatgataagcagtttgtaagaaactggcttcttgctaatccggatagtgattaccttcttccagatgatattattgagaagacagttgataagtacaaggaagcctataagcttcttactggtgaagatttctaatacatcattaataatcattctgcagtctatgtcaaagaccgatgtggtgtgatggcgatagcataatcgcagaatggaaagaagaactgataataattataataagacagaggttagtgtgaaaaataagatttttcacacgcaagatttgtacttcgcacaaacttgagatgcgcaaagaagcggcgcaagaatggagattattatgaacaatagttatatagatgatagaaagcttcatgaggaatgtggagtatttggtgtatatgattttgatggtgctgatgtagcatcaactatatactatggattgtttgcattacagcacagagggcaggaaagctgcggtattgctgtaagtgatacagacggccctaagggaaaagtgctttcacataaggatatgggacttgttaacgaagtatttaatccggaatcgcttgaaaagctgaagggaaatataggtgttggacatgtacgttattcaacggcaggaagttcaacaagagaaaatgcacagccacttgttcttaactatgttaagggtacacttggcatggcacacaatggtaatcttattaatgctgtggagctgagggaagagctttcgtatacaggtgctatattccagacaactatagattcagaggttatagcatatctgatagcaagggaaagacttaacacaggaacagtagaagatgcagttaaaaatgcgatgaagaagattaagggtgcatattcacttattgtaatgagtccaagaaagctcataggagcaagagatccttttggatttaagccactttgcataggtaagagggataatgcctatttcttatcatcagaaacatgcgctttggatactgttggagcagaatttataagagatgtacttccaggcgaaattgttaccataacaaaggatggaataaagtcagatacatctttatgccagaagaacacagcaagatgtgtgtttgaatatatatattttgcaagaccagacagtaagatagatggtatgggtgtatatgagtcgcgtgtaaatgcgggacgaatattagctaagacacatccagttgaagcagatcttgttgtgggtgttccagaatcaggtaatccggcagcattaggatattccatggagtcaggaataccatatggcaatgcatttataaagaataattacgtaggaagaacatttataaagccaaagcaggagcagagagagtcaagtgttaaggttaagcttaatgtgctaaaggaagttgttgcaggaaagagagttattatgattgatgactcaatcgtaagaggaactacaagcagcagaattatcaatcttttaagacaggcaggagctaaggaagtgcatgtaagaataagttcgccagctttccttcatccttgttattttggtacagatataccatcagaggatcagcttattgcatcaggaagaactgttgaagagatatgtaaggaaatcggtgcagattcgctgggatatcttgaaacagataagcttagtgagatgatatgtaaccagactggattctgtgatgcatgttttactggaaattatccaatcgaaccacctacaatagatattcgtggagagatgggctgataggctgaataaacagaaattttattaaggagagggaaatccctctccttttctatatatgtttggcgtatagtatgaggaatatacaataaaatcaggagggatgattataattatggataaaaatgagcaggatagactgaataaacagatgaggtttatagaagaaatagataaagaaaagcttataggaaggcagacatatctatcagatgcttcaaggaaagaaaatgatgcagagcatgcatggcatatggctattatggctgtacttttaaaagagtatgccaacgaaaaaatagatgttttaaaaactatgacaatgcttcttatacatgacatagttgaaatagatgcaggagatacatatgcgtatgatgaggaagctaaaaaaacacagagggaaagagaacttgcagccgctgacaggatatttggattactgcctcatgatcaggcagaatatatgagaggtctgtgggatgaattcgaggaaagaaggacaccagaggcaaagtttgcaagaactcttgataatgtgcagccagttatgcttaacagcgcatcatgtggaaaaagctggcaggaaaaaggagtgcatcttagccagattctaaaaagaaatgagcataccatggatggatcagaagagttatggaactatgcatttgataattatataaagcctaatgtagatgcagggaaaataaaaaaagattaagaaagatatatggaatgaatagaaagagaaatgttaaatgtgcaataaaacaagaaatgtaatcgcacaataaaacgtgcaataaaacgaaaaatgttaatcattgaatggatagcatgtatatggtataataaaaaagtgatttctgactaaatcacgattaaagttgaataatgacaatttaagaaaggcggattgcaaggatgaacgacagatatcagacaccacttgccgaaagatatgcaagtaaggagatgcagtacatattctctccagatatgaagtttaaaacatggagaaaattatggattgctttagctgaaacagaggctgaattaggacttcctattacacaggagcagattgatgagcttaaggcacatcaggatgatattaactatgaagatgctaagaagagagaaaaggaagtacgtcatgatgttatgtcgcatgtatatgcgtatggtcttcagtgtccaaaggctaagggaatcattcaccttggtgctacatcatgttatgtaggagataatacagatatcataattatgacagaaggtttaaagcttgtacgtaagaagcttgttaatgttatcaacgagttatctaaattcgctgataagtataaggcacagccaacactggctttcacacatttccagccagcacagcctacaacagttggcaaaagagctacactctggctcaatgagcttgttatggatcttgaagatcttgattatgtgttatcaacaatgaagcttcttggatgtaagggaacaacaggaacacaggcttcattcctcgaactttttaatggagatcaggataaaatccgccagatagataaaaagattgctgaaaagatgggatttgaagagtgcgttcctgtatcaggacagacttactcacgtaaggttgatacaagagtgcttaacattcttgcaggtattgcagcatcggcacacaagttctctaatgatataagattattacagcatcttaaagaggttgaggaaccatttgaaaagtcacagattggttcatcagctatggcatataagagaaatccaatgagaagtgagcgtatggcttcacttgctgactatgttttatgtgatgcacttaatccagctattgtatcaagtacacagtggtttgaaagaacacttgatgattcagctaacaagagactttctgtaccggaaggctttcttgcagtagatggtatacttgatctttatcttaatgttgtagacggacttgttgtatatgataaggttataattaaacatatgatggcagagcttccatttatggcaacagaaaatattatgatggatgctgttaaggctggtggtgacagacaggagcttcatgaaagaatcagagagctttctatggttgcaggaaagcgtgttaagcaggagggacttgataataaccttcttgaacttatagcagctgatcctatgtttggagttacacttgaggaacttcaggctaagcttgatcctatcaagtatgtaggacgttctaaggaacaggtggaagagtatcttgctgaggttattaagccaatactagatgctaatgctgatgatcttggacttacagcacagattaacgtttaataacagaaatttacattaaaggatatataacatttgaaaaattcagtcagaacaaatattaaaaaaatatttaatcacattaacagaataatacctgtgtatgctataataccgcttattgcgtgcttttcatggaatatgcttgtgtactggggaacaaggtgtattaatgcggatatgaagcattttgatatgacacttcccatagacagggcaacgccggttattcctgtatttgttgtggtgtatttcggatgttatatatcctggattatatattatatagcaagtgtacgtgtgggtagatatgaatgcgcaagatttgttacatttgatattataacacgtacatgttgtgctatattgtttgtagttattcctacttataatatcaggccagatatcacaggagaagatatattttcatgtgctttgagatttttatatgagattgatgcagctgataatctgtttccatcgattcattgtcttgtaagctggaattgctatatcggtgtgagaaatattaaagaatatccggtaatttttaagaatatggcagcagtgatagctgttatggtatttatttccacacttgtcaccaaacaacatgttattgccgatgtcatatcagcagttgcgatatctgaggtgtgctggctggttgttaacaagacaggagtatacagatttctgctcaatattatgaatggtgtaaaggaagcaggtaagtgaaaaatttattgaagagaaataagaaaaatatatttaatggaagttttctgattatactgttcatgataacgttatactatgtgtttcatggctctggcgacagtctttcagaggtgtgggcaaaaatgcagatggcagatccggtatgggttgtactgtctgtgatttttattgtattgtttatatatggtgaatcccatattatacattatctttttggaacatttggtatcaggacacgtagatttacctgctttttatattcgtgtgcaggttttttctttagctgtattacaccatctgcttcgggcggacagcctatgcaggtatattatatgaaaaggaacaggattcctataccatttgctacagttatacttatgattataactattacatataaagctgtacttgtagctgtaggagtatggcttatgctgtttgacagaacatttataaatgaaaggctggatggaatacgttttgtgttttatcttggaataattcttaatataatatgtatagcagcgatgctgattctggtttttaataacaggttagcaactaacatatgcagtatggttatccgtgtgcttgaaagacttcatattatgaagagtgataatcaaaggatagacagattaaacgatgccatggaagtgtatagaagaacggcagcatatttaaagaagcatgttttagttgtatttaaggtatttgttattactatattgcaaaggacagcgtatttttttacaacatattttatatatagatcgtttgggctaaaaggaactggtatgtatacggttgttatgttgcaggcagttatatctctttcggtcgatatgcttccgctaccgggaggtatgggtataagtgaggcacttttcagggtgatatatcttcctgtttttggaagtaatcttattacggcaggactggtgctaagcagatcagtaagcttttatacagagctttttgtcagtgcagtatttacaatgtttgcgcatatatacatagggcgctttactaagaaagaaatagttggagttgatgactttaacattgattatagatagaagaagaggaatacaaatgattggtttttatgattatacagttgtacttacatatataagtatgatgatatctatgtacggaataactttgtgcatggatggacattttaaaagagcaatagtgtgtcttgcattatcgggcttgtgtgatatgtttgatggcaagatagcgagaactaaaaaaaatcgaacggatgaagaaaaatgttatggcatacagatagattcactgtgcgatatagtatgttttggtatattgccaatcgtaatatgctataaaatcggtataacagatattatcgggattgtctgccttatgatatatggactggctggacttataagactggcattttataatgttaaggagcagataagacagaatgaaacatctgaaaacagaaagtactaccaggggatgcctataacatcaatatcggttattttacctatattatatatgttaagaccggtatttccggacaacatgtttcttatagtgctgaaggtggcagtgcttatcacagcgttattgtttgtaacaaactttaaattcaaaaaaccaaacaatcttatgctgtcagtgcttgtgtttgtagttgctatggctgttatatatatgtttacaacacattggcttatgtggagaatgagttgattgctgcaaaaaggctttgttaaaaactgtgagacatagcttttggactgtttatgaatagtggtgtaaatgtagtttgttagattatgctaagcgatggggaggtaagaaagtatgcagtctgttgacagacatagaaagatggttggcaaagatgatgcacaggataagctgataaaatatatgtatgaaactaaagctggaagagtgataacatcatttctgataaaaccctggttgtcagaagcttgtaaaacaatacttgatatgcgtagttcaagattgttaataccgttgtttataaaagcaaataatattgatatgtctttatatgagaaaagcacatataaggattatttgtcattcaatgatttttttacaagaaaaataaagccacagaacagacggattgatatgaacaaaacctctcttataagtccttgtgatgcaaggctgagtatgtattttatagatgaaaagtcatcatttcttataaagaatacaagatatacacttaaggagcttttaagagatggggagcttgcaaaaaaatatgagggtggatatataggaatattcagactgtgtgtggatgattatcatagatttcattttatagatgatgggattaaaagccatgaaagacatattaatggagtgtttcatacagttaatccaatagcaaatgatgtatatcctatatacaaggaaaataccagagaatattgtgtacataggacagaaaactttggagatgtcatagtgatggaagttggagctctcctggttggcagaattgtcaataatatggaaaagtgcaggactaaaaagggagctgaaaaaggttattttgaatatggcggttcaacagtagtgcttatatttaaaaaggatgcaatcataccggatgaggatatacttgtaaatacagtagctggatatgagactaaggttaacatgggcgagaaaataggcacatcggtttatataaggtgatatattgttttctgcagaaagagattgataatattaggaagatagcttttatgtctgtgataagatgtaggagctgtctttttattttagcagatttatatacaatctatcctttctttcagtatttatgggggttcagagagatttttagacataaaaaaagtagcgagagagggatttgaacccacgacaccacgggtatgaaccgtgtgctctagccaactgagctatctcgccacaaaagaaaatatataatatattagaacttttgttctaaatgggacctacagggctcgaacctgtgaccctctgcttgtaaggcagatgctctcccagctgagctaagatcccgttcgtttgtctgcgttttgtctcacgcaaactgcttcgctattataatattaaaatgcactagttgtcaacactttttttgaaaaaaattaaaaaatattacttttttttaaacttaaacaatgaagtgtacaagttgcataaaaaatgtatattaaacttgtgataataggcaaaaatacataaaaggacttgaaaaaataaaacatgtatgctattttataactaccattacaaatactttttacaagattttattttcatattgaattctagtttctaacaaagattagaattctccctcctttcatcataatggtatataattccattgtgagtattatttttctcccctgcgatcttaaagataaagattgcaggggcttttaaaatgtttctaatcaatttcaattatttcaatttatttccactatcaataatgccaattttcaatttatttccaatactatgcttattaatatgtgcttgtaaatgttataaaaatgtgttttacttataaagataagaataaatttgaaaatatacgatatcatagaaaggtatggttagcatatgagagttggactgggttatgatgttcacaaattagttgaaaatagaaaacttatccttggcggcgtggagataccatatgagaagggacttcttggacattcagatgctgatgtacttcttcatgctatcatggatgcactccttggtgcagcagcacttggagatatcggaaagcatttcccggattctgatgacagatacaagggaatatcaagcatgaagcttttagagcatgttggtgcgcttcttgatgagaataattatattatagagaatatagatgcaactattattgcacaaagacctaagatgcgtccgtatatagacactatgcgtgagaatatagcaaagacgcttaagcttgatattaaccaggtgaatatcaaagcaacaacagaagaaggacttggattcacaggaacaggagaaggtatatcatcacaggctatatgcagtcttgtttcagtgtctaattatatatatggtgattctgatatgacaaactgttgcagcggctgtaacggatgtgctgcaaaaagagaagtataaagaacataaatatacaacagcatatctgagataaaatacatcatataatgaattaagatcatatgaatagttaggaagttatcagatatgaaatatttagattttataaagcaggaaatggctgtgattatggatagggatccagctatcaagactaagatggaggtgtttctttatcctagtttctgggcgttgttaaagtatagaaaagctcataaattatatgagaaaggccatttttacagagccaggagattatcacaaaagacagcaagaaagacgggtatagagattcatccaggtgctacaataggtgaaggattgtttattgatcatggacacggtgttgttattggtgagactactattatcggggataatgtaacactttaccaaggagtaactcttggtggaactggtaaagagcagggcaagagacaccctacacttggaagcaatattatgataggtgcaggtgcaaaggtacttggttctgttactataggtgacaactgtaagataggtgcaggttcagttgttgtaaaggatgttccagcgaattctacagtagttggtgttccaggcagaattgtcataagggataatgtaagggttgaaactgatcttgatcagatacacctcccagatccggttatgaacgagatagaaaagcttagggaacagaatcagaagttaaagaagcggcttgccaagcttgagaattcggttaatgaatcaagaagagatgaagatgacgagtaacatataggcaaggatatatgttatgcgtagaaatgaggatgttatgaagatatataatacactttcaagacgtaaggaagagtttaagcctttagaagaaggaaaagttaaaatgtatgtatgcggtcctactgtatacaatcttattcatataggaaatgcaagacctatgatagtgtttgatacagtaagaagatatctggagtataaaggatatgatgtaaactatgtatcaaactttactgatgtagatgacaagattattaaaaaagctatagaagagggcgttacagcagaagaaatatctaaaagatatatagaagaatgcaagaaggatatggcaggcatgaatataaagccggctacaacccatccacttgccactaaagaaatagatggaatgataagcatgatccaaacacttgtcgataaaggttatgcatacgaaaagaatggaactgtatattacagaacaagaaagtttgaaggctatggaaagctttctaagaagaatatagatgaccttgaagcaggacatagagatgatgcacataagcttaaggtttcaggtgaggatgagaaggaagatccacttgatttcgtgttatggaagcctaagaaggacggagagccatattgggaatcaccatggagcgagggacgtccaggatggcatatagaatgttctgttatggcaaagaagtatcttgcagatgagatagatatacatgcaggaggagaggatcttatattcccacaccatgagaatgaaatagcacagtcagaagctgcgaatggtgttccttttgcaaagtactggatgcataatgcatttcttaatatagataacaaaaagatgtcaaagtcacttggaaacttctttacagtaagagatatagcaaaagaatatgaccttcaggtgttaagattcttcatgctttctgcacattacagaaatccgattaatttcagccatgagcttatggaatcagcgaagaacagtcttgacagaatagtgacatcagttatgaatcttacacatcttgaaaagacagctgctgatttacctatgacagatgaagaacagaaggtgcttgatttaacaaaggatatttataagaagtttgaagcagccatggatgatgattttaatacagcggatgctatatcagcagtatttgaacttgtaaagctggctaattccaactcatcagagactgatacaaaggcttatattacagcacttaaggaaagcatagtaaagcttgcagacatacttggccttaatgttgttaaggaggaagaacttcttgatgaagatgtggaagcacttattaatgaaagacagcaggcaagaaaagacagaaactttgcaagggctgatgagataagagatgagcttactgctaagggaattgttcttgaagatacaagagaaggtgtcagatggaagagagcataataaaaagtgatagtcatatagaaggtataagtaaggacaatcttacatatgatatatggaagagtctgggacttaaagaggtgagtcccagacagctttctccacttgtgcttgcttatataggtgacagcatatttgaccttgtggtaaaaactatgatagttacaaagggcaacacacaggttaataagatgaacagaatggcaagcagtatagtaaaggccgagtcacagtctaagatgataggatatattgaggataagctgtcagaggaagaggaaggcgtgtataaaagaggccgcaatgccaagtcatatacatctgctaaaaatgcttcaataagtgactatagacgtgcaacaggttttgaagcacttatgggatatctgtacatgtcaggaagatatgaacgtatgtgtgagcttataaaagatgcactagattatcttgagagtgaaaaaagcgataagtgatatctgattatgtgtaacgaatctgtacagcagaaataggagtttaagataatgcgatataaggaattaacatttgaaggacgtaatgcggttcttgaggcatttcgttcaggaaagacaatagataagctatatatacttgatgggtgtcaggatggaccagttaagagcatagtcagggaagcaaagaagacatccacaatcatcagctatgtagagaaggaaagacttgacaggcttgctaatacaggacatcatcagggagtggttgctataggtgcagcttacgaatatgctgatgttgaggatatacttgaggctgccagaagcaagggagaagatccgtttatatttatacttgatgagatagaagatcctcataatcttggtgctatcataagaacagctaatctggctggtgcgcatggcgttattatacctaaaagaagagctgtagggcttacagctacagttgccaagacatctgcaggagctataaactatacaccagtagctaaggtaactaacatagcagctactatagagtcacttaagaaagagggactatggtttgtatgtgccgatatgggtggagagactatgtataaccttaatcttaaaggacctattggacttgttataggtaacgaaggaaatggcgtgagcagactggtaaaggaaaagtgtgattttgttgcatctattcctatgaaaggtgatatagattcacttaatgcatcagtggcagcaggtgttatggcgtttgaaatagtaaggcagagaagcatgtagataacagctaaaaagaatgaggtgtttgtgtctatggaacattatgagttatacagcgatgaagagcttgtaagcatgtatcgtaatggcgatgagagagccgtagatgcgattatggaaagatataagaatcttgtaagaaaaaaggcacatgctatgtatatagttggtggagaaaaagatgatcttatacaggaaggtatgattgggttatataaagcggtgaccacatacgataaagataaggaagcctcgtttatgacatttgcatcactatgtatcaatggacagataatgaatgcagttaaagcttcaaacaccaagaagaatgcacctttaaatggctatatttcacttgatgagccagtaaacagtgctgatgataatgctgacatgaagcttgtggacacattggctggcatatacgaacagaatccggagctgctgtatatagacagggaatatacggggaatctggaacaaagggtttttgaaacattaagcccattggaaaagaaggtcataaaactgcttatgggtggaaaagactacgtaaaaatagcgcaagaactaaatcgtcccccaaaatctatcgataatgccatacaacgtgccagaactaagataggaaaggcaataagtcaaaataatacttgataaatttatgcaaaaatgatataaatagaattgctgttatataaaacagcaattatgctattgtagctcagtggtagagcacttcattggtaatgaagaggtcgggggtccaattcccctcaatagcttgcgcgagtaacgatgagaatacaaaagtatattgctgattatttatattaagttatcagcagtccagagtcagaagaaataatagaagccaccagcggtatgcttgcatacaagctggtggcttctgttatttcttctggtgtatacgctggctttttggcgtatacgtcggttatatcaataacaatgcctgcaattgttattgatataacagactctggactgcgtaaatataacattataataataatcaataaatataattgaatatattcgaggagaaccgcgacatccgaatcagataactgattcggatgcatcgttactcgcgcaacctattcgatcacaaccgcctgataataatatcgcttataataatcttcaaacttatccatatccctttcaacaattccataagtaggatcggcaagagttacagtccttttaacaatatcgtatcctgccagtgcgacacaatgttcatttcttggccaggtaaatacagttccatcatcaagaacaacttcgttatatttgatttcagaaacattataatcaaagcatgtccatacaataacaggatgaccattggccagctgtgcatatagcatttctggtggctgataactcattatataagctgaatgtctgatatcatttgctttgaaaaatgcatttgcagcatttgcaatggcaggtgcaaagcagccgcttccagaagatttccatggagaaccccagaagtattcaacaaagcagcctttagttgctatatccttcatatcaagataattccttgcaagctcttctttgtctatgttatagccaagatagtgtaaaacctcagcaagtgctgttatttcacagccggtaggaagctgtgggtattggcttatgtaaggaatatcaaggctgaaactatcaggatagtcagtgttatcaaggctgcttatggaatattcattcacggctgattttatatagtcaggttcaatagatgaggtttctataatgttatcaacagacattgatagagaactatctggtttatggttattgtaattataaaaaaaataataaataaacaatgtaataagtatgattaatgatagaaaaagcattacaagtggtgctctgctattgtgctttttagtgttcattattatataccatcctttaatttcttaaaatgtgcaattcacgcgcagttttaatagcctgtcttcacacatatccatatatcgtttggcataatcaagaagtgtaaacatcggctttatacatgtaatttctgaaagcagaaacgactttttatacttttgacacttacatcattatataaaaataaccataataactcaagataagttctttagatagttaatttagtcagccagcacaatggttatgtaaactggattgaggaaacttgttataacggccgtataggaaaatggcgtttaaaagcaagatattattattttgcaaagttatttcataaacccattgcttgaaactgcttacttgtgttattataacagttgtggttttatgtatattcataaagcggctaaagttatatgctatatttaagtattagcagaatggaggaaactatggtaaaagctattgttggtgctaactggggagatgaaggtaagggtaagattacagatatgcttgctgaagaatctgatatcgttgtaagatttcagggaggaagtaatgccggacatacaatcataaacgattacggtaagttcgcgttgcatcttcttccatcaggcgtattctacaaccatattacaagtgttattggaaatggtgttgcccttaacattccttatcttataaatgagattaagagcattacagacagaaatgttccaatgcctaagattcttgtgtcagatagagcacagattatgatgccttatcatattgattttgatacatatgaagaagcaagacttgcaggtaagtcctttggttcaactaagtcaggaattgctccattctattcagataaatacgcaaagattggttttcaggttagtgagttattcggagatgaagaagcacttaaggaaaagattgctaacgtatgtacattaaagaatgttatgcttgagcatctttatcataagccacttcttaaggaagaggatatatttaatacacttatggagtacaaggagatggttaagccatttgtatgcgatacatcagcatttcttcatcaggctcttaaggatggaaagaagattcttcttgaaggacagttaggttctcttaaggatccagaccatggaatatatcctatggttacatcatcttcaacacttgcaccttacggcgctattggtgcaggtattccagctgcatctatccaggatgtcgttacagtagttaaggcatactcatcagcagtaggagctggtgcatttgtaagtgaaatatttggtgatgaagctgacgagttaagaaagcgcggcggtgatggcggcgagttcggtgctacaacaggacgtccaagaagaatgggatggtttgatgcagttgcaacacgttatggtgtacgtatgcagggaacaacagaggttgctcttacagtagtagatgtattaggatatcttgatgagatacctatctgcgtaggttatgagatagatggaaaggttactaaggacttcccaacaacttcagaacttgaaaaggctaagccagtacttaaggtactcccaggctggaagtgtgatataaggggaatcaagaactacgaagaccttccagaagcctgccgcaactatgtagaaactattgaaaaggaaatcgaagctcctataacaatggtatcaaatggaccaggaagacatgagattattcatagagtaagctcttatggaaagtaaaattgaaatataaaatatagatttatattgatgagcgtaaattagcgatgattaagaaagtatattcttaatcatcgctattgttgatactactgtttacgacctgaaagatatttatacataagcatcattgcgtaagcaacaacgggaagtacaatatcggtgaatatgagtcctttgaataaagtatgggctgtttcgttgtcaataaaggcagttatgagagtgatgataataagggcagcccatgcgattacaactgcaagagcagctattcttttaaattttttcatgatatctccattcttgcgctgcttctcagcgcatttcaagtttgtgcgaagcacaaatcttgcgtgtgaaaaatcttatttttcacactatctccattctgttggctgttttgtttctcatgatgtatacggattgctttattgaactgcaattcacataatactatggatttttaataataaaaatggtatcatattttagttatatagaaaaggtatttttaacactttagttaagaaaggtaatcaatgatgataaagaatgtattggattatttatataattcaaaggaaaaatatccattaaagacagctgtagcagatgacaagtcatctatgacatatacagagcttgtggataacgcaacagctatagcggctggattgtcagagtatgttggagtaagaagagcagttcctgtatatatggataagagctgcgttgcacttgcagcgtttatgggtgtagttatgacggataatttttatgtgttattagaaccaggacatccggcagaaagaatacatggtattcttgacactcttgaggcagatataatagttacaaacaggaaaaatgagaaaaaagcagctaagcttgagtttgctggaaagataatatatatagaggacctgcttgaaacacaggttactgatgaaatcagggacaggcttgcttctataaaggccagctcgcttgatattgatcctttatatgcaatattcacatctggttcaactggtgtgcctaagggtgttgttgttaaccaccgctcagttattgactttattgactgttttactgatacatttggaatatcagaaaatgatgttataggcaaccaggcaccatttgattttgatgtatcagtcaaggatatatattcaagtcttaagtgtggggcaacattgcagattattccaaagtcgatgttttcatttcctacaagacttcttgactatcttgatgataataaggttactacacttatatgggctgtttcagctttatgtatagtaacaacgcttaacggatttgattataaagttcctgaaagtatcaacaaggttatattctcaggagaggttatgccgataaagcatcttaacaagtggagagaaatatatcctgatgctatgtttgtcaatgtgtatggaccaacagagattacgtgtaactgtacttattatattgttgacagggagtttgaacttgaagatgtactaccaatgggaagtgcatttcctaatgaaagagtattccttttagatgagaataataatcagatatgctcagacgagcctaagaaaactggtgagatatgtgtatcaggaacagcggtaactatgggctattttaataacagggaaaagacagatagtgcatttgtacagaatccacttaatccatattataacgagataatatatagaacaggtgatcttggttattacaacgagaggggtgagatgtgcttctcctcaagaaaggatttccagataaagcacaatggacacaggatagagcttggtgagatagagatggcgattaactccatggatggcatacagagagcatgctgcatatatgaacaggaacagaataagatatatgctttctatgaaggaaatgctgacaacaagtcacttacacattatcttgtatcaaagattcctaagtttatgataccagaagtgcttgttaatgttgaagctatgccacttacaaaaaatggaaagatagatagaaaggctttgatggagggatataatgcttagtacagaaaaaatcattgagattgccaatcaatatggaacaccaatatatatattggataaggagcatcttggtaaaagaatacatgacatccagactatattaggaaatgatataacactgtgttatgccatgaaagctaatccatttttagtagatgcattcaagtcacttaatactaaatatgaggtatgttcaccaggagagtttgcaatatgcgagcgtgaaaaggttaacatgcaggatgtggttctttcaggagttaacaaggaagaaaaggatatatgtcatgttatggatgactgtggcggtgtaggtgtgtatacagtggagtctgttgaacagtataggctgttgtctgattgtgctgccacaagagaattaaagataaatgttcttctaagggtaacaagtggcaatcagttcggacttgatgaatcagatatagaaatgattataaaaaacagagagtcacatccttatattaacatactgggcctgcagtgctatacaggtacacagaagaaaaagtttgatattataaaaaatgaaatagaatggctggatgctctatgtgacaggctgtatgaggaatatggcttcaaggcagaagagcttgagtatggtccaggacttcctgttgcatattttggagatgcagcatatgaaaataactatgatatgcttaaagaattagcagagttgctggcatcttacaaggaaaagtatcatattacgttagagatgggaagatatctggcagcagactgtggcgtatatgttaccggagtagcagatataaagactaataagggacagcagtatataatagttgatggaggaattaatcatgtaaactattatggacagaccatggctatgaagattcctgcttattcatacataaaggctgatggaacaatagtaagggataaaaatatatctgatacactagctggaacagatgatgaaaagtggactatatgtggttcactctgtacagtggcagatctgattgtaaaaaatcttcctataggaaagccacagacaggagataagataatattttataatataggtgcatattcaataacagagggtatatatttgttcttaagcagaagaatgcctgttattaccgcatataacgaagatgaaagtgttgagttatacagggatgtgactgccacagatacaattaattcacgaatatctgttaagtagttattaattataataaaatatgcttgactaacattcatatatgttatattttttatctgacagatttttatattaagatgtgagcgcaaataaatacagtgtgtataatttatgtgaattatttacgcaatacgtttatatcagatataagaatgattggaatagaggttaacaaagagtctattcatgacgatattttttataagaaaggttaggttattaataatggatcagttaatggatattttgacagaggttaattcagatgtagattatgaaacatgtgatacacttgtagatgatggaatcttagattctttcgatatagtatcaatcgttggagaacttaatgatacatttgatatagagattactcctgtggacatagttccagagaactttaattcagctgaagctatgtgggaaatgattcagagactttctgataactagttagcatttctgtacgaattacgggaaactaaatcagttttaagggttagtgtatgtatttatcgcttagacagaggaacagatagataaggaggaatgattatggcagctatttcaggttataattcaagtagtatatcggctttattcgcaggtcttaattcaggaaatagtagttcatcctttggaataggaagtattgatcttagtacttataattctataaggacaggaacatataagcagcttcttaaatcatactatgcaaagcatcctgttaaagattcttctaagacagatagcggcagtacaacaacgatatcatcacagaaaattaacgcagctaaaacaaaggatgcagcttcggcggttgttgatgatgcacaggatttaaagagcgtgtctttgtggaacaaaaagtcagttaagaatgcagatggaacaacatctgacaaatatgatacggatgctatatataaggcagtatcatcatttgttaaagattataattcactgatagaggcagcaggagattctgaagataattctgtgttaagaacagcttctaatgttgttaataatacaaagcagaattcagcacttcttaagaagcttggcatcatggttgacagtaagaataagctttcgattgatgaaactacattcaagaatgcagatatggcagtagctaagtcagtgtttgcaagtacagcatcatatggacagtcagttgcttcaagtgcttcatcaatatacagcagttcagcagcacagctttctaagctgcagacacagaacctgtataattcgagtggttcatataattattattcagctggatcactttataatcagtttacttagataaagagaggttaaatataatggcattattagatacatggagaaatcttgcataccagacagagatggatcagaaaacagctaatgagttctggggcagttattttacacaggagaaggcaatctatgaacagattctttcagctcctgatacagtagttaagggaacagttaaggaacttgctgataagtatggtgtggaagtacttcttatggcaggatttcttgatggaatcaatgacagccttaagactcctaatccaatagagactatggaagaagatacagaagtaagccttgactatgataaggaaaagctttactacaatatggttggctgcaaggcagactggttatatgaacttccacagtgggatgctttacttgatgaagaaacaagaaaggcattatacaagaaacagaagttatcaggtacagttgtaaagggaaagaagattggacgtaacgatccatgtccatgtggaagtggaaagaagtataagcagtgctgtggaaagaatgcttaagcttattccaggctttatgttgtacataattgatatgtgttaatgttgagttaaacctgcaggtagtctgttgttatagattacccgcaggtcttttgctagtaaaagagagaggaaagatgctatggaagcctatacaggttttgcgtatgtatatgatgaatatatggataatattccatatgatgaatgggaatattatctttatgaacttttaaaggaaaataatataggaactgatagtactatagctgatcttggttgtggtactggtactgtcacgagaatgcttgacaaggaagggtatgatattttaggtatagacctttctgaggatatgctttctattgcaagtgagaaaacgtatgagtcaggacagcagataatatatagctgccaggatatgagagaattcgaacttccttatgaggtagatgcattcgtaagtataggtgattccatgaattatataactacgaatgatgatttgtgtgatgtatttaaatgcgtaaaaaatggattaaagccaggaggcatatttatatttgaccttaaaacaatacattttttcaaggatatactgtcagataacacgtatgcacagaatagggaagattctgcatttatatgggataactattatgatgatgaaagtgctaataatgaatatgagcttgcggtgtttgtaagaaatgaagatggcacatttgacaggtttgaggagcagcattaccagcatggttttactatggcagaggttgagaatgctgtgaaaaaagcagggcttaaaatacgttatgtatacgatgcctttacgcataatgagccagcacaggagtcagaaagactatactatatcattgagcataagtaatataacactgtagtaacgtatataaaaaagaaatgagcattagtgtgaaaaataagatttttcacacgcaagaatggagattattatgaaagattatatagtcagggcaacagcagcgagtggacaggtacgtgccttcgcagcaacaacaaaagatgtagttgaaacagcaagaaaaaatcataacatgagtccgatagcaactatagcacttggaagacttcttacaggtggagctatgatgggaactatgatgaaaaatgatacagatgtacttactatacaggttaagggtaacggtccgttaggtgccatgacagttacagcagagactaatggacatgttaaaggctgtgtagctaatccacaggctatgctgccacttaaggatggacatatggatatcgctggcgcagtcggaataggtgtgctcagtgttattaaagatataggattaagagagccatatgtaggtgatactatacttataacaagtgaaatagctgatgatttaacgtattattttgctacaagtgagcaggttccatcatctgtaggacttggtgtacttatgaataaggataacacagtaaaggaagctggtggctttataatacagcttatgcctaatgcaactgaggagttcatagataagcttgaaaaaagaattaaagagataaagtcagttacacagatgcttgaacatggaatgacaccagaggaaatacttgagcatatatttgagggtatggaacttcagatactggataaaataccaacagaattttactgcaactgctctaaggaacgtgtaagcgcagctgttataagtgttggtaagcaggagcttcagaagatgatagatgatggcgaacctatagaggttaactgtcatttctgtaatagtcattataagttcagtgttgatgaacttaaagagatgtatgaaaaggcaaagtagttaacagcggcttgaaattacattagctttgcagtattataaagtataatatgcgcaaaaagtgaacttattgtaggaggaatatactgatggataacgagactgtttcaaagaattttattgaacagattattgataaagatataaaggaaggtcactgtgaaaaagtagttacgcgatttccaccagaacctaacggatatcttcatattggacatgcaaagtccatattacttaactatgggcttgcaaaggaatacaatggtcagtttaatatgagatttgatgatacgaatccaacaaaagaaaaagttgaattcgttgattccataaaaaaggatgttgaatggcttggagcaaaatggaatggagatgttctttttgcatcagattattttccacagatgtatgaggctgcagtgcgccttataaagaagggaaaggcttatgttgatgatttatcagcagaagaaataagaaaatacagaggaactcttacagaaccaggtaaggagagcccatacagagaccgttcagttgaagaaaaccttaagctttttgaggaaatgaaggaaggcagatatagtgatggcgagaaggtattaagagccaagatagacatggcatcacctaacatcaacatgagagatcctgttatatacagagtagcacatatgactcaccatagaacaggtgataagtggtgcatatatcctatgtatgattttgcacatcctatagaagatgccgtagaaggaatcacacattctatatgtacgcttgagtttgaggatcacagacctctttatgactgggtagttattgaaacaggctataaaacatcgccagaagagaatcctaagcagatagagtttgccaagttgtatcttactaatgtagtaactggaaagagatatattaagaagcttgtagaggatggtgtggttgacggatgggatgatccacgactggtatctatagcagctcttagaagaagaggatttacacctgaggctattaagatgtttgttgaacttgtaggtgtaactaaggcacagggatctgtagaatatcctatgcttgagtattgtataagagaagaccttaagcttaaggttaaacgtatgatggcaatacttgatccggttaagcttgtaatcgacaactatccagaagatcaggtagagtatatggaagtttctaacaatcaggaaaatcctgatatgggaacaagaaaagttccatttacaaaggaattgtatattgaaagagaagacttcatggaggaaccacctaaaaagtatttcagattattcccaggtaacgaggtacgtcttatgaatgcatattttgttacttgtacagggtttgaaaaggatgaggatggcaatgtaacatgtatacattgtacctatgatcctgcaacaaaaggtggcaattttactgagcgtaaagtaaaggggactatacactgggtatcagcatcaaagggaattaacgcagaagtcagactttatgagaacattgtggatgaagaaaagggagtatataatgaggaagatggttcgatgaatattaatcctcattctcttacagttcttaagaattgtattttagagcctgagcttgttaatgctaagccagaagatagatttcagtttgtaagaaatggctatttttgtgttgataacaaagactctaaggagaatgcactggtatttaacagaatcgtatcattaaagagttcatttaagctccagaaataataagtggttaacaacctctttatgcgggtaatgatatggaagaaaaacaggaaagtgtttacctttatgataagaagattacatgtgccgtgtgtaataaagaattcttaacaaagcaggtaagaacaggcaaggcaagatttaagggtacgaatgaaatactaaagcccatatacacaggtatagattgtactaaatatgatgtaatcatgtgtcctcattgcggatatgcagcggtgccgagaatatatgggaagctgacaaacaagcagagggcggctcttaaagaatcagttgaaggtaagtttaaggtgacatggaaggatgaggattattattcatatgatgtcgctataagacgatgtaagatggcgcttttaagtgagatgatagtgggaactaagataagtgaaagtgcatatctgtgtcttaggctggcgtggctttatgaaggccgtgttacagagcttataaggcagaaagcagataacagtgtaacaaaacaacatttaaaatcccagctggaatatgttgaggatgcttataaaggtttcaaggaggctgtttccacgcagtaccctccgatatgtggtatggatgagaatacattgaattatcttctggcaagtcttggacttaaatgtagggaatatgatgatgccaaaagatttgccggtgcaatcataacgtccagaactgcacctgttagtattaaggaaaaggcaagggtattactggaacagattaaaaaagatggacagaataaagtcagtgattaatagaatatggaactatgagataagtcatatatttatatattccataattatcaatatggctgtggaatgtcttaacaaaagaggaataacaggacttttgagtgtattcacaagtcctgttatctttcttttgaatacaatgataattatgacaactatgtcaatagcttattttttcaggaaaagagtatttgtgtatgctttggtatctgttatatggctgttaatagctgttattaattttgtggtgctgtgttcaagaaagacaccatttacagctatggacatatatctgataaaagatgcagtaaaggttatacctttatatatcaatatattccagatgattattataattgcaggtgttgctgtagttgtggctgcacttgttatgatatggaagaaatcaggaaaatgtacagtacagctttcagggaaaaagttttatatagcagcattatttaaagtgggaataatattcctgattacttattcttatacggcagcacttattataaatggatatgtggagatgcattttggtaatcttgcccatgcatatcaggactatggtgttgcctactgttttacaagcagcataaaggacaggggtataggcaggtcaaaagaatattctcaggaatatatggataatcttaagatggatcttgatgaaacatcaatagaggtatcagaaaaaacgcctaatataatatttgtacagctggaatccttctttgatcctaagctggtcaaaggtgtagagttttcatataatcctactccgaattttgatagattaagagaagaatattcatcaggatatttatcagttccatgctttggtgcaggaacagctaacacagagtttgaagtacagacaggagtcaatcttgatgattttggaccaggagaatatccatatagaacggttatgcagtctaaaacatgtgaatcagcagcgtatgatttaaaaaagatagggtattctactcatgctatccataacaacgatgcaaccttttatgacagatataaggtgttttcacaccttggttatgatacatttacacctattgagtatatgagcagtgattatcagaagacgccattaggctgggctaaggataaaatgcttgtgccagagataagaaaaaccttagattcaacagagaatatggactatatatttacaatatcagtccagggacatggtgattatcctgctgtcatgccagagggctatataccatcagtaaaagtatcaggcttttttgctgaggatgaacagacacagtttgaatattatgtcaatcagatccacgagatggattcatttataggtgagcttgtcgatatgcttgaaagaagacaggaggaaaccgtacttgtaatgtatggtgatcatctgccaacatttagttttacaaatgatacaatgaaaaatgcagatatatatcagacggaatatttcatatggtcgaactttgatatggagaagattgatatgaatcttcaggcatatcagttatcagcagcggtgtttgaacgtcttggaatatcacaaggttatattatgaagttccatcagacaaagcatgaagatgaggattatcttaagaagcttaaaatactggaatatgatatattatatggagataaacagatatataatggtgaagtgccatatgttgcaactgatcttaagatgggtatagaagatattaccatagaccaggtatataactataaagattatatatgtataagtggtaacaattttaatgatttcagcaaggttcttatcaatgataaggaagttgactgcgagattataagcggtaatctgataaaggtaccaaagaaaaatgttgtgtcaaaggatgaggtttcggtggtacagagtggtgaagataagattgaacttggcagaataacatacaaggtagaataaatgtatgaaattaatctgtaacatctttacaggtggactgtttaactataagtacactgattttacattgatttacattgatttacattgattttatggcaaataaattgacactaacactttaaaatgttaatatgaaaaaggtgtgatcaccatatattttatttggaggtacttgtaatgaagggtacagtaaagtggttcaataaccagaagggttacggctttatcagtgatgagtcaggaaaggatgttttcgtacattattcaggacttaatatggaaggtttcaagtctttagaggaaggcgcagaagtagagtttgatgtaacagaaggcgctaagggacctcaggctgttaacgtaacaaaattataatccgaatggtttacagtgtgccttttcctgatttatatatagatttttgaaaagatatattgttatacaattaagattatgagggagcagctaccagatgtggctgctcttttgatataatttgaccttttgacttcgtacatcaagataaagaaattagaatgtaatggaggatttatttgtatggaagaatacggaattgaccttgcagcaggtattccggcaggggcggagaatatgctctcagcaggagggatacttatgctatcagcatttatcgtgctgattattgttgttattaagagatggaatgggcggtttatcaatgtactggcaagtgtatttgcatattccatatttgtgtttatatttgcaaatctttgcatgtcagcgctggcacttataccatctatagaccagacatttgaatataatactactgcgtacacaataatatattcaatattgtcagctttaggcatgactcttgcaagatatgtacttgcaagatttatggcgggaagatttgaaagaaaaggtgatgtatatctttcaggtattggtctttctgtaggagatggtgtgttatatggacttacagttatttcgtctatatctatagcaacagcatacaataacatgggacttgatactatggtagcaggacttacagagaatgatacagagacattctataagacactgtctaacctttttaatgcaccaggatatctgtggcttcttatgggaatagcatttacaatggatattatattatctatggcacttagcgcagctatgcatgcatatgtcaagggacagatttcacacatgtgggcaagctatatatgcattatacagtttgcaagttatgtatcattccaggtatttaattattcatcacagacatcgattataatatgtttcatagtaaagatggctgtggatatagcagcgataatatatatatttaaggtgattgccggggagatgaagtacgttaatgactgatattcgtaacggattatcaagtgaagaagctaaaaaacttaaagaagaaggactggataatataccagtaggaaaccagtctaaaacaataggtcagatagtagcaggtaatgtattaacatattttaactttgtgtttgcagtatttgctggtcttctgatatttgtagggtcatataataatatgacctttctgcccattatcattcttaatactataataggtatagtacaggaaataagagcgaaaataactctggacagacttacagttgttaatgcacctaaaacaaaggttataagagacagctatataagtcagatagattccacggagcttgttaagggtgatgtgtgcatatttgaagcaggtaaccagcttagtgcagatgccattctggcagaaggctgtataagagtgaatgagtcgcttataacaggagagtcagatgagattataaagaataaaggtgatattctcttatcaggaagctttgttgtatcgggagaatgcagggcggtacttactaatgtggggcattcatcatatgcttcaaagcttgcacttgaagcaaaagctggaagaaaaaaacagcagactacaatgatgaagtcacttgataatcttgttaagattattggtatagttatagttccgcttggaattattatgtatatacaggggtattttttccttggacatactataaagaatagtgttgtatcgatggttgcatcgcttgtaggtatgattcctgaggggttatatctgcttgcaagtgtggcacttgttgtaagtgtgagaaggcttgcggggaaaagtgtgcttgtacatgaaatgaattgtgttgagacacttgccagagtcaatgtgctttgtgttgacaagacaggaactataacaagacctgaaatgtcagtaagtgatgttgtgttctacagggataatgttacggctataatagcggatgttgcaggaaatatgagcagtgataatgaaactatgaaagctgtcaaagaatatttttctggacacaatgacaagaaagcagaaaggatatattcattttcatcacagaataagtatagtggtgcagttatcgatggtaaatgttatgtttttggagcacctgagtatgttcttcttaaccagtatgatgattatactgatatatatgacaggtattcggacaggggagaacgtatacttgtttttggtgaatgtgtaagtgatccacaaggaaagattatagaagaaccagttatcccatatgcatttattattcttgaaaatgagattcgtgatacggctaaggaaacctttggatattttgagaaacaggatgtggatgttgttgttatatcaggagataatcctgtgacagcatctaaggttgctataagagcaggcataagaaacgcagaaaattatgtcgatgcaactacattaaaaaacgaagccgatataaaagctgctatacagaagtatacggtgtttggaagggttataccagaacagaaaaagcagataatacaggcttataaagcggctggaagagttgttgcaatgacgggtgatggtgttaatgatgttcttgcacttaaatgcgctgattgtagtgttgctatggcatcgggaagcgatgcggcgagcaatgctgcacagattgtgcttttagattcggatttttcaaagatgccagatgtggttcttgagggaagaagagttgttaataatatccagacatcagcatctttgtttcttgttaagaatatattttccattcttacaacggttttcacgcttatagctgctaatctttatcctttgtatccaacgcagttatcgctgttaggtgcatttacaataggaacaccagcatttgttctggcactgcagcctaacaaggagcttataagaggtgattttctcgttaatgtcatattgaaggcactgccggcaggtcttgcagactttattatgcttgcagccatttctattcatggtaatatactcggcatgagtaatgaacagatatcgacagttgctattgttattcttttatttataggtttagcagctcttgtgaggatatgcaggccatttgatggaataagaatattattgtgtcttgccatggcggcaggaatagttatatgcgtgttgaattttaaaggaatatttgcgataacgacagtaaatatgattatgttaagaatgataataatgtatgcactgattgcaggggtattgttctgcattatgtgtaaatcagttggaggctggattgattatatggagagacatagtaagagattcaggaggctgcttaaagggtgaagctgttgtttaattgaatattagttggagatgaacggacgacaaatataagctacaggcagttctgcacactatgttcaatgccagaagctttgattggatatttctaagtctttccatataaactatggtaactgacgctaccgctcagacgcgccgtccatggcgcggcttcgctgcttcgtacatccgtgtacgaagcttgctggttggcgaagggaaagactaagaactatcacaatcaaacttcaagtgcatttcgcatagtatgcagtactgcctgtagcttatatttgtctgtgttgcggcataatttaatgctgaatattcaattaaatcaagtgggacgaaacaggggcggaattgtgcgtaaagcgcacaattccgcccctcatgcctctccct

SEQ ID NO: 397 - DNA, 216 bp, Unknown
  gut microbiota DNA sequence
atataattatggatggaaataccgaagatttacaaaagtttgttccccaagtgcattttgagcaaatacctattaaaaatttatgttcaaatcaagattaccaacgtaatctttctatcaaacacgttcagcgtgctgcagctaattttgacctttatcagataaaccctgtaaaagtaagtagacgtgatgggataaattatgtgttcaacggac

SEQ ID NO: 398 - DNA, 409 bp, Unknown
  gut microbiota DNA sequence
agcgtgctgcagctaattttgacctttatcagataaaccctgtaaaagtaagtagacgtgatgggataaattatgtgttcaacggacaacacactatagaaattgtcgctctcgtctctggatcaagagaaactcctgtctggtgcatggtttatgatgatcttgtttacactcaagaagcagatatttttgcaaatcagatgaaatatgtcaaatcgttactaccttatgaaatattcatggctaatattgaagctggtaatgatagagaacttattattcgtgaccttgttgaatcatatgatctctctattacttcttcctctcgccccggaggtatatgtgctgtatccactttaattaatatctatgaaaaatatggttttcacactcttgatcgtgttttacg

SEQ ID NO: 399 - DNA, 6346 bp, Unknown
  gut microbiota DNA sequence
gtttcttttccttcgccccactcatgtcctaatgcttcgataacagttacatctgtcttgctgtcacagcctggtcttgtacagtgatgtgacttgcttccggcttcctcgcaggttgcttccttatctactgtccattcttcactatacgcatgacctaatgcttcgattgcttctgtctttgttttatcgcatcttgtacatgtgtatgtcttttctccggcttcggtacatgttggtgcctttgtttcttttccttcgccccactcatgtcctaatgcttcgataacagttacatctgtcttgctgtcacagcctggtcttgtacagtgatgtgacttgcttccggcttcctcgcaggttgcttccttatctactgtccattcttcactatacgcatgacctaatgcttcgattgcttctgtctttgttttatcgcatcttgtacatgtgtatgtcttttctccggcttcggtacatgttggtgcttttgtttcttttccttcgctccactcatgtcctaatgcttcaataatagttacatctgacttgctatcacagcctggtcttgtacagtgatgtgacttacttcctgtttcctcacaggttgcttccttatcaactgtccattcctcactataagcatggccaagggcttctattgcttctgtctttgttgcattacatcttgtacatgtgtatgtcttttctccggcttcagtacatgttggtgcttttgtctcttttccttcgccccattcatgacctaatgcttcaatttctgttacttctgacttactgtcacagcctggtcttgtacagtgatgtgatttgcttcctgcttcttcacaagttgcttctttatctactgtccattcctcactataagcatgtccaagtgcttctatcgcttctgtctttgttgcattacatcttgtacatgtgtatgtcttctcgccagcttcagtacatgttggtgcctttgtttcttttccttcgccccattcatgacctaatgctgcgatttctgttacttctgacttgctatcacaatctggtcttgtacagtgatgtgacttgcttccggcctcttcacaggttgcttctttatctactgtccattcttcactataactatgacctaatgctgctacctcttctgtctttgtttctccacacaccttacatgtatataccttttcacctgcttcggtgcatgtagaatcttttgatatttctccatcattccatacatgttctttatgcacaagtggcaaatcattataagatgttctttcccactgtaatgttgtaaggtcttttaactttccagcacctgtatatggctgcacctctgtactcaggctgtctgctgcatataatacataatcactatatggcagtgcattcttgaattcttctctatcctgaacaagtgctacctcgcctgccttatctgtgttaagtgttacctttaaatctgcctgcttgccatcaagcatatatatagaattaaatgcattgatatatccggctgcactgcttccattaccacttataagtacattagtgatacctgacatataacagttctcaagcagcatatgtgctccacagttagatgaagcaccattacttactatcttctgtgcatactctgaacctgctgttttttctatatccagacgataattcctaagattctgtgcatccataatacaattatatacatgtgctgtaccgaatcttaatctaggcattctgtccatagaatccttatagtagttattagcaaatgttactgttatattcttagatgatgtatcctcatcgctctgtccaagaagatgtgttttcttctgtccatatgcataattacatatctgttcatgtgtcattccagattcacgcaaatgcttataatatgcatatccatccggattagccttcatagcattcatcatattatcaaagaatgttccaccatcacttgctggaaggaattcacaccatgatattgttatattactataagctgatggagtcttgatatctataacaccatcatatgccttataaaaagtacaatggtcaatccatatattagaactgcccttttctatagtcatataatcccagtcattacggtcatatccaccacttgtttcatcgtcccattcccagagttcatcaaacttaatgtttcttataattatgttgtcagaacctgttatatctatacatgtatgtgtaatcttagcaccattcttagaatagattgtaagattgctcatacctgcaagctttaacatagatactcctgatctgataagatccggatgtgtaataggataattcttatgtgcagttataaatgacttatattctgaatacccctcaacttctctatcgccaagtgctatatccgctgtaagctctataactgatgcacgtccgctggctttaacgctctttattgcatctaagaattcttcggcacttcctgccttataataattctttgactcttcaagaagattaccaccaccagttacaccggcacttgctgcataaccttcaacattatacttgtaaagaccagtatcatcaccatcattttcattgtatgtgtctgatatatactgtgttataacatatttctgctctgctttagttgttacatttcctgcgtagttaatacccactgcactaaatactgaataaggatcccatccaagataattaatcttaatcatctcatctgcctttttcttagatatctgtgatctgttagcattaatagcatatcctggtccatagcttccgtattcataaaatcttgcggccttagctgaattaccactcatatctgcatatggattagctgcatttgcacgtagaatttttcccatataacagtctatccatgttatatacgcatctgcaccccaaggtcgtgcaagataatacttattgcctgagcatccatcctctgaaagaacctgacacttatagaatgtaagtccataagctgcatctgcagaagtcttaggagcacatacataacctgaattcttgttggcattataacggaatacaagcttacagtcgttaaataacgctctaggctcattaccatatataaagtctacattacctgctatataacacttgtagtaatactgtgtacccttattggcacataatgtatcctgataaccaagtattcttacattaatataagaagcattatcagcatcactgcttaatgcatctgctgactcattgctcttagttccatctccaagatagttatatgtattctcgaacgtaagattctctgccgtaaagttgtgtgctgtgctttcaatacgtactgcacaacgcttatccatgtcacctccggcaagttctttaacatcataatatattcttgtcttttcactatcctctcctataagagaaatatatggtgatgatacaacaagatgttcattataatcgccttccttaacaaggataacaactctttttgtattagctttatcaactgaatttacagctgcctgaactgtcttatatgtagggatgccattaacttgctctccatctgttccatcatatgcagaatctaccactttatcataattagtcagatatacataattaaaagtttccctggttacactgccatctttagcctttataagcagctcaacatcatttcttcctgctgaaagtaaaacatctgtaaatgcaaatgtgccctttacagccacagacttttcatctacaactgttccattaatctttaatgtaactgttgactgtttttcaacaactccttcaagtgtaagctttccgtcatatactgtgttgtatgatcttcttgttatagtaagtcctgctgaagaatcttcatatgcatattctcctgtatgtcctgcacttggtactgcccatacagaatctgacggattactataattatcaatgttgccatctatgtgtgagtatgctatgacatagtaataatatggcatctctgcttcaacatcactgtcttcataagcacattcgcttattgttgctatgagcttggcattatcacttgtttcatcatatgaataacgatacaactcatatgtatctgctccattaaccttatcccatgcaacattaatcttatcacttgttgataatgtactaagcactggtttatcaagtgctggtcttatatatactttatctgactcaacgtatgaattaatctcaccgtcaacgccaagctttccgcttaccctgaacttgtaatcgccagcttcttttaatatatatctgtatgaagtatctgtaagtgcagactcaaccttactccatgtacttccattatcctgtgacacttcaagtacatataagccatctccgtctgcctctactttattagtccagcttacatctatatattctcttgtgtctgaacctatagctgtaactgtatctatttccggtgctgttccttctgccttgtagcatttattctggtcataaagaacttttccatcagcggcttcatacttcatattcttaatagtcgcctcaactccggctaatacaaaaccataagatactgcagtagcagctttatctgtcttaaacagctctgtacttgtatatttgtacactaactgttgttctgtctgtccttttggtgtaacagatatagccagaccctcgtctgtctttaccatctcaaaatgcaccattgtaccaacagctacagttcctgataatgcacttcctgcaccaactggttcacttgttcctttgtaatatatctgctttaattctgttgactttcttataccagctgtagctatcatgctgccatcataagcaccaaagaataagccgttgcttgagctgtttccacatgaattaataattatatctgctgataatttattaatatctgctgtttcttcaaaaccatagtaacttactgttgaacttatattagttttatctgctgaaagtgtaccacctgtctgtgtcagcttaagcctctgtccttccggctgtactacaagactatctgtgctgcctgttataactggcatctttggctgctcaacatattcaacttccttggcatcgtatactactgatattgacttgatataggcatctcctcctgtagatactatctctactgtacctgcctccttagaatcatatctgtaagatgaaactgctgttgttgtactcgctgcttctccacctattgtatacaaagcatacataccactatatgcttctacagataccgtacatcttccagttacaggaactactatcttcgtcccaccattaaactgcgctttatcaccagatgcagccagctttcctgtacttgcatcaatataaagtccattataatatccggtattattttgtattgtcttattaaaataatcaccagaaccagacacgaaagaccagcttgttatctgctcgaatataactttctgtgtcacttcacctgatttaactgttatatctgctcctgacttaagcttatatggctgtgctatgaaatcaccaccaatagtaagtgtataagagccttctctaagccttatattatcctttgaatcaaagctatatgtatatctgctgttatctttgttagtatatgtatatattatattctttcctgcaagatccggttcatctggaagattaagtgtaacagcatatgttggcttaagcccggctgttatatctaacgttccatcctctgtatagcttactccactatgtgctgatgttatctcataatcatccgctcctgtgagtactacattatatgtcactccctcttcaactcttgcagaatatgacttcttatcagctgccataacgacctctggtacatattctctatcagcatctgttaaaaatgatactccaagctgtgacacatcgtattcatctgcaatacctgttatattaccagttactgtcttagttgaaagcttcatgattgtaatatctgctgtcacctgacctgaagcttccttgctaacctttaccgatgttataccactagttataatataagcaggattacttatagaaagctcatattccatctcttcatcttctactggaacctcaactgagtacatgttatctgatataataccagaatactgcagacctgtagtcttattaactgcaactacacttgttccatcaggaatagctgatgaggatgtgatagttcctttgattgatgtcttttcaagttcttcgcattgtattgagagggactgaagataat

SEQ ID NO: 400 - DNA, 6051 bp, Unknown
  gut microbiota DNA sequence
cctactcccttaaatttgtagttatcactctcccaaaaagaacctgaatgataatcatatcaattgccacttgatatcattatcattcaggttcttttagtttatttattaaatattgtaatcactttaattactttgctgtttctatcaacacattttgtactataagtcctactttgcattaactcctgcgatatccttaatcacctctccagcaattataagccctacaacagatggcacaaatgctacgcttcctggaatatcacgtctttctgtacatttgtgttctgctcctggaggacatatgcagttagtacgacagcttatcgacatatcctcgattggtcttgttggctgttcctctgaatatacaaccttaagcttcttaacgccacgtttcttaagttcacggcgcataaccttcgcaagagggcacacccttgtcttatatatatctgcaaccataaatgctgtcggatccagcttattaccagctcccatactgcttataaccggaattccaagttcatttgctttcataataattgaaatcttagctgtcacagtgtctaccgcatcaattatataatcatactcatcaaatggaaatttatcagcattttctggaagaaagaaacaattatgaattcttacatcaacattgggattaatctccagcattctctctttcataacctctgtcttatattttccaacagtttttctcgttgctataatctgtctgttaagattggtaagacatactttatcatcatctataaggtcaaatgcacctatgccgcttcttacaagtgcttcacaggcatatcctcccactccgcctattccgaatacagccactctcttattagctagttcctgcattgcactttcacctagtaataattgtgttcttgaaaactgatttaacatctttatctccattccgaattattaattaccaaacctaccattatggtagtatttcaataagagattatattataatcagcggtttctgtcaaagtaatacttttattgctctttcttacatcttctatatattgacatctatatattttcttctatatattcacgtctacatatttttatttatatatctgcattttatatttacatctatatatttttatttatatattctcatttcttattgtttctataatattctgctttcttatctggactaatgaatatttcataattccaagaagcagtataatcacaacaacaaccgcaataactatagccggcaatggaaaaacatatcttaactgtgactctcctgctgatatatatatgacataagaaagcagggttcctgacactacaccaattataagtgctttacttccataaaatacactttccatccttatcattttatcaaattctctctttgtcatacctatcgactgaagcattgcaaactctttgcctcttaattccattccggttgtaacagtattaaatatattggttatgccaatcaatgaaacaacagcaataaatccatataagaatatcttgattgtcagaattagattttcattgtttcttctttcctgtgccgcattaactatgttattcttcccaatatcaaattcattcacaagtatatcctgtgctttatcagggtcgtcacagttaatattaagaagtacactgcaatcaatatccccgggattaaactgattcatataatcatcacttacaataagatagccataagaagtataagcattgtcatatccgaatggcctttcattgctaagcgccacaatctttatatcgtaaaatgttgtattatctgattgtctgttattatcagttgattgtcctctgcctgtatttccagcccgatacgttaatatatcaccagctttataaccatcatatacattaaaatattttatgttatttccattattaatgtactgatatgtattatctacaagtatacctccactctgtgcagtttccttgctgatgccaagctttttaatatacttttcatattcatcattacctaatgaaataatattaatataataattgtccggttctgctaagccaatttcataattatacatctcataataatcagcgctatactttggtttatcctttaaaatgccataaaagcctcttgcatatgtaaaatctgttatatttgtttcattatttatcctgttcacaatattacttacttttttatcagcttcatctacagacatatttttatatgaagacatatacacccttaaatctatattgccattagcgtatctgttggctgactctgttaataaactcataaatccatataaagcaataaatgtcattacactcagtgcaatagaaatagtgattaccctgtattttctcttgttacgcttcatattcttataggcaaggacacctccctcaccccatattttcctaactaatttaggtgtccttaatgacttagactttatcttgatatcttcactatgattgatagccattattggtgacattcgcgaagcccttattgctggtactaatgccgacaatacaatcgtaactatcgcaagtacaattgataaaagaacgcctaataaagatggcgcatacacaatgctcatttctaatgtatcaataagcattttgttacttaatacgacaagaatataacttgctgacagacccccgcctatgcctgctgcaacacctattacacccataaacgcagcttcaaaaaacacattttttctaatctggcgtggcgtagcaccgattgaagctaacattccgtactgtttagtcttctggttaatagatatagcaaagctgttacttatacataccgctgaagttataataattataaccataacaacagccgccatattatatacaaatgcaacacttgaatcataaaacgcttcatactttataagactattattaatgtaatatgaatgtgccttatcaagctggttctttaatatctttgcctcttcatctgttgggctgcctgaatactgcttgttaaataaaattctgtcgacacctaatatatccgcagttatattatatctgtctttaagtacctttttataaaatctgatatatatgtccgatttattcaaagatgtatctgacttatttgcaaatgtaatgactgaataacccggtgcagttcttggttcttcaccatatggaagcctgtcacatattcctacaaccttatacgtcttagtctgctttacatcaagcagctcatcttctctataatcatcattctgataaagctttttaccattatatgtcctgtcgcctatatcaaatgtaatctcgtctccaagattgtatttaacaccgccattggtcttaatatgacttgatataactatttcgctgtcatcttctggaagtcttcctgatgtaacatttatttctgccttttcaaatgtatcattatcaagtgcctctatatatacataaggcttactgtcattaacacagtcctcaagcacagcataacctatttcgtgcatttcgtaataactttccacctgcctgttattaataactgactccttctccttatcagtcatatcatataagagaagatgaaaatctccgtctaccttcttttctcttaacgttatgctttcttttaaacttaccgccatagttgcaactgcagtaagaagtgctgtcgcaagtataataccaataattgtaacaattgttctttttttattaagctttagattccttattgtcaacctgttaagtatctgcatataaactctcctttccagcccgtttcataaatttacataattctatatcttataaaatcttataaaattatgaaactatttatataaggctcgtgcctgttcataatctttatacaagcctgccatcttcaattcgtaatattctgtctgcaatcttcgcaatttcaagattgtgggtaatcattacaattgtctgattatatttctgattagagagttttaataattctacgatttcatcacttgaacgtgagtcaagatttcctgtcggctcatcagcaagaagtatagctgggtgattaataagtgctcttccaattgataccctctgctgctgcccacctgataactggttaggcagatgtgtcaccctgtcctttaaaccaagagtgttgataagctcatcaagttcgcttttgtctggtgtcctgccgtcaagttcacaaggtaaagtaatattttccttaacattaagaattggtataaggttatagaactgatatataagccctacctgtcttcttctgaatattgctatcttgtcactattcagggaatatatatcctcaccctgtatatacacttttccgcttgttggtctgtccactccgccaatcaggtgaagaagtgtcgacttaccacttcctgaacttcccactatagctacgaactcgccttgttccacactgaatgaaatatcatttactgcaagtacagcattgtcatctttgccatactgcttaacaagatgttctacctttaatatctccatatactgcctctctttctgtcgcacatatagattataaatatgcgttgctttattacatatctcaatatacacaggtaaaatgacatttcggtgacatttattttatgtatttaactataaatgttgtcttttcatcatcagactccacacttatatagcctccctgcttctcaatcactgccttagcaagcggaagtcctattcccatactgttatcttcgtatttagcttcactgtaataacgttcaaatatctgcttctgtcgttggtcactcagtttatcacctttgtttgttatatacactgctgtatacacatcattatctgttatatttatctttacagtacctttatgtctactatgttcaattgcatttttaataatattctgtaacgcttccctgttccagttgtaatcgccctttacatggatgtccaatttattcaatttattatctttattatctgaccctttatgaatattatctgtattgggattatgaacatatatgtctatactaacagctttaatttctgctataacctcaagattacctaccgcttcttctacaatcttattaatggaaatattctcattattgaactccaccacacctgcatcaattcttgataacttaagcatagtaacaatcatccagctcattccattaacctgatttaaagcttcatatatgaatttctttcttgtagcatagtccatatcaggattatcattaagattatccaacagaatctgagttgaagtaagtggtgtctttaactggtgtgatatgtcagataccgactgtgctaacataaccttttttattctggctgagtctgcctgttccttcatatataccataattttatataacgaattcttaagactgctaagctcatcttctgaattatcatttatttccagctcataattaccgcgtgatattttatccatataatcctgcaattggccgatggcattctttcttctcctcaaatatatgtaaaaacatataataaacaataccgacattacaccaataattaaagtactgactatgatattggtatttcttatgtcactcatatctttaatataaaatgtattatctgttattccattttttcttaatatgctgtcaaattcttctggtgttgtactgctttcaagctcactgtatgacttatttaatataatcgcaatttcttccatatcaaagtccggatactggctgattacattttccataatacatcttatatatgtattctccatattcttatacttatgtgtataccagcttatccatgacatatataccactacgccgacaaccagcactacacctgttaataacagacttttaacagcctgcttattcttatatgtacccatattttctccaatctgttattatattcattctaatctgacaatctgtaacctacacccct

SEQ ID NO: 401 - DNA, 2997 bp, Unknown
  gut microbiota DNA sequence
taactgtaagtgtattatcatttacaaagtttcctgctgaatcccatatatgtgatagtatttcttcccttgtaaatacttttttaggattttgtaacaggatttttaatatctcaaattcaagctttgtaagcttaatttcattatcttccttgtacaattttcttatatcaacattcatctttaaaccggcatatgtaagctcattgccgctccggtttcttcttagcacattcttaattctcgatagaagttccatattgcggaatggctttataacataatcatctgcacctaactccaaccccattacaacatctttctcctcatcttttgctgtaagaaatatgaccggtgctatatcatcagctttaatctttctgcatagcgaaaagccatccccatcaggaagcattacatcaagtatgacaatatctatgttccatacatcaccagctccaattaaagctctatatttttcagtttcctttgcattatccaatatctcctttgcctgatatgcacttcttgcaatcctgacattataaccattattggtaaaaaggtattctaaccccataattattgcttcgttatcctctattaataaaatattactcatatcttttctccaatcttaattcttaattacactgtatatcctgtttaatatatcccagctttgaaaggtaaaattatattacagccagaccttatattgttatggctttatcattcaaaattattcttaatcccccaaaaatgcctaaaatgcgccataatatgtatctttttctccattgtggaaatactaaataatatgtataatattttcttatagtcatacatcttttggaggcacttatgttaattggaggatacaatgtaaccgcagaaatattcagtcttatcacctgtatatttcttatttttcttatgatttattctaacccacgtaaaacacgctcatataaaatactttattatggtattcttatatcactaacagctattatttcacagcttgctcttatatattgtgttgcccataatgataattatagtactaccttctgtataggtatttcattattataccttgcactatattttatcataattgcagcattatatatttatataagttttctttcttctaaaatatataacaacaggggtattttgcacaactctctcacaatattcgcaataatatatctggctggtatcgtatggttttattcacagaaaacacattattttacagctgatggtataataagcattgattcatttatgaacttttaccttgcatatggaataatgacatgttttttatgtcttcttactgtattagtcaatcacaatacgattccaactgtagtaaacagatatgcattgatatttatacctgctgattttattatgcttaccgttcagtatcttactaaaaatgcgatatacacaagtctgacttatgtattaccttttttaatttattatatattatttcatagcaatccatatgatgaattaataggctgccagaaccagaattcctttaatgcaagattttctgacagtgtcaaaatgaaacgtaactttcttgtattatatcttagctttccacagctaaagaatgttaattatgctgtccataacagcaagatagaagtaatatctgccaaggtgtgtcgtaaaatagaacagcagcaccatatggtacacatttatcgttttaataatgttgactttgctatgataatttatattaaggatgaaaccagaataagacaatttcttaataacgtggaacaatgtatcatagagcatatgcactactcaacctacaatgtcaactataaaatcgttgccatacagaataatccggtaataactaatatacacaagcttaattctatgtctgattatctttttaataaaatatacaacgaaacaggtaatcaatgctaccttgcaactgataaggattacagagaattccacgagaattataagatagagcagcttcttcttgatataagaaaccagaacaatcttgatgatgaacgtgtgctttgctatgcacagcctatattcagcgttaatgaaaacagcttcagaactgctgaagcacttatgcgcctgtcacttgatggaactattatctaccctgacagattcatacctcttgctgaaaagaatcattgtatacacacacttactatgattatgatcaacaaagtatgcagaattgtcaaggaattcgaatctaaatatgactttgatgccattacaattaactgttcatcatctgaattatcaaaccgcgatctttttgatgaacttatgagtattataaacaataatgatattaatcctcaacatatcagacttgaacttaccgaaagtgctatatttgatgattttaatatggtattacggaatatggaaaagcttaaccagtctggaatcaagttttatcttgatgactttggtacaggatactcgaatctggaaagaataattggatgtccattctatacaatcaagtttgacaagagtctgctatataaatctcttgacaatactgctgtatcagatatcgtatcccatctgacaagcgtatttaaagaacaaggtttcatattattgattgaaggtgtagaaaatgatgaacaggcagattacagtataggtaaaggctttgattatatccagggttataagtatgcaaagccacagccagttattaaccttaaagactatttcaataaggctacagcatagaatattattgtttaattgaatattagttggtgacgaacggacgacaaatataagctacaggcagtcctgcacactatgttcaatgccagaagcttcaatcggctgtttctaagacttttcatataggtagttataggtgacgctaccattcggacgcgccgtccgtggcgcggcctcattgcttcgtacatccatgtacgaagctag

SEQ ID NO: 402 - DNA, 875 bp, Unknown
  gut microbiota DNA sequence
cttcttcctctcgccccggaggtatatgtgctgtatccactttaattaatatctatgaaaaatatggttttcacactcttgatcgtgttttacgcctttgcgttgccacatgggaaggcgcgcctatgtcctttagctccaatatgcttaatgctattgcccgtctggataatgcttatggagaaacaatgaaagatgacacatttaaagaaaaagtaggacgtgtctctgtcagagaaatcagtcgtactgccagagaacgtcgtgccggttcattagggtttgcagaagctcttttactagaatacaataaaaaatccaagtattcacttccttttgagaaattatacactcataaaacacccaaaaaaagagaacaatcaactgaagatgaatccggtcaaagttccactccagaaggtcagttagatttattttctacggatcaggacaatactcaggctctgccaaacgaatagcgcagagccttcagccttcgttctatccatactttcaaaagaataccctactctaagactccctttcatgcaatcactattttatcttattccaaattcatcatccgctccatccgccaccttatatatgaatatccattccaaatatttgcttttaccggatactctttcctgtaaacaaatacagtgtgatatttaacaaaatgcattctacaccagttatgtatatccttcatatatatgttatttataccgttcacccactgttctaaaaaccatatgtctttatctgacaataactccattatgaacagtacattataatattgaatgacacctactctcttcctttcctctattaaccttttacacaataacctatacttaatgttcata

SEQ ID NO: 403 - DNA, 2952 bp, Unknown
  gut microbiota DNA sequence
atgtgtgctaaatcagaggggatgggcatgaggggcggaattgtgcgctttacgcacaattccgccctgtttcgtccccttgatttaattgaatattcagtattaaattatgccgcaacacagacaaatataagctacaggcagtcctgcatactatacgaaatgcacttgaagttcaatcgtgctgaatcttagactttttcttagctacccagctagcttcgtacatggatgtacgaagcaatgaggccgcgccacggacggcgcgtccgaatggtagcgtcacttatcactacttatatgaaaagtcttagagtcagccgattgaagcttctggcatttaacatagtgtgcaggactgcctgtagcttatatttgtcgtctgttcgtcaccaactaatattcaattaaactatataattttcttccccgttaccggatctgttaatccaagaagtgccattataagtgccattctcacatataccccattctgtacctgttcaaaatatgcagctcttggatccttatcaacatccgcagctatttcagttattcttgggagtgggtgaagtactggcatatccttaggtgctttctttaacttttccgcattaagtatatagcaatcacgtaatcttatatattcatcctcactaaagaatctttctttctgtactctcgtcatataaagtacatcaagctctggcagcacactctctaactgccttgattccttatatacatctgtgttgttatcaagaacatcctgtatcatataatcaggcattttaagctcttgtggagatatgaatatatatttgtttcctttatatcttgaaaggcttttcacaagtgaatgtactgttcttccgaacttaaggtctccacacaaacctactgtaaggttatcaagtcttccttttcttgattttatagtcataagatctatcatagtctgtgttggatggctatgtcctccatctccggcgttgataacaggtattctcgaataaagtgatgccagcataggtgcaccttctttaggatgtctcatagctacaatatctgcgtagcagcttattacacggattgtatcttcaaccgtttctcccttgttaacacttgatacatcagcagatggaaaacctatcacagtaccaccaagattaagcatggctgtctcaaaggaaagtctcgtccttgtacttggttcatagaataatgtagctatcttctttcccttagccacttcactatatgctggcatattatcacgtattctttctgccagtgcaagtatatcccctgtttcctccactgataaatcctttgggtcaatcaaatgtctcatgtcatattcctcttctttcatgcagtttatatcgtcaatatatttattatcatttcttattccattaatctcgcagcattttattatagatcctgcattaagcatcaatcccttaaaagatattcttctctctctgccccggtcgatacaagatgtattttatgactgataagctcctcaagcttaagaatataattttttgcattttctggaagttcatcccagcttctacaaccggatatatcacacttccagcctggaagctcttctataacaggctcagccttttctaacctgctgtctgttacgaaatccttagttattgttccatctatgctatatgctgttattatcggtattgtatcaaaatcactcaatacgtctaactttgtaagcgcgatatcatcaacattctgacacattattccatatctgcttgcaactgcatcaaatggaccgactcttcttggtctacccgttgctgcgccatattctccgccagcttttcttaactcttccatccagctttcaggcatagctttttctgctacgaatccaccttcaccaacacatgttgaatatgctttcataacacctacaacctgtgaaacattatatcccataaggcctgtacccataggtatatatgccgcaagtgtattagaacttgatgtataaggatatatgccataatctatatccctcaatgcaccaagctgtgcctcaaacaatatatttttattatcctttgcagcatttcttaaaagtgctgaagtatcgcatatataatccttaaacatatgtgcctgtgtcttacaccactcaagaagctcatcatatgaaactggtggctgatgatatatgttttcaagaataagattcttgctctcgactataacggaaaggcggtgtcttactgatggctggtctatgttaagcaaatctcctatcctaagtgtttttttcatatatttgtcaccatatgcataagcaattcctcttcttgttgaaccatatgcagagcctgactgtgacaatctttcctcctctaacacatcctgacgtacatgcataggcatacatatagttgctttatccgatatcttaagattatctggtgttattttcacattcatctgctgcattatagatatttcgtgacgaagatgatccaggtctataaccataccatttccgagtacacacactacatctggatgaaggattcctgatggcagaagattaagcacatactttccttcctgggtaactaccgtatgtcctgcattatttcctccctgataacgtacaacataattcgctttcgcactcataaggtctactatacgtcccttaccttcatctccccaattaataccaactactgcttttaacatacgtactgccttcctttcatttacatattaccattcagagccttgtggaattctccctgaaatactcttgatttttcttatcaaaagcattatactttgcgttgaataagatgtaaaacatatatttgatatatctgttatatcataatcatatgttattataccatgattgaaagaacattctgtcctgacatttattag

SEQ ID NO: 404 - DNA, 14112 bp, Unknown
  gut microbiota DNA sequence
gtgcgtaaagcgcacaattccgcccctcatgcccatcccctctgatttagcacacattcattttcgcaaattaagccataaccagacataatataagtgaaaataggtgctgcgcatacatcgtgagatgcacttgaagttcaattgtgatagttcttagacttttccttaacaacacagctatccacagacacggatgtctgtggaagttcgatatgggacatggatgtcccgtatcgaacggtagcggcagtagttataatatataagaaaagtcttagaaatatccaattgtagcttctggcatcgatgatgtatgcgcagcacctattttcacttatattatgtcgtcagttcgtcaaccgaatgtatgctaaacaacaattcagtttatagcaccttagacaggaaatccctgagtctttcactcttaggctgttcaaagaatgtcttaggttcattttcttcctcgatgcggccttcgttaataaacatacatctgcttgatacttctttagcgaatcccatctcgtgagttacgacaatcatagtcatgccggaagctgcaagctctttcatgatagaaagaacctcaccaaccatttcaggatcaagagcggatgtaggttcgtcaaagagcatgatttccggattcatggcaagagctctggctatagcgattctttgcttctgaccgcctgataacatatctggatatgagtcagccttatctgtaagacccactcgttcaagaagttccattgcttttttgtcagcttcttctttggacattagtccaagctgtacaggtgcaagcgtgatatttttcttaatagtcatattaggaaaaagattgaagtgctggaacaccattcctatactctgtcttagcttatcaaggtctacacctttttcagtaagatcattaccttcatatataatatgacctgaagtaggtacttcaagaaggttaagagatcttaagaatgtagacttaccacatccggatggaccgattatggcgataacctcaccttttttaacagtagtattaatatcctttagtacttcgtggtctccaaaggtcttttttaaattcttaacttcaagtattacattagtgtcgctcattgcttcttaatctcctttctagtttctttacaagtgatgaaaggataacaactaatacaagatagatgatagccacaccaaagagaggaagcatagggtcataagttatgcttcggataatatcaccaccacgtgtaagatcgttaagtcctatataaccactgatagaggtttcctttaacagaacgatgaattcgttggcaagtgcaggtaaaacattcttgaatgcctgaggaagtattacaagcttcattgtttttctgtaacttaagccaaggcttcgtgctgcttcaaactgtccgttatcaatggacataatacctgaacggaatatttcagccacataagctccagagttaataccgaaggcaagtatggcaacaattattttgttaacctggacagaactgaatattacatagtaaataataagcaactgaaccatagttggtgtaccacgtatgacagtcaggtaaatattacatataaagttaagtactttcatgccaccagttttatcgtggttagatcttacgacagctataaggaagcctatgacaatacccataatagctgcacacaaagcaatgattaaagtgtttttaagaccagttagaagatactgatatctgccgtctttaataaaatcagttttaaatttgtctgaaaagcttgttccctggtgtgctgcatcattatttcttacaatgataacctggcttgaagtagcatatgggatagtaaaatcaatatttttcttacgttcctctgttacagttataccagatatacccatatcagcttttcctgaagatacggcagttattatagaatcgaattccatatcttcaacagacagcttcattccaagagaatcagctattgcattagatatatcaatatcaataccacttaccttaccattattatagtattcataaggttcaaaataagcattaacagctattgtaagagtaccgttttcacttgaacctgtaggttcatatggctgctttgaagcattttccccaatataattactgattattttatcaatagttccattattaataagtacattaagtgcatcattgaccttagatgtgaaagagctgttattctttgctatacatatagcataatcctcagttacaaaatcttcattaagcatgcaaaggtcgctattggcattgacaaatgctttagcaggctgtgcatcgataacaacagcatcaattttgccctgcttaagtgcctgtatggcatcatttcctttgttaaatctttctaccttagttccggagccatcagattccatatcggaaacatatatatcaccggtagttcctaactgtacgcctactgacttaccagcaaggtcatctgctgaaaatacagtattttcaggaatgttacttttaccacatgctgtcagtgaaaatgctgcagtaagagttaacatgataaccgctgaaagcatagagatacgctttaatacggagaattttttcttgttcattttcttatcctttctgtgctttttaatatcagacaaaataaaaagactgatattaatataatgttataattatacacttaaagtgcatagtatttcaataaggaaaacaatatcctatcaatgaaaaatatgttaataacagcagctttgttattgttttgtcagttaattatgttatactagatatgtttttggatttttggggaattttaaggataacaggttatgttgacatcatattaaggagaatggtgtgaaaaataagatttttcatacgcaagaatggaggattattatgccggataataatggaagaagagttataaatataatattcagagtgataattataggtgcgttttatacaggcattaaagcagtttataatttctatatgcttatggcacagtatccaacactgcagggtgaaaacctatttagcagagtggcactgcttatagacgattatatgtttatgataatacttactgtagctgctattatatttaatatacttacaagaaagcagatagacagtaaagcatttatagtaagaacggtgagcatagtggcagcactaatagctggctgtatgtcatttccggctataggtatgcttgcgtatatagctatagcaaaatatccacagcttatgcagatgacaccagtgtttaacgacatgtttacgctgaatgaagtgtatacatcacctatgacagaatggctgatagcaagaccatatcttttttacatgtattttatttcatgtgctatatttgcagtgctttttgcaaccacaatatatacatttattaagaatatgacagataagaaaagaatgcagtaagaggaaaatatatgaagatagtaacgccagcttattataaggattttaagtgtatagcaggggcatgtactgatacatgttgtgccggatgggatgttgatgttgatgaggcttcttataagcattacaagaaggtaaagggaagcttcgggaaaagacttaagagtgtaatggtgccatcagaggatggtgggtgtacatttacactgaataatggcagatgtccttttttaaatgataataacctgtgtgatctatatattgaacttggtgaggataagctgtgtgaaacatgtgcagagttcccaagatttattaatgagtatggaagtgtaagagagattggcatagcaccatcgtgtaaaacagcaggtgagcttatattaggatataaggacgagcttacatttgacataaaagacagtgatgaagaggtgagctcatacaatgacatagatcccataacctatatgcagctaagacaggcaaggactatagcttataacatactttcagacagagactatacgatagctgaaagagcagtacttctgcttatgtttgcaaaagatatacagcattatcttgacagggaaagagatgaacttataataggggtctgtaaaagatacgcgaaggaagattatagggaacataagcttgacaaggcacgcgatagtgcagctatgcggcctgatgcatatatgtatacaaaacatctgtttgacagattcaaaggaatggagattattaataaagactggaacatatatacacaggagattaatactttctatgaaaaatgcagggatgccatgacattcaggaatattgtaaatgaattcaataagtattatgaagataaccagcatgagtatgaacagatacttatatattatgtttacagatattttcttgatgcagtatatgattataatgttctgcttaagatgaagggggcggctgtcggacttcttgcacttaagatgatggatgtagcggactggtatcttaacggtaaaaagcttgaattcgtaaggcaggttgatcttgcacatctatattcaaggcaatatgaacattcttattacaattatgaagaatataataagttctttatgactaagagaaaatatagctatgtgaatcttatagcacagttgtttatgctggagtagaagcatactgttatcattaaaagaatatataaggcattatgcattttaaagcagatgtacatgaaaggaatgaaattaactatgaaaatgatacttaagtatctggaaaaacttaagaaggaatgtgttcttgcacctctttttaagatgcttgaggcactttttgaactttttgtgccacttgttgtggcatcgattatagacaggggtatagccagtcaggatacaggttatattgttaaatcctgtcttatgttacttttacttgcagctataggacttacgtgttccataacagcacagtatttcagtgcgaaagcagcagttggatgtgcaacaggtataaggcatgcactttttaagcatatccagtcactttcattcacagagcttgatgagcttggtacttcaacgctgataacacgtatgacaagcgatattaaccaggtacagaatggtgtaaatctggtgcttagattgtttttacgttcaccattcatagtgtttggtgccatgatcatggcatttaccatagatgttaaggcagcacttgtgtttgcagcagctatcccggtgcttgctgttattgtgtttggaatcatggtcggtacaagacctttatataaaagggttcaggcaggccttgataccatactaggtataaccagagagaatcttactggtgtaagagtcataagagcgtttaacaagcaggaggatgagcttaagcattttaaagagaagaatgaagagcttaatcatcttcagaagtttgtaggtaagatatcaggacttatgaatccacttacttatgtagttgtaaatgtttcaatcatagcacttatatggataggtggcgtgagagtaaaccagggagctttaacacagggacaggttgtggcactttataactacatgtcacagattcttgtggagctgattaagcttgctaatcttataatcaatataactaaggctcttgcatgtgcaggacgtatacagtcaatatttgatgttaaaccaggcatgcaggatggaacagccagtgtaagggaatctgatgatgaagtgccggtagtagagtttaagaatgctgcacttacgtatagtggagccggtgatacgagtatagcaggtgtaagctttaaggcgtacagaggtcagactataggtatcataggtggtacaggctccggtaagtcaagtcttgtaggacttcttccaagattttatgatgccacagagggagaagttcttatagatggtgtcaatgttaaggatataaagttagaagaattaaaagataaggtcggcatagtcatgcagaaggctgtactgtttaagggcagtataagaaacaacatgcaggtagctaaacaggatgcaacagatagtgagatagatgaggcacttgccatagcacaggctaaggagtttgttgataaaaaagacggacgtcttgactatatgatagagcagggtggaaagaatctttcaggtggccagaggcagagacttacaatagcaagagctgttgttaagaagccagatgtccttatacttgatgacagcgcatcagcacttgattttgcaacagatgcagcacttagaaagtcaatcaggacaatgccaaacaatcctactgtattcatagtatcacagcgttcagcatcacttatgcatgcagataagattatcgtacttgatgatggtaatgtggcaggaatcggaacacatagtgaactgttagcaaactgtgaggtttacagggaaatatataattcacagtttaaatcagctaagggtgcataaattatcaggatggtcgaaagtttaaaagcttgtgtatgaaatggagtagttatgaaagataataaagataggaagaaagcccagaagggcacgcttttaaaggttcttaaaagaataaaaaagtatagcggatttcttatattgtctatacttatggcagcagtgacagtagcatcaactttatatgttcctattcttgtcggacgtggaatagatcatatagtaggacctggcaatgttgattttgcaggtataagcaggattcttgtgacgataggagttatagttgctataacagcactgtcacagtggataatgaacatatgtaacaacaagataacatatcatgtaacaagagatatacgagatgaggctatggaaaggatacagaagcttccacttaggtatatagatggacagtcttatggtgatatagtgagccgtgtcatagccgatgttgatcagtttgcagatggacttcttatgggattcacacagtttttctcaggagttcttactatagttggaacacttgtattcatgcttacaattaatgtgaggataacacttgtagtagtgcttatcacaccagtatccttctttgtagcaagctttatagcaaagaaaacattttcaatgtttaagcttcagtctgaaacaagaggtgagcagacagcctttatagatgagatgataggtggagaaaaggttgtaaaggcgtatggttatgaagaagaagcagtagcacgctttgacgagattaatgaaaggttacagaaatactcattaagagcaatcttcttctcatcaatcactaatccatcaacaagatttgttaatagtcttgtatatgctggtgttgctgtatcaggtgcatttatagctatatcaggtggaatcacagtaggacagctatcaagttttctaagctatgccaaccagtacaccaagccattcaacgagatatcaggtgtcataacagagcttcagaatgcacttgcatgtgcggcaagaatgtttgagcttatagaagaagagccagagcttccagatgctgaaaatgcagcagatataaaggaggttgatggaagggtcgaccttaataacgtatacttctcatatacaccggataagaagcttatagaggactttaatcttcatgtaaagaaaggtcagagaatagctatagttggacctacaggctgtggaaagacaacggttattaatcttttaatgagattctatgatgttaattcgggaagcatagatgtgtcaggtacagatatcagggatatgacaagatattcattaagacatggttttggaatggttcttcaggaaacatggcttaaggcaggaactataagagagaatatcgtcatgggtaagcctgatgcaactgaggaagagattatacaggcagcaaaagcttcatattcatatggtttcataaaaagacttccaaacggttttgatacagttataggtgaggatggaggaagcctgtcacagggtcagaagcagcttttatgcataacaagggttatgcttacacgcccacctatgcttatacttgatgaagccacatcatctatagatacaagaacagaaatcaggatacagaacgcatttgcaaagcttatggagggaagaacgagctttatcgtagcacacagactttcaactatacagtcagcagatgtgatacttgttatgaaggatggacacatcatagaaaaaggcaatcatgaagagcttcttgcagcaggtggtttctataagacactttatgagagtcagtttgatactgttacagcatagtaatacaatgttaggaaagtgattatgaaaatatttcttgcagatatatcagatatgaatgatgacattatgaataaaggacttaaacttgtaccagcttacagaaaagataaaatagagcggtacaggtttatggaagataaagaaagaagcctcgctgcggggcttcttcttaattatgcaacgaagctttacagtatatatatgtcatatgccggtgagattgagctaaagacagcttcagatgatatatttaacgtaaaactggatgaactggtgaaaagctatgacacttcatatgattataatatagaatatgcaggaaatggaaagcctgtatacagtggtctggatacatattttaacttatcccatgcaggcacttgtgtagtgtgtgcagtatcagacagagcagttggaatagatattgaaagaccaagaaaaaatgctataaaggttgcagaaagattctttacacaggcagaatgtgactggataggtgatgatagcttaagatttgcccgtatatggacacttaaggaggcatatgcaaagctcacaggagatgggattgctggtacagtatcaaaagtggagttcaggcatgagacggctgctaatatgacatcagttgtaaatatgtatatatctggaaaaaaagcagataatataaaaatatatgaacttaatattattaagcaaaagtacgttatatctgccatggaatacattaaaaactaacgattgttataaaattaaaatctatagtttttttattaaaaaaggggtagaaattaaaaaaaaatgactgtataatgtagaaaaaattttgcgacgaagaagtagccggtagtaatatgtgtactgccggatatttgttttttcgtggtttatgtgaactgcagagtggttcacacaggtatcatattatgctaaacggacgtgccatatggcagacaggaggaaaaatggctgtaaagtatgtatttgtaacaggtggtgttgtttcaggacttggaaaaggtataacagcagcatcattaggaagattattaaaagcacgtggattcaaagtgactatgcagaagtttgatccatatataaacattgatccaggtactatgaaccctatacagcacggtgaagtattcgtaacagatgatggtgcggagactgaccttgaccttggacattatgaaagattcatagatgagagccttaacaagaattctaacgttacaacaggtaaggtatactggtcagtgctccagaaggaacgtagaggagacttcggtgggggaacagtacaggttatcccacatatcactaacgagataaagagccgcttttacagagattactcaacagatgaaactaagattgctattatcgaggtaggtggaactgtaggtgatatcgagtcacagccattccttgaggctataagacagttccagcgtgaggtaggccgtgagaatgctatacttatccatgtaacacttatcccatatcttaaggcatcaggtgaaatgaagacgaagccaacacaggcaagcgttaaggagctgcagggaatgggaatacagccagatatccttgtgtgccgtacagagcatccacttgaaccaggtatcaaggataagattgcattattctgtaatgtgcctaagtcacatgtattacagaatcttgatgttgagatactctatgatgccccacttgctatggaagaagagcatcttgcacaggtagcatgtgagtgtcttgagcttgagtgcccagaaccagatcttgatgaatggagagctatgtgtaaggcatggaagaatccaacaaagaaggttacagttgcacttgttggcaagtatatccagcttcatgatgcatatatttcagttgttgaagcacttaagcatggcggcgtagctaactcatgtgatgtaactatcaagtgggtggattcagaaacagttacagcagataatgcggcccagattctttcagatgtatcaggtattcttgtgccaggaggcttcggtgaccgtggtatagaaggtaagatacaggctataagatatgcaagagagaataatattccattccttggtctttgccttggtatgcagctttctattgttgagttcgcaagagatgtcatcggatatgatgatgcacacagtgtagagttaaagccagatacgacacatcctgttatccatcttatgccagatcaggaaggtattgacgatattggtggaactttaagacttggttcatacccttgtgtgcttgccaaggattctaaggcatatgaattatatggcgaagagactattaatgaaagacacagacacagatatgaagtaaataatgactacagaaaagttcttgttgaaaatggtatgcagctttcaggtatctcaccagacggaagaatcgttgagatgatcgagataaaggatcacccttggtttatagcaacacaggctcacccagaattaaagtcaagacctaacagaccacacccattattcagaggattcattggtgcggcacttgagtatcaggaaaagaaaatacattaatttgagcataaatgaaaacgtccacagttggaaatttgatttctgactgtggactttttatgtgcggtgaacttttgaaaattagacgataaatttaatatcaaaaaatgtcacgttttaatattgatttcgttatattaataaagagaaacttatacgttgattacatatgaaacttaaggaaaaagatggaaataaataaaaaagctaaaatggagcaattatattccctttatgagtcagccgtctatgccattgcttattcaatattgaataatgttgagcaggcagaagatgtaacacaggatacatttttaaagatatattcttatcttgatgatatagaagaagttggctctaagagaacgaaagcatttataacaaagatagtaaaaaacacagctatagatatatatagaaaaaatcaaaaaatatcaacatacagtgagaacattgaagatactatgagcgaggatacagaccctgccaatatagtagaaagacagcttataacattatataagcttgatgcacttgatagtgcaatgtctgatatttctgattatctgcgtaagattattataatgagatatggatatgaattaaagatgacagaaatagcggacatattaggaaaagatagcgcaacaataagaaaacaggtggagagagctagaaaatatcttgcggaaaagttagaaaatgtaacggaggatataagatgactgataacaaaaacatttttaccaataataaaaaaagtgataatcagaatgttaaagataatctgcttatagatgaattggatacttacagtgattatgtacacgaattttcagatagttacaagaatagaaaagaagaatttcttagaagtctggaaagtgtaaatgaacataaagcaacaggcaaagaaaatactgtaataaaaaatttaaataataatagaaaaataagttcaataagaagtattaagagggtatttacaagaaaatatgacaggattgcagctgcggtaatattattaatgatattaattccgtgtacagtattagcagcagagaagatagtcagttactataatattaatataaaaaagactggcagttatagctatgatttaggtttgagaaatgacagcggttataatgcaaatactaaattccatacaaatgtaaaaataaatttcaatacagatttaagagattatgatatagaaacagatggaagcaattataagctttcgtatgcaggaaatgataatttaaaagataaaaatatatcggtaatgcttataggacttaatgacaatgaagatatacagcttaaatatataactgatgtaaaagaaatagaatacagtgataagaaagtagtatggtttacgcatagttatggagaaaatgttgtaaatactaataatggtaattacgttagcgacatatttgcaatatatagtgattatggatacgcaatagagataaaagcacagaataatacatcagaagatttattacaggaattaattaagaatattgaacttgtggaatgtgatgaaagtgaagcggcaaaggctaattacaggatatatagggatgagtatgtgaaggaagataatgaggacatatatgcaggtgagtatactgatataagttataaattaaatgataaatttaatatgccggatatggatatgtatagcagtaataagcttgaatatacagttaataattatacagttataagttcaatacaagatttgcaagacagtctgattaatgaagaaaacaataatatatcagataagagtaactggatttcatcagaattatcatgtgaattaattaatgaggatggaacatttattaaatataaaagacctgtaacttataatatgggcgatggggtgagcacacttaattcatattatgaagcagaaaatatatctacaagattggtattagtggatataagtgttgagaatacaagtgatgagtacatacagaatgtaagacttatacctcagatatgtagtctgtacagacataatggcaagcttatgataccaagggaatgttattctaacagctttgttaatagtgagggatatccattgtgtgtaatgttcaagtcttcattgggaatagtcagagatgcacaaagcgttaatagaacaagtgttaatcctaatgaaaacatacatataatagcgggatatcttgtagatgaggacaggcttgatgatatgcttttattttataattcgtatggaagtctgacatacaaaaaaggaaagctggcgagtattaagctgaaataaaataagaaacagccacagaaaggaggggaaaggcttgtatagctgatgttatacaagcctgtagagtatatgaagaaatatatagtgtgtgtaactgtggtaatgcttattatgttgtgtggatgtaataagcagaaagctacagatatagttatagataattccagatattcacagacaacaaaagctgacaatccatacaaagaccagcaatcagaaagcacaacagaaaattcacttacaagtatggaagcaaatgcagttgaacattatggtggtgtgtataaatgtaatgacagtgtgaatatttcagattttgaaataacggttcagaaagtaataatagataagacttatgatgaaatagaactggaagcatcacaatattttaagacagagtggatacagaaaggttcacttagtaattataattcggagaatatgagccttgtgtatgtgtatataaaagtaaagaatattgccagcagtacagcagagtgtccgataggaatggcaagcataggcaattattatgatgataataaatattaccgtttatctgaatgtgcggcaatatatccatcttcatatgaaaggacaacacattgtttatatgatgatataaatgcaggtgaagaaaaagtatatattgttttatttaaggtgctagacaactatacagacaatgatggcagttatagtcagttgcttataaatccttgtcttgaattagaaataaatccagctactcaagggaaaaaagcaccattagtaatattggataatatatcaagagagtgaataggaattcctgattaattatagaaaggaacaaaactatgaggataggtgcattgttaaggatagaagtggaaagagcttttaaaagcaggatgttt

SEQ ID NO: 405 - DNA, 2087 bp, Unknown
  gut microbiota DNA sequence
gtagatgtttatatcataaacatcttgtcatctcgaaattctaaaaagaattttcaaggttgtctttctgttcagttatcaaagttcagttcttaaagaaccctgtattcatcagtgtttctttaagtttttgtcgctgccgtatcgcggcgacttgattataatatcaccacaccctacatatgtcaacaacttttttcaactttttttgatttttttgatttttttcgttttacaacggcataacatccatcagaagccgcataaatactgggtttgttagttctttttatttttgagatttttcacgattttttgtgcttttcgcatcattttacctatatttcatataaaaacgcctcataaaaacatctaaatttcattcaaaaaattttaaaagatggtgtcagtcagtacaaatcccagtacaatcttccaacaccatctttatatttatattatgaaacgtaacttattccggattctgccactcctgttttttacttattatgtccatcctgcgtgcatacaatgttccagcgattatgcagcacattattatcactgccataataagaagtccaagccacatattgtaaccacccggactatacattccacttctaagtgccatacaatatatagatataacaagcggattatcagaaaatgcccctacaacaagaaacgatacaactataatatatgcgattgtaggtgaaacgataagtcccacagcaatctggataatgccaaaggttatagtcattacaaggctcataaccatcatacttgccataagtcctgtcagattaggattatcaataataagctgcttatccatatgaagaagtgaatagcagacctctttcgttggtacaaacgaaaaactacccgtacatataccagctataacaataacagcatacaatactgcataacacatacatgaggttaaaacacaccatatacacttactaagccaccatttaatacggtttccagttcttataagtatatccttaccatacccatatagatcttttatgacataattgcctataatataagctataaatacgttaggaagtatatatacagatgatatgtcaacattatttttagcacccgtatcaaacttcttaacaccatcaaacatccacataaccatatcaccacatgtatatgtatctatatgcctgtttgccccgcacagcattataaattgtacaatacaggctatatatatcacacaaagcaacgcatatttcttccactgctgtattatcccctctcttatatcatactttatctgcaacataaacatatgcatatatttcacacctccacttaccaaagtatatttaaaccgctgttaatctctatcatacatcacgaccccagaaattctttcttcttaaatctaactaacacatttacaagagcaaacactataatagcagccagcaacggatatataatattagtacttatacttagccccttcttataagtttcacctgatatatagtattttgcaaatataagactcttatgcttatctgtcttatcaactgttattaatgctatcgatgccagatatcctgcccattccttgtttgtaccccaccatactccgagcataacaataccagtgacaagaaatgtttcaaaggtttccactatgtatgatataagaagtaatacaaatgaaggctgttcctcacatatcctgccactccatgccacacagcggctgtttaactcattccagttataaaacctatccgtgaacaccagtcctgctattgttgtcaatacgaatacatataatgtaaaaaatactgttaaaataagcaaatcaacaacgcttcttttccatacattactcacactgccttcgcggataacctgcattggtctttgattatacctttctacaaataatatatagaaaagtacaaatggcacacagaatgttgacacaacatgcagtacccctaccagatataaatcatacatacatggcacagctccaccagatataagattaccctttaagctaatcaacgcagcgattgtcataa

SEQ ID NO: 406 - DNA, 8127 bp, Unknown
  gut microbiota DNA sequence
gttcttgataaatttattgaagtaagtaacagatagttagaaatggagtaaatgtagattaagatgaaagagttaagtaatagatcagctgactttacagattcagttataagaagaatgacaagggttgccaataaatatggggcagttaatctgtcgcagggctttcctgactttgacccaccagaggaaataacagacaggctggcagaagtagctaaagagggaccacatcagtatgcacttacctggggtgctaagaatttccgtgatgccatagctgataaatacgaacatttttcgggattaaaggttgatcctgaatcagagatagtcgttacatgtggaagtacagaggctatgatggcaactatgctcagtattactaatccgggtgataaggttgttatattctcaccattttatgaaaattatggcgcagatactatactttcaggggcagagccggtgtatgttccacttgttccacctgaatttacatttgatgctgcaaagcttgaggaagcatttgcaagtggagccaaagcacttatattatgcaatccgtctaatccctgcggaaaagtatttaccatggaagagatgcagacaatagctgaacttgcaaagaagtatgatgcttatgttgtaacagatgaagtgtatgaacacataatatatgcacctaataaacatgtttatatgcaggcacttgacggcatgagagaaagaactattgtatgtaattctttgtcgaaaacatattctataacaggctggagactgggttatgttatagctaatccgcagattatagacagagtaaagaaagtccacgatttccttacagttggggcagcagcaccacttatggaggcggctgttacgggcttaaagtttgatgatgaatattatgacaagctggcagcacattatgcacatatgaaagaagtgtttgtaggcggacttaaggagcttggacttacatatacagatccacagggtgcttactatgttcttgttgatgtaagcgaattcggtgttaaggatgatgtgaaattctgtgaatggatggcacagtatgtaggtgttgcagcagttccgggctcaagctttttcagggaggatgtacatcatcttataagatttcattttgcgaaaaaggatgatacgcttaaggaggctataagaagacttgcgacacttagtaagaaggctttgagtgttggagaagctgagtggaaataagggaaaaataattaaaatattattaattttttaattgtaattacatataatatatatgaataagataacttgaacttattcattaacgagataattatagctatgtctccattaaccttcggggttaatctgtaaagagatgaacattaaagagtggggttgtcgcactaagaaattagtgcgatgcccctttttagaatgatttgtagaatatttctttatattaatcaagccttatactccgctataagcgcagtatcctccatcaacaggaagcactattccattaacgaatccggaagcatcatcacttgcaagaaatagtgccgcaccgataagctcttccggattgccgaatcttcccataggagtgccggcaattatctttttggctcttggtgttagtgaaccatctttgttgaataacaggtcgtggttttgtttagcagcatagaagcctggtgcaatagcattgcatcttattccgctttcacccatatgtgtggcaagccattgtgtcagattaagtattgcactcttggcgttgctgtatgtaacaacctttgttaaaggaagtatagatgatacagaggctatgtttatgatacttccgcttctttttttaaccatatcacgtgtgaatacctggataggaagaagagttcccataaagttaagctccataacctcacgaatctttgtttcatcaagattccagaatgaataatcatcatcttcaggctctttttttaacatttcaactgatgttatggcaccaggctggttaccaccagcaccattgataagtatatcgcagcttccaagttcagctttgattgcttcatatgttttagtaagctcttctttatcagtaacatcgctgcagtagccttttatggtaacagcaacattgtgttcttttaaagcattggatgtaagttcgttaacaaccttttccatattcgctttatttcttccaataattgctgttttggcaccgcttacggcgagcccataagccatggctgagcataaagttccactgcctccggttactattgctgtttttcctgttagattaacgttaaatggtattttcatataataatctgcctttcctacatatttatattttgttagttatcatcatcgttgaatccattcataagaaagtcgttccatttggcattgacttcctcaagttctttcttttgcataatcctgtttctgtcagcaagaatagataacatttcgtctgctatctcagcaacaggaggatgttcgtagtgataaagatatcctatcattctttgtgcagtaaagtctgtattaagatttcttgttatgatatcgcagaactcctctggataatctctttcaagcatcagcttatatagctgcatacttacttctgatcttggtttcataaataaaatcctttcgtttgccataggcaaaaaaccactacatttaggtcgtgggcagttgacataatagtagtcccctgacttttatactcttatcattatataaaaaaatattaaaatctcaatatgcatttccgataaaaagaaaataagattgataagatatttataaactgtaaattgaaaaaaaatacagaatatgatattatttaagcatatagattcgtgtttacaggtgatgaaagattgttaaaggatatgatttgtttatgaagctatgttcaatgataataaacgaaataaaagcagtatatcaatatgagaaaaaatcaagagtggatataggcacacttcagaatgtcatgctgatatttgttgttgtgatgctgcttattgatatacagaatttaaaacttggtgagtatgttattgctgctattacatttgtggtagcagtggtcagtatatttgcgattctggcattaggccattctgataagatataccggatatgcatggcagcagtgattgcttttcttatattggctgttccaatctcattatatggctcaaacaaaggattttcaatgatgtggtattttcttgtacctataatatctattattctttttggaatgccttttggaataccggtaagtgtcggttttggattatatgttacagtaatgttttatacaccattaaaagaactgcttatatatgattatcctaaatattatctcttttattatccattattttactggtcattttttgtgatagttgttgttatagatatattttataagcgttatcagatgaatcaggaggaaaatgaaaaagaactggaaaaggatgtagctatagctcttgaagacagaaagaagcttatgatagatgcagttacagccataagtcagatgcttgatgcaaaggatggttatactcagcagcactcaaagagggtggcagagtattcgttgatgatagctaagagcatgaataagttttccgataaagattataaaatcatataaaggagtgcgttactacacgatataggaaagatagcggttcctgatatgattcttaacaagccaggaagactgactgatgaagagtataatattatgagaaagcacactgtatggggtggtgagatattaaaagatcttgagtttctgccagatgcggataaaggtgcaatatatcatcacgagaggatagatggtaagggctatccttatggtattaaggcagatgagctcccagaactggtaagaataataagtgcagcggattcacttgatgccatgagttctaacagatgttacaggaaacagtgtgataagcagtatattatagatgaatttaaaaagggtgctggcagacagtttgataatgaagttgcacatatcgttataagtcttatagaaaagggtgagttgttgtcgggagtgtagagccattctgataaaaagcaaaagagggatattgtatgaatatgaagattagaaagtcagggaaagatgtcagttacagggaaatattcttatgtccatacgaggacaggctgcttgcactgtgtgtcaagcttgtattcggattcgtatggcttataaatatgttagtaggcatagtgcttgatgttggatatgagtatgatatacaggcagccttgatagttttaatcatggcggttaatattgcaatatcagttaagaattataatatatggattgactttgttacgtttgcaattatgagtatgcctgtttatagtttattgtttgaggctgatattgaggcctttagcataatgtatccggttcttttttcatgtgctacagtatttgtactcggaataaagtatagtcttcccattaatatagtatgtcttggttctattatatattgctgcaggtttaataatgctgatactatagatatttatgatgaaaatattgttttaaggttaccgtattttttcatatgcatgctgcttattatatattgtcttatgttttttatccagaagaactgggttgagaaaaagaatataaaacataagctggaaaacagaatatatgaagagaatataaggcttgagaatatatccatgaaggtcatgaataccatggttcatgcacttggtgccaagatatatggagaagaggaacatttaaagcaagttgcagaatatgccagagagatagcgttgcgtaaaggacttgaccagaaaatgtgtatgaatgcatataatgcaggtctgcttcatgagataggcatggctgctataccagatgagcttataaataagaataagctttcagatgaagaatatgatatattcaaaacatatgttgataaaggctacgaaatcgtaggcatgcttagaacatcaagtgcagaaagcatagcagaagcagtacattatcatagggaaaactatgatggaagtggatatccaagtgggttaaagaaaagtgagattccacttttagcaaggattatcatggttgcagattatactgacagacacttaagaagaggagagagcagtcagatagttatacgtaagttaaggacgttatcaggagataagtttgacccggcagatgcaaggattatggagaacatattaaatgaatcaaaccaatagcttgtgtctgcaggcagaagtaagaaaagtaatataaagaaaagtaaaaaagaaaagtaagaatggagaaaagaatagtatgtcagatattaagctgggctgccatgtaggtatggcaggtaaggaaatgtttttagcatccgcaaaggaagcagcttcatatggagcgaatgtttttatgttatacacaggagcaccacagaatacacgaagaaaagagatatcagaactgaatatagatgcagggtgggaatatgcacatgcacatggtatagacgagatagttgtacatgcaccatatattatcaacctggctaacacagttaagccagagacatatgagcttgcagtagaattccttgaaaaagagattatccggacagctgccatgagaagccatatacttgtgcttcatccaggaagccatgtgaatgcaggtgttctggaaggaacggcacagataataaaaggtcttaatacagtattgaaccagaatgatgatgatgtatatatagcacttgaaactatggcaggaaaaggcagtgagataggaagaactttcgatgaattaaaagcaatatacgatggtgttgaaaaagctgacaggctgcgggtatgttttgatacatgccatgtgaatgatgcaggctatgatatagtcaatcattatgacgaagtgtttgaagaattcgataaggttataggtcttgatcagattgcagtatttcatattaatgacagcatgaatccattgggggcacataaggaccgtcatgctaacatagataaaggtaatattggatatgggacactccatagattagtccatgatgaaagatttgttaatgtgcctaaaatacttgaaacaccatgggtaacagttgatggcagtgataagaaagttcctccttataaagaagaaatagcatggttattaaaataaaatcaaaaatataaataaaaaatgctatttttcataagacatccgggcaggattgtgctaaaatgcatgtgaataaaaagtaatgcagaaatggaggattacttatgaagctgatagcaattatagatgataactatggaatgatgtttaataacagaagacaaagtaaggattcagtacttatagacagaataatagagatttcaaaggaacataagctgtgggtatctatgtatacaaagtcattgtttccacataacgataatatagttcttagccagaactttggacaggctgataaagaagattattgttttattgaagatgataaggtatcagatgttcaggagcatattgatatgatatatctttataagtggaacagggagtatccatcagatactacatttcctgaaaagctgttaaatgagttcacactggaaagctctgatgagtttcagggaagttctcatgataagattacagaagaaatatacagaagaaagaaataaaaataataaaacagaattgtgtgcagggttatatgttaaatagaattaaaaaatggacgtggcatggatgtgctatactgtctgttgtactgatgctgatatgtgcaacaggacttacagcatgttttaagccagaagatacagtacagaattcagtaagcagcaatgaaacgataaaaaatgattcaggtgtgtctgattatgaagattttgccgcatcattagatacattgcctgaatactcaggcaatccgtacattgttgtaaatgataatacaccatttttcacagaagctgacaagacgacagcatcttttgaacaatatggagaacttgattcacttggaagatgtacaaccgcttatgctaatgtgggaaaagatcttatgccaacagaaaaaagaggtacaataggttcggtgaaacctactggatggcagacagccaagtatgataatgtggatggaaagtatctgtataacagatgtcatcttatcggatatcagttaacagcagagaatgccaacaaaaagaacctcataacaggaacaagatatcttaatgtaaatggtatgttgccttttgagaatatggttgcagattatattaaagagactaataaccatgttttatacagggttacgccggtatttataggagataatcttgttgccagcggcgttcttatggaagcagagtcagtagaagataatggtgaaggaatattatttaatgtttactgctataatgtacagccaggaatagtgatagactatgcaacaggcgacagccaccaatagaatataataaaagattaatgtaaggaccagattatttgttacgtaaagttacagataagctggtctttttatgtgttttttgttttgcagataaacaataaaaaagctgtgccgtgtgaccatcatgtgaccattcccattcataatagctaccgtagaatatattaaaggaaaggagttagtggatgaatgaaaaaccaggatggtttcatatcagtaagacatcaggtaataagcgcctggcgcgcagtatgttattaatattatgtgcagctataagtcttatattcacaggagcatttataacatatgcggttttaaaaacagttacacctacggcaacaaatgtgtttcagtcagataagaatataagaataaaactggatgaaccacagtgggaggatcatggcatgtcagaggcacttggatatgtgcctgggcagaagattgacaaggatccaacagttacattacaggctgatagtgttgattcttatgtggcattaaaggtgcagtattatggtgccaataacca

SEQ ID NO: 407 - DNA, 24977 bp, Unknown
  gut microbiota DNA sequence
cggatgataaaggcgaggtatatatatataaggatatcttaagccaggatgctgaatcaactgttaagaaagagaatgtgacagaaccattgtttacaagagtatatcttagcagagatatacagcaggatgaagttaaaaaaaagctgcccgaatttaatataaaaataacagcatatgctatccaggcagatggaaacacatatgatagtgcaaaaactgaaatgatgagttttataaacagcatagctgattattaaatatatgtggagggatcatatcaatgaataagatgaaaaaaatcacagcaacagcagcagccatggctatttctgcaggtcttgcagttggaggaacgcttgcttatcttaattctgtaacagaaactaagacaaatacatttacatcaggaaagaatataacaacgacacttacagagacagaatggacaactgattcaggaaagaactatacacctggtgatgttataagaaagaatcctgttatgaagaatgaatcagatcaggcagtatatatggcaattaaggttgattatactgatgcacagggcagtcttatgagtgcagaagcttttgaaaaatatgcatcagttactgactttgacttagatgactgggaaaagatagcagttaaccaggatggaagtgaaatgtgggtatataagagtgcagtagaagcaggttccgctacagaagcgttgtttaataatgttgaagtatacacaggaataacagaggaatggtcatcggctgctaagacgacgacagtatataagtgtgatgcagatggtaacaagcttgagattattgatgttgacagcgacgaatatgatccaacagttatttacaaggaccaggatggaaatatagtagatgcaggtacacttccatcatttaacatcaaggtgacaggttttgctgtccaggcatcaacatttgcagattatgaagaagcacagccagagcttgtaaagcttgttaacagcaggacggcagccggttcacagtttacagctgattaagatagagtaaatatataaatcaaatagtgaaataaaaaatgcaggagggtgtaaaagaatcagtatgtttaagaatagaaaaaaacttgtaataggtcttactgcttcagcgttatgcataacatcggtagttggtggaactttagcatattttacagataaggatatacgttctaacgtagtaacgctgggtcatgtaacaggaacacttacagaaacagatgaacataaaagagatgataacacaacaggtaaggattatagtaacgtaaagccgggtgatgtgttgtcaaaggatccgactgttaaccttaagtctgattcagaggatgcatatgtcagagtaagaatagactacaagggacttacggatgagcaggcagcagatattgaggaagctcttgatatccaaaaaggatgggtaaagtcagacgatggatattattattatcaaaatatactatctaacaagaatgatggagaaacatcatcaaaagtatttactaaagtaacaataccagctgaatggggtaatgaaatggccgataaaacatttaatattgatgcaagggcagaattcatacaggcagataattttacaccggtaaaggatgcttatggaaatatcacaggctggggtaatgcagatataaagtaagtgtcaaaatgttattttgtatacagcggtaagtggtaaatggaaaaaagctgttatataaaatatgtcataaacaaaacatgtcagtcatagaatagaaagtgtgtgaaaacggggcaaattacataatttgccccgtttatgtaaaacacctgttaaaaatgtgtgcttcgcacaaacttgagatgcgcaaagaagcagcgcaggaatggagagttattatgagaaaaaagctgttaatcactgcggcggcaataattctttcagcggattttatcgctggtgggactatggccatatatagggctgcagcacacaccgataaaacaatatcaacatcttcaataggggtgagtctgaatgttaatgaagacaatattgataggaattccaatgaaaatgcgataaatacagaaatggttaaccagcgcgtaatacagaaggtgtcagcaaaaaatacaggagacagaccgcagtatgtaagggtgaaggtgaaaaaagagtggcttgataataaagaagcagttacagaaagagaaggacagaagcttaataaggattatattggaataaattacgtaaataccaatgactggatatatgtaagtccgtctggtaatgatgatgaccctgatggttacctgtattataaaaaaatagtagctcctggggagagtacaagtgattttatggatgcatatacagtacttcttggagttaatggtaacactaatatatacagggatttgtctgccagggttacttatgatgccagtgctatacagacagttgctgcaaaagctgccatgttgtatgagtggggaatgcttgcagaaatagatgatgacggaatgatacaggatataaagtatcctgaatctggaaaagaatatgagattacagatgatataactaaggtaacaccaggtgctaaagctttggcagcagatgcatctgtaaagacatcagaaaaaaatgccacatcaataactcttgataacagtgcggtaaagtttggtgtagtcgaaaaagatgcagattttaaagatatggaaccaggagaatcaagagaaggaaagataagtttatataataattcagataaaaatatggatttttatataaatagtgagcttatcagtaatattgcagatgaaggcagtaaagctggtatatacaacataaaaatatataaaagtgttaaagataacgaatattctttgctatatgacggaatcataggtagtcaggatacaacagggaatacgaaaacagatagtgcgttaagtggaaatattcttataggggataagtatattgcaacactttcaggaggagagagtgcggatataagaatcgttgtgacacttgatggagaagctatggataattcttatatgaataaagaaggaaggatacgtgttaatgtgagtgcacagccaaacagtgatgcagctgtaaccaaaacaagtgtcatgacaggagataactctttacttatgttatatggagtgcttgcagttatagcaggaacagcggttttgggaacattagccggtctgtattgcagaagaaaagaaaagcataacactacaaaaaaagaattatagctggtgaagtatattgcaggagcagggaatagtatatgttacgtttctggatgatttttgtatgacatacaacgggataatacttgatgatagcagaataaaatcagataaaataacgaagctgttgtcttatataataagtcactggaatagtaatatatcagtcggggaattatcagatgcattatggaatgatgaggaaagcgataatcctgccaatgctttgaaaaatcttgtgtatagggcaagaagcatattaaagaagaattttggacagatcgaattcataaaaaccggacgtggatattatagctggaacagggatatatcagtaaatgcggatgcatgggagtttgaatgcatgtgtgaaaaagcaaaaacaataaagtcagtatcagaaaagacagattatcagaaaaaagccctgaaatattataagaaaagatttttagaaaaatatactgactgttactggattgttacacttaacgcttattatcataccatgtatataaatgaggttgtgaaactgtcagagacattgtatgcatgtaatgattataaaaatatggaaatagtgtgcagtcgggcacttatgacagatgatttgtcagaggatgtgcattattactatatgagggctcttataagccagaatagacaggctgaggcagaaaaacattttaagcagcttgaacagttatttaaagaacgtctgtgtgtgaagccatctgaaaaaatatgtaaccttaacaaagaaattactttaaatcacgataatataattcatagatattcacgcggtgcggtagtatgtgattatgaagagttcatgaaaaactgtgaaatagaaaaacgccgtatacgtagaaataacagcagtgcatatacagtagtttttaataaaagctctgaaacatttttatatacacttaaacattcgttaagggagagtgatatagtcgctgcctgtgataaaacacattatattattctgctttcagactgcagtatagataatgtaagagatattgtaaaacgtatattagataactgcagtaaaaaacaacagaaagatattccagagtataagcttaagaagcttatctgcgatgtggaaaaataaaaatattaatctggaaggagagaatatgtcaggtaagattaagaagaaactgccagttatactggtatgtataagtatgtttgtagtgttttctggtattatccttacacttatgtgtacaacagggttaacagaaataccagctttatataacgtaagaaaggaagaaacagctaataaagaaaacaaagcagttggtgataatggtgaggcattagtcagtgccagtgctactgaggggaatgatgtggctgatgaagatggtgaaaaggataacgatattcttgcaggatattgtacattttatgattatgttgttgctccatataggggagcaaaatataaaccgggatttaaggagcttgccagtctgagtataaatacatcttctaactatgcaaatgatggcagggataagctgactgtaggaacaaaaaaccagaattacagaaaaaacagatattcatgcaatgtaaatggactggatgttaatacatgcatatattataacgatggaaagtataaaactactggaacttttgatgggacaaaaaaagagtactacaatgcctcacaaggcatcataaaggggcttgataaagaggattaccgaagggtcatattcaatgttgatgaaccgggactattttctgatgaggcaaaaacaggaaagacagttataaaagattataagttgatttttaaaaaggatgataatggaaacagaagctcaacatatacattagactacgtattatctccaaagggtaataaaacacaagcgagggatagtttttttcctttaaatgattcatcctcgcatgttcctgactgcggttataacagtgcggatggaaataaaggaaccaactattatttcggtatgcgttatgatgttgagtttgcattaaatggttatgatgatgatcttgtgtataagttcacaggtgatgatgatttgtgggtgtttcttgatggagagcttgttttagatcttggaggtatccatagtgaatgtggcggtgatgtagacctatggcagacaggtccgctggcagatgagcttgtaaaagcaggaaatgataaatcagaggttgaccagcacaaaaaacatattattactgttttgtatatggaaagaggtggcaatctttcaaactgcaatatgaagtttacagtgccggacacagcaagaataatcaccatagatgattatgatgtgaataagacagtaaaccttaacgactgggaggacaggacatatgatatttcacttacagcatcgttaaaggatacagatggtgttattcttaaagatataactaatgttgcagtaagggattatatagataacagatttaacatcatagatgatgaaggaaatatagtgataactgatgctgaatatgcaaagaatcacagtggctatgtgtgtatttcacaggcaggtgcgaatacagcatcaggtggaaatataggctatgatgaagaaaagaatatggtatatgtagaatggactgaccagacagtaacaagtcttagtaacaaagctgatatatcatcaggcagcagtgcggcggacgatgaaaaatatggctggaaaaaagttatcaaggttaaggcagacccacattatgcaggtggcaataatgtaacgacaaatggtggggaatctggagtgataattgatggtaaattcaaggaatttccaaagccggcagttaatgtacggacacttccgcttattaaaaatacagaggatgtaatattttatggtgacagcttagaagaatacagcgctaaatcagaaatactaaataaaatccttgaaacaaacggctgtacaataagtgaagatggaacaaagctttcaagtgaggatttcactgtattatggtataaggatgataagcctgtatatgaatctgaattagctgatatagctcctgatgatgatacatcttacaaaataaaggttaaatatggtgtgagcagggttgatgaaaatgacagctgcacaaaaaatacaaagggctatatagctgatgaaacactttataacaaagaaaaagatataaacaatgacagctatgatcatgctttgtatacaattcatgttgttaaaggccagctggatataacaaaatgtatagacagccaatatacagataacagaataataagagctaaccagacatatgtatttaaaatagaacagtttggatataaggaagatgtaaaggacggattaatagcagtgtattatcaacctgtatcctttgatgctaatggagatgtagtacagaaaacagcagttataagcgggctgaaaaagggcttttatacggtgtctgaggatacggactggacattggagtataagctttcagaaaaatctgataattatagtaaaaatgataattcaggttctgaagaagcgagtgatatatttatcggtgagacaataataaaagcagattatgctaatgatatcagaccacaattctatggtttggatagtgtacgttatggattgtgggcagatggagaaccggcacagacagtatttaccaataaaaaagattctggatggaagtggcttagcgatgcagccttggcagtcaacagatttatgggaaagaatgaaaaacagcagtaatatatagatggataatggtagtaaggatattaagatggatattaggatgaatattaagatggatagtaatatgtatggtaatgtagatagtaatataaatagtaatgtggatagtgaaaataacagatggcttagaaaattcttacgggtattggctgatgttatgtttatattgttagcaggaatagtgcttattacgtatcttccgggagttattggctttaaaagttacagggttttatcagccagtatggagcctgaatatcacgtcggtagtcttgtgtatgtaaaacaggttgatgtggattctattaataccggagatgtcataacattccacattagtgaaagtaatcttgttacacacagagttgttgaaaaagacagcattcgtggaggatttataactaaaggcgatgctaacgaggtaaatgatggtggtcttgtaacatatgatagtgttgttggtaaagtgatgtttgatattccgctgcttgggtatgtatcatcatttatgagttcgttatatggaaaatgtgttgttataggggtgcttattgtgatgatggctctggaaatactatataacagaatggaaaagatgaattgcaaaaaggtgctgcagtatagaaaggggaatatggtgtgaaaaggattagtatagtaaaaaaaataacagcatcagctggacttcttgctgctgttgtgtttctagtcacaggagtaacctatgcttcgttaaaaaccaggactaaagctgttgataatgtctttaagggagcatgtgtcaacataggaattgttgaaaaaaataaaaataaggaaatgatattagaagattcagggacaggtaaagatgggacatataatgaaagcatggaaaataattctaacgtgtatgagcgtataagtgaaaatatgagaacggcggctaaagaggtcgctgtaaagaatataacctcgcaggattatccgactacagatacagttgtgagagttaggtttgttccggtgcttgtatatgatgataacgagcagaataagaaagataatatagctggccagacagtaccacttgatatgagaggaaaggttgattatatattagcagatggagttgtggctgaggcatcatcacaggaagctgaggcaaaatggatatataaagattctttatcaggagatattaatgacagatattattattatatatcagccttagaaccaggagaggtatcagaaatgctgttaaaagaggtaacgtataatggagaacttccacaaaatacacattttgagctaagagtgttagcagaaggcatagcaaaagctcagcttccttatcttgtataacagagtaaagattttgttagttgaattttgtataaatatatgttagtttaaccttgtataaatatacttgtaattataaatgatttgatttacaattatttatgataaaaagtttattgctatgaaggcagtcattacataagaggaggatatatgaatgactattgaaaaaagaaagtcaaaaagaaccgatataagtgtgcagatatcaataagacagcttggggataactttgtatcagggttttctccagaatctgttgaagttcatgtgatagatatttcgcaggatggcattgcatttaagtctgagcatgaatttaagctgaattcatattatgatacaatcataactctggctaataaagaatcgatagctactgtcatagagatagtaaggaaaggaaacgaacaggacaaatatatcacctatggctgtaggtttgtaggtgtaagtccagaggacagattcaaaataaatgtatatcagatagttgatgaagcagaaaagaatcaataaaatcacggatatcgtatgttaagcataagctgatgctgatgtttaacatacgatatccgtttttatatatctgttattgtttcttttttgtggatgttgaagtcttagcagaagaactgtttttagatgaaccattaggatatggatcaagtgtttctgtagaagattcatgttcgtttacatattcttctacgtcaaatacgtctcctgcaagaaccttgtttatcatggctgatgcatttttaatatcatcggcataaggaagaactatggatgcgttgtatgcaccaacaacctcaagatgtctgtattcatctgtatcaccgtttattccgtaagattgtatgttccatggagtgttatttcccagctgcattttgacaagatctgttatggccttgttaggaatgttggtaaggaaaaggtcacttacagcatccataacggcagaatattttgtaagtattgctggtgatgtagccttttgtataattcctttgataacagccatctggttacggcctcgctggaagtcaccagcaaggaaggcatatcgttctcttgcaaatgctatagtcatatcgccatcacattcattctcacctttgacaaagtggtatgcaacaggagcggcatcccgtccgttagtgaattctacttcggaatcaatagttattccccctagtgcatcaacgatagatttacttccaaggaagttaatctttacataatagtcaatatctattccatatagcttctcaagtgcttccatagaccggtgtacaccataattgcccgcatgtgtcagcttatcatatccggtaacacccttgttgttggatatctgtatataagaatcccttggagtagtaacgagtaatacctgcttgctttcagggttgatcactgcaagtatgttaacatcactaagtgcgttgtctaaaagcttggtatcagcaccatcatcacttgatatacctgatacatatatgataaaagggtcctttttaacgttgatattggcggtatcaagttcaacctctttttcgtaacggtatgttttaataatcttaatgtccttttcaaagttttcataatcctgtgaaatcatgttgatcatcgaatgattaataactatagcctggaccttttttccagcataaaaagcatctataagctcattccatgtgttgtattgtgtaatgtctaaggtgtgtccggtttctgacttgatgctgtctatggcagctggtacattctcacttgctgcaactgagttataagcatacttatagttcacagtatctgacagactggcggctttgtcgcttgcaagcacacatacatcgacaatatcaacagtggtatcagcgttgccaaacttagataataccgaatcaaactttgatgtgaagaggtatgaaaaaagtatcagaactgaaagcaatattgatataagtttaccaagaatgtgagatcttgaaaactgtgatgtcaaatcatataaaaagacaagtatgagaataatattcagtacaataagatattttgcaggaagcatgtcaagcttaaatattgtaatctggaagagcactgtaaggacaagctgtactaaagctagcagaagtccggcagcaagagcccagccacgcttcttttttttccgttcagcctttgaaaggcttacagttggtttaaacagatattttaaatcacttctggatggtgatggtttagccataataaaaccccatttctttataatatatttattgctgttaaaaaaatccaatatattttatcatatttacataataaaataaagaaagtataagaaaaaaatggcaaaagaaaaatcaagacacaacttttaagttagcaggctatatgttattataataatgatgtcagcgttaaaagactaaaatgagattacgtaacaaaggagtaaacaaatgaacgaaaacaatcagactattgttcgtgatgcacgaaagttaggtattcctaagatgcttatacttggtatacagcatatgtttgcaatgtttggtgcaactattcttgtgcctatccttgtagcaggctactttcagacagcatgtaacgaaccattaacaaggggactcactgtctctgtcacactgttttgtgcaggggtaggaacacttatattccatgtgtgttcaaagtttaaggtgccagcatttcttggctcatcttttgcatttttaggtggcttctatacagtagctaacttaaacagtggaatgtatgcagatatgggtgtcaatgaaaaggcagcatatgcatgtggaggcgtagtcgttgcaggtgtgttgtatcttgtggcagcacttatattcaagcttgtaggtgttaacagggttatgagattccttccaccggtagtaacaggtccaatcatcatatgtataggactttcacttgcctcatcagccatatcaaacgcatcaactaactggcttcttgccatagttgcactggcagttattatcgtgtttaacatatggggaaaaggcatgtttaagattatacctattcttatgggtgtagtaatatcttacgtatttgcacttatactcaatgcattcggagttactaatccggatggctcagctatacttaactttgcctctatatcgtcttcaagctggattggtattccacagttccagttatgcaagtttgatataacatccatacttgttatggcacctatagctatagcaactatgatggaacatgtcggggatatgtcagctatatcagcaactgtagagcaaaactttattgccgatccaggacttcaccgtacacttatgggtgacggacttgctactgcatttgcaggtttattaggtggacctgctaatacaacatatggagaaaacacaggtgtacttgaactttcaaaggtatacgatccaagagttataagaatagcggcagggcttgcaattatactgtctttcatacctaagttttcagcagttatatcaactatgccggcagctattataggtggtgtttcatttatgctttatggtatgatatcagctatcggtgtaagaaatgttgtagagaacaaggtagaccttacaaagtcgcgtaaccttataatagcgggtgttatattcgtatgcggacttggtttctctaatggtcttacattcacaatagcaggaacacatatcacacttacagcacttgctatagctgcaatagctggtatagttcttaacgcagtattaccaggcaatgattataactttggtgttaatccggagggtgaccagagccgtggggtatatgtaagcaatacagatgataagtaatattgatgatgattaatatatattattaataaaacagaaaatacgaaatattataaaaataacatttaaaagaatggagattactatgaattttaaagaggaaaaaaatattacaatatttgagcatccattaatcaagcataagatatcacttcttcgtgataagaatacaggtactaatgagttcagaaagttagtagaagaaatagctatgcttgagggttttgaagccatgggcgatcttgtactttgtgatgtagaggttgaaacacctattgaaaagtgtatgacacctatgatagcaggaagaaagcttgctgttgtgccaatattaagggcaggacttggcatggtttcaggtatacttgctcttgttccaacagcaaaggttggacatataggcatgtacagggatgaagaaacacttgagccacatgaatattactgtaagcttcctaagccaatcgaagaaagacttataatcgtaacagatcctatgcttgcaacaggaggttcagccatagatgctatcaaccagataaagaagcatggtggtaagaagattaagtttatgtgtattctggctgctgaggaaggacttgaaagacttcataaggctcacccagatgtacagatatatgtaggacagcttgataagaagcttaacgaaaatggatatatctgtcctggactaggtgatgcaggagacagaatattcggaactaagtagattatctgaccttttgtcaactacccatgacctaaaggtcatgggtttgtaacctcctatcttgtcaatgtgcaaaagggagcctatggcaaacgaaaggactttatttatgaatatgtctataagaacatttggaaagacaatgcaaggtgaagagataactatgtatatgcttgaaacagaagcaataaagcttggcataatagattatggtacaacacttgtaagtctgtgcgttaaagataaagctggggagtggcgtgatattgttcttggatatgatagtgtatatggatatgagaatgattccgacaataatatgggatgtaatatcggaagatgtgttaacagaatagccaaaggacattttatcatcaacgacaaagagtatcagcttgaatgtaatgatggtgagaatacaatacatagtggtttttctgcatactgccgcagaaagtggaagtatgcagattcagatgatgacagtgtgacatttgtgcttaacagcagggatggtgaccagggatttccgggtaatcttatagtgtatattacatacaggtttctgtctgataatgagtttgagattgaatatgaaggtgttccggataaagataccattattaatatgactaaccacagctactttaacttaaatggtgagggtagtgggaaaatatatgatcataagctttttatatatgcagacagatttacaccggctggcacagatgccataccgacgggaaagatatgtgatgtagcagacacacctatggatttcagacatggaaagaccataggaaaggatataggtgcagattatgaccagttaaacaacgcaaatggttatgatcataactggataactgaagagtcgggcagccttcatagaatcgtagacgttacgggtgatatatcaggcatacagatgagtattgagacagattatccaggcatgcagatgtatacaggtaattttataagcaataagaaaagaaatgttgcaggaaagaatggacacatatattcagagcgtgatggtgtatgctttgagccgcagtattatccggacgctatcaatcacagcaacttcgtaagtccagtgtgcagggcaggggagaagtttgataaaaggataagatatatattcagctaaaggtgttcacctgttaaaaaatgtgttattatatgatgaagcagtggttttggttataaatcgctgcttttgcatgcgtatatgcatatagataagagttttatgaaagtattaacagtaccataataaaaaaagacaggagtatacattatgccagtatttgattttaagaatgcatctaattcatcaacatttgaatgtacatacacaacatttaattcagataataataaagcaactaaagaacatcctatattagttcttgataatgaacaacgtaagtgggagaacaactcagtaggaatgtttgccaacccttataaaaaaacagcatttgaattccagatggaggatgcgaatatattaagcaatatactcagggtcgatgcacgttttacggcacttatcaaatggcttggtgagaaccgtataaaggttaaacttacaggtgagaatacagaagaaggatatgcagtataccgtattcaggaaatagcattcaacaacagccagaagctctcatcagaggatggttttcttcagtatatgatagaaagactgcttgaaagcagtatagtagctgaaaatactgatgaggattttgatgagtcgggtgacagcatgaagcttacaagcataacaagtatctcagattttcttaactgtgctggtatgacacttcctgaaaacataaggctgtgggcaagacgtaatcttgcagtggcacgctcaagtgaggtgacaccagaggaaaagaggcatgcccagagagcactttctatcatgcttaacattaagtggaagagcaactactttgaatcaatagatcctgttgaggcaagaagaatcctggatgaggagctttttggaatggagtcggtcaagcagcgtattatagaaacagttatacagattaaccgtacacatacacttccttcatatggaatacttcttgtaggaccagctggtacaggaaagtcacagatagcatatcttgttgcaaagattcttaagatgccatggacaacacttgatatgagttctattaatgatgcagaacagctcacaggttcatcaagaatctattcaaacgcaaagcctggtattatcatggaagcatatagcaacgctggtgaatccaatcttgtatttattatcaatgagcttgataaggcaacctcaagtaatggcaatgcgaatccagcggatgtactgcttacactgcttgataatcttggttttactgataactatatggaatgtctgattcctacatcaggtgtatatcctatagcaacagccaactataaggaacagataagtgcacctttactttcaaggttcgcaataatagatattccggattatacaagagaggaaaagaagactatatttaacagattctcacttcctaaggtccttaaaaagataggtcttttaaaggatgaatgtatgataacagaagagggacttgatgcagtacttgatatattcaaagatacaacaggtatccgtgaccttgagcaggccgcagaacatcttgcagcacatgcactttatctgattgaagtagaacatgtaaaaagcgttacatatgatgcggatatggtaagagaattgtttgcgtaaaggaagataaatatgttagggttcagaaatgttgaagacaatacatacaatgatataagagaaaagtcccttatgcagtggcttgatgatatggaaaagcatgaggacgttgctgtaagaggtggcgtaaagcttgcaaaagagtatttttgttatcttaaggaagaaaataaaaggcttaaggttgaaagcagtcttaagagcgagtatcttaagaaagtggcagaaaagaaaaataatgaaaaaaatatataataataagcattataaaaacaatattttcagactgatatgcagcatttttcttatcatactgacagctgcggtcatgactggcatgacgggctgtggtaacaataaaaatgttgcttcaggcagtaatacagctatgatacataacagtcagccagcagataacaacactaaagctgaaacacagtccgcatctgaaacaaaagcagatatggatacacaggctttgcaggaaacagatacaaacagcacagaagaagccaaagcatcggatgattcagaatatactactgatgagcaggtatctgatgatagtgataataaagaccggagtgacagcgaagataataatgagtggaatgatctggatgaaggagctaatgaggattcggatgaagctgcaggtgatacagtggacaacaggataacgatatgcatagatccaggtcatggaggcagtaacgaaggaactaaggaaaactatgatggcactcttattaaagaaaaaaatataactatgaccatagcacgcaaactaaaatactatcttgaacagaatgataatataagagtagtgatgacacgtaactctgacacagcagtaagtttagcaggccgtatagaatatgcagcagctaataatgcagattatgtaatatcaatgcatattaacagtaaaagtactgatgagcttgatgcacatggctgcatggttcttatgagctgcagcagatatcagccggcgaatgcaagatttacaagcatatatgacagagagagaagtcttgcatattctatacttgcaaagcttaatgggataggtattccaatagctaacgacagctggaatggtaatgaatataaggatggcatactgcagaggcttaatacagtaaatgaattgtatccggatggttctatggctgattattatggacttatcaatgaaggaacgtgtgcgggaattccaactattatagttgaacatgcttttttaagtaatgtgaatgattatagaaattatcttagtacggatgcacagcttgatgctcttgcaagagcagatgcggcaggcatacttgaagtagtattacaataaaataaagaaggataaaagacgatgtcagataaatcaatagaaacaataaatgacagatattatacaggcgaacgtccattattcaataaaagtaaccttcaaatcaataacacaatatttggagaaggtgagtcgcctttgaaagaatcagacaatattgaattgaaaaacagcagcttccagtggaaatatcctttatggtatgcaaaggatatagttgcagataactgcacatgggctgaaatggcaagagcgggtgtatggtatacagacaatcttcttgtcagggatacgcttatagaagcacctaagaatttcagaaggtgcaggaatcttacattgtcaaatgtatttatgccaaatgcagctgaaactttgtggaactgtgatggagttactatggaaaaggtaagtgcaaaaggtgattattttgccttgaacagtaagaatatgaaaataatagattttcagcttgctggcaattacccgtttgatggttctgagaatgtagagatacacaatgccaagatgttatctaaggatgcattctggaatactaataatgtgacggtatatgattcttatatatcaggagagtatcttggctggaattcaaagaatcttacatttattaactgtacaatagaaagtcttcagggaatgtgttatatagataaccttattatgaaaaattgcacacttataaacacaacacttgcatttgaatattccaatgtcaatgtggaaataaatggaaaaatagacagtgtgtttaacccatcagctggtgttataaaggctgagaagataggtgagcttattatggataaggataagattgacccagaaaaaactaatataatatgtcctgttattaatacaggtgatgagcattaagctaaaaaatagaaccggcaatattaatacatcaaaattcatgaatgtatcaatatgccggttttaatgtttaacagactgggaatcttagctggctgcagcaggcagatatctaagacatcaacgcttcaaattcatcaataggtacagggcgggaataataatatccctgatgccaggtggctccaaaatgtctgatataattatcaacattggcatcttctataccttctatacagatttctgtattagttctttttgcatagtcaattatagactgcaccatagcctgattctgtggcttattctttatatcctttatgaaactcatatcaaccttaagctcatcgaaaggaagctccaaggcaagacttaatgaactgtttccagtgccaaagtcgtcaagagctattttaataccatgtgagcggaagaaattgacttcatttttcaggaagttaacatcaaggtcacggcatctttctgttaattccaggcatagctcctctggtgtagagttggtttcttttatgatagacagcacagaatccctgaactcttttctttcaagctgggcagcagctatattgacattaacaaagaagtcatgatgattcctgcggagtctttttatatcagagagggcagttcttataatccagtttccaaggtcaaatatacaaggatcctgttcaagccactccatgaatataccaggagaaacaacaccatatggctcaagctcccatcttataagagcttccatgccttttataatacctgttttagtatcggctataggctgatagaaaagtctgaagcctttaaaatcagttgtggcacttttatgtataacactgatgagattaaactgatattcactgttaccgcttatttcatcattgaatattacaagttcaccatgatgagccgattttgaatggttgatagcatatgtaagacggcttcttatagcgttaatctcgttcatgtgaggctcaatatatacagcaccggcgcatatcttaagaggaaccttcatattctctacaacaatatgattagataattcataggcgatatcatcatatacgtgatgaagctcatcctttgacatatctttaaagcttatgataaagttagcaccggatgaacgatatatatttccagcatttttaacagtactgataagagtctgtgcaacgctgttaagtatcttatctgaaaatgtaacaccatacataacattaatgtggctgaactggttaataccaatcttaagaagaactgtctttttaccagtataagaagtgatatcagtaatatgctgattaaggagagagtcgttgttaagccctgttacagagtcaacatcatctgatataccgtagttatcatatcgtattacaatatacaaaggtttattttcattatcgtatattaatcttgccttggcactgaaacgatgatatttttcaccgtccttgatacggtattcccatggctcatcaaggttttttcctgcaagacgttccatgaatccatttttgaaagcatctacatcatcaggatggatagaacggattcctttttcttttccttttatagtataattctcttttagatgaaagtaatccacagcccgaccggaccaccatgttatatctgttctcaggttagtgatagagatataagacttttttgagagtgaggttatggcctttataatatctggaaaagaagaatccatatccttccagaataaatctgcagtattcattagatattctccaatctttaaatgccccataaaaaatattgcactagggttacgatatattgctaaaatagttattgttttatgtcacgtattaaaaacatatatattataacacagaatatttataaaacaataatttcatctctgctaagttccataataaatctcatttctgtacaaaaatcttttttatattaaccaattttatatattggttgtaacagcagttttttcaacaggtaacatttttttataattcatgataaaagtgttaaagccagtaacatcatcaggaacaggttcaacagtgcttatatcagaactgttaaaaatgtagtgatcaagataatcagccaaagataaagcattcttatactcagctaaagataaatcgtcctttttctggcggtcagtataatttttaatgtaactactgtatgctgcaagtattgctattccccatgcgccaccttccccagcattggacataacagatacaggtgtatctatggctgctgcaagcatacgctggcctataaccggagtcttaaaaagaccgccatgtcccataatcctgttaagctttatatgttcatcattaagaagaatatccatacctgccttaagaggtgcaagggcagagtatatgttggtacgcataaagttggcgagtgtaaagtggctgtcggcgtgatgtataaacataggacagccatggttaagaccgataacaggttcaccagaatagcagttatatgacataagactgccacagtcagcctctcccattccagcctgggtaaacataaatgtatacaaatcattatcatttatctgtagtccaatacctttggcaaattccctgaaaatattgatccatgcattgatatcagaagtgcagttgttgcagtgaaccatggcaacaggggaaccatcaggagttgtgaccatatctatttccctatgcagtgatttaagtgaatgctttaaaacgaccatggagaatatagaggtacccgctgatacattgcctgtttcctgccttatactgttagttgctgtcataccagtaccagcatctccctcgggtgggcataatatacatccgggctgtaacataccagtaggatcaagcagcaaagctccttcttttgtaagtactccagcatcatctccagcaacaagtatattaggaagaagcgttcttatgtcgggaagagctgccgtattcggtaaattgttgaatatgtttatcatacgttcatcatattcatgagtgtctgaatcaactggaaacataccagatgcatcacctataccaagaacattttttccagtaagtctgtagtgtatgaaaccggcaagggttgtgatataggaaatattattaatatgttcttcatggtttaacacagcctgataaaggtgcgctatactccagcgctcaggtatgttgaaatcaaaagcttcagtaagtatatcagcagcctctttagttatagtgttgcgccatgtcctgaaaggaacaagcaggttatcgttagagtcaaatgcgagatatccatgcatcatggcacttacgccaagggctgttatgtgtgtaaggtttgtattatatgtgtctgatatattatcagcaagactacggtagcagcattgaagaccagttatgatatcatccatatggtaagtccagatattattttcaagcctgttttcccatgtatggcttccctgtgcgacaggcgtaccatcagaaagaataagaacggctttgattcttgttgagccgaattctatacctaaaaatgtatcaccattagtaatcttttctataatattatctttgtttgaattcacgtcagagcagacctcctttttgttttatatcaatattttatcatacttttataaaatactttagtaaaaagtatatggctttttattagaaagattaaagtcagctgacagcttatggttaattatatgaattcaaaaccgataatatatatatgaacatatagatatgccggaacggattctggcagtgttatgatacattcaaggaggagttagtgtgaaaaataagatttttcacacgcaagatttgtgcttcgcacaaacttgagatgcgcaaagaaacagcgcaagaatggagattgttatgaataatatatcaggtggaagttatgcttcgtatgttgcaggttatgcctatacagcttctggtttgaataaaacagaaaaaaaagaaactgcgaatcagaacacagcaaatgcagtgaaaaatgatacatctgcatacggagtatcaggtaaaaaagaagtatcaggtaaaagagaagtttctggtcagacaataggaaatcctaagttaagtgaaaaagcatctaaatattacgatgaacttaagaaaaagtactctaatatgaacttcatacttgtaagtgaggatatgaaggaacaggcaaaggccaatgccgcaggttatgctaatgcgaataagatggtagttcttatagatgaagataagatagaacgtatggcagaggatgagaactacagaaagcagtatgaagccataatagctaatgcagcaagtggaatgtcacagctgggaagcagtatagctgcaacaggtgcgagtgttaaaggatatggcatgcaggttaacgataacggaactgcaacatattttgcagtgcttgaaaaatcaagtgcagcacaaaaggaaagaatagaaaaaaaggcagcaaagaaaaaggctgaagaaaaagccaaggataagaaagcacagaaagaagccgaaaaggaaagaataaagaaaagccatgacaaggcagaaaagataagtgataaagaggttgatacggttgataaagaggatgcagatggaaaaataaacagtgcctcagatacagtgataataaccgcatcttcgatagaagaactgcttagtaagatacagaatgagtcgcagaaatatcttagcgataacatattatctgaaaaagagaaaaacgtaggacagggctttgattattcattataggcatatagctgttttattttatattagaggtttgcatgaattatgtagcacaacgtagcaatcaatatacataagtcaagggtaaaacactttttgatacgatatatttaatatacttataagatgataagatggttagaaggttcataaaatgatttacaggtgatttaacaagagggtgtatacatatgaaaataagagatgcacaggaaatgtatcgtgctcagataagggattataatagtgaaatgtctgctgtttccaagaggagaaaagagatacagaacgcgcttaagaatgcaagtggagcagataaagaagcgctcgataaagaagcagcgactatagagcttacatataaggcactgcaggataagcagaatgaatattatgattatgtgaatgatctgacagaacagtggtgtatgtgggctaatgctgaatcagccaaacagcagggtgaggccatgaaagactattacagggatatggctaaagtcatggaagttgcaagacgtcttatgaaaggtgatatagttccatcaacagatgaaaaaaaacttatggaatataacgacaagctgtatcagatggctaagaatatgggtgagatggctaaagtggaaaaaagaaagaagcataagtcactgtgggaagatgaggaagaaaagcagtacgaagatcccgacgaggttggagctaatgcaacagcacaaggcacggcaccacagataaagagtgcaggtgagataatgagcagcacaggatacaatagtgatatggatagtgaaaattaagctatctgaaatgagatgtgtaaaatgagatatctgaaataacatatctggaataaaatatgtaaaatgagatatctgatataaaatatatgaaataatgaggtgattgtatgccgctttgtattaatattaatgtgaataactcggacatgagtataaagaatgagagaattggtacaaagaagtatgttaaagctataaatgtcaggaatctgaaccatatgactgacagacagcagatgatggatgagaagagagcaagtgccagaaaacaagctataaagcttatatctgatgcgtggaagagtgataataaagctacagataatattaatgtcatggataaagctaaagagacaatcgcaataagaaataatgagttgatgtcaaagcttaaggatataaaagacagccaggaagcactaagagagcagtatggtgttgataaagattcagaggaacaaaatgaccttgagcttttaataaagtatcaggataataaaactggaatattcagtgataagttctctaaagaagaaatagaaagattaaaagagctccagagccagccacttacagaatatcagaagaaatctcttatgattaatgcaggtaaggattccgtatataatgagcttgacagaaatgaaacaaaagcaatgagccttacaatgtctattaatgatgctaaaacagagcagcttaagtcacaggatatgctcaaggcgcaggatgctgctgacagcatattggaagctgctgaaaaagatatatatggaagtcttattaacgaaggtaaaagcaatatagatgataagcagcaagaggataaagaaaaggcagaggaagcacaagagaagaaggaagaacgagaagaacagaccgataagattaaagaaaaacgtaaggaagagcaggctattattgagggtgaaacagaggctgagaagcttaagcagagtatatcagttacagatgagaaaactaataacatggaagaagcccagagtaaggttaatcagattatgaagaagaataatctgattaatgaggatattaaggggattgagattgatcttaatttttaagggaatggttgtttacttgaatattagttggtgacgaacggacgacaaatataagctacaggcagtcctgcacactatgttcaatgccagaagcttcaatcggctgtctctaagacttttcatataggtagttataggtgacgctaccattcggacgcgccgtccgt

SEQ ID NO: 408 - DNA, 10264 bp, Unknown
  gut microbiota DNA sequence
agaagtgcattgcacttctcgataataaaaaaggatatcctgatggatatccttttttattagcaagagcgcgagacggggatcgaacccgcgaccccctccttggcaaggaggtgctccaccactgagccactcgcgcaaacaagatatataatatatgaaaaaatatgaattgtcaatatctttttagcagaatattttaaaaatcgttaaatataaaagaaatatattatatttatttgactttcaaactattttaagttaaaatcttctaggatattaagtgacataataatatgtcattcatcaaaacaataaggagtagataatacatgtctaatattgcaataataacagattcagcatctgatataaaacaaaataacaacaaaaatataacagttcttcctttaacagtttcattcgatgataatcattataaagatggtgtgaatcttacacctgatgatttttatatgaaacttatagaaagttcaacgcttcctaaaacaagccagataagtccatatgactttgaacaggcttatgataaccttcttaagtctgttgataaaataatcgtagttacgctttcttccaagctttcaggaacatatcagagtgcctgtatagcagcttcagaatatgaagacaaagtatatgttgtagatagcgaaaatgttacagtcggtgaacagattcttgttgattatgcagtttcattgataaataagaacatatgcgttgaggatatagttaagcagctgaatactatgaaaaaacgtattcgtcttgtagctttgcttgatactttggaatatttgaaaaagggaggcaggatatcatcaggagcagcttttcttggaaatgtgttaagcataaagccagttatagctattgctgatggtgaagtttcttttcttggaaaggcaagaggttctaaacaaggcaataatttcctcatacagcaggtgcaggcatatggcggcatagattattcattaccagtgcttttagggtatacaggatattctaccgttcttatggacaaatatataaaagatagtaaagaattatgggaaggtaaaatactaattcctcctgttgtccaggtaggtgcaacaataggaactcatataggaccaggtggaatagctgtggctttcttttctgaagagtgatatataaagcggtattaattattttttgcattttttgaaaattaccacttgacatatcggtgcaatgcgtgtattatatcacttgtgttcgcatggaacacaatatataatatgcgcgagtggctcagtggtggagcacctccttgccaaggagggggtcgcgggttcgatccccgtctcgcgctctcttagataacaaaaaggacttccgaatgggaagtccttttttgttattcgagaagtgcggggcacttctcgaaacccaactgcttggcagtttgggttcgatttctcggagagctaaagcactcctcggtcgtgccagaaccaaggtccactggaccttgtggcacccgtctcgcgctctcttagataacaaaagggacttatttcacatccccgcgccgcaactctcgggttttctgtgaactttgttcacaaaaaacacctcgcggaatgttaccagtgaaccaatggtatttagataatgcaaacaatacttgatgaaattccatgttaaacgatgctgtaggcttcaaacatagttgaaagctttaattatttaaagtttttgactttaaaccataaaagtacttgcgtttaagggttaatatgggctatactattatggtatctgtccgggaatcaggctgttgtagatgacgtgagcagcatgtatcccggatgttgtgagtatggaagagggtttaaagtatgatagttactctgattgagaaagtatatagttttctgtggggagatctggtgcagattccactgccgggcggcagcactctggggatttcgcttctgattatattactgattcctacaggaatttattttacggttcgaacgcgttttctgccgattcgcctgttcccggatatggtgcaggcactggttgagaagaaacaagaaaaaaacagtctgtcttcatttcagacactgatcgtttcgacggcaacccgtgtcggtatgggaaatctggtcggtgttgttgcggcaatttcggcaggcggcgccggtgcggttttctggatgtgggtgacggcaattatcggttcatcaacagcttttattgaagcgacactggcacagctttataaagaaaaagatccgctgtacggaggttaccgcggcggtccggcgtattatattcatgcatatgtagaagaaaaacagaagaaaaagagaaacaaagtggtgatttctgtgttgtttgcaatctccggtctgctctgctggtgcggtatcagtcaagtgatcagtaattctgttgtttcttcatttaaaaatgcattttccattccgccgatctatatgacggtagtacttgttgctgtggcttctgtgatagtgcttcgtaaagatgcgacagttaagatcctggatatggtagtgccggtcatggcggtatgctattttgtaatcacgattctgatcattgtgatgaatcttggaagtttgccgggtgtttttgcaagaatttttgaggaagcatttggattccgacaggcagcagccggcggttttggcgcagtcctaatgaatggaatcaaacgtggactgttttcgaatgaagcaggttccggatctgctccgtgtgcggcagcagcggcagaatgtgaccagccggtcaaagccggattggtacaggcgctcggggtatttgtggatacgatcgtgatctgcagctgtacagcatttatcatgctgcttgcgccagaagaaaaagttacaggactttccggaatggatcttctgcagacagcaatggaacatcatcttggccgttttggtgtgatctttattgcggcgacgctgtttttattcagtttttcgacgtttctgggcatccttttttatgcgagatgcaatgttgcatatcttttcggagataactgggcttcacagattgcatacaaagtactggcgcttgtgatgctgttcatcggcggccttgcagcatatacatttgtgtgggatcttggtgatgttggaatcggactgatgacgatctttaatatcatcattctttacccacagggtgagaaggctctgaaagaactgaaagaatacgaaaaagaaaaaagaaaatgaaaacatcgcggacgttcaaatcaaatggcagaacctatatggaaaagcataatgacaatacacttaagtatgaccgtgaaccgtttacggtagaagttggaaatacagaagacattgataaaatcgcagatattctccgtgagcttggagaccattatctggaagaagatgtagcatctattccgttatcattcactgcttatatgaaagtcacatcttttaatccagttgtatatgaagtttgctacatggataaagaaagaaaacagaggacagtagaagaggagaaacttcgaaaagaagcagtacaggaacttctgatataccaggggtaattttcgaacattttttggggatgtgaaaaaaatcaatcgagttttttcacatccccttttgttatccgagaagtcggggcatttctcgaaacccaactgctttgcagtttgggttcgatttctcggagtgctaaagcgcctctcggtcgtgccagagccaaggtccaccggaccttgtggcacccgtctcgcgctcttgtttaaaaagaattgctttattttccagattaatgtaaattaatatattataaggattaaaagaacataatatcttttgattttaaatttaaataagatatttgaacaagaaatatgaaaaaatataaatataaaatacaaataagaaattaaaatgagaataagatgttgatttggagaatgaaatgggtataggtaagaagtttgttaagtacgtatcacagaatatatttggtatgcttggaatatcatgttatgttgttgctgatactttttttatatcaaaatatgctggtgcagatggaattacggttcttaatcttgttcttccggtatttagtgtaatatttgcatttggctctatgatgggtgttggttcagcgattcgctttaagatattaagagcaagaggcgatgctcatgcagatgattatttttctaattcaatcatgtgtgcatgcattttaagcatattatttatacttgtcgggatttttgcaccagataagcttttgcatatcatgggagcagatgataagattacagccataggtataggttatacaagaacatttctgatgtttacaccatttttcatgtgcaactatatagtcagtgcatatgtaagaaatgataatgatccgtcaagggcaatgcttgctacgttgtctggaagtctttttaatattgtgtttgattatatatttatgtttccgatgaatctagggctgcttggtgcagcgatggctacagcagcatcaccagtgtgcagtatacttgtgtgtatgacacattttatgggtaagaaaaatacagttgtgttcaaatggcatcttccttcatttaaaatgttaaaggagtcatgtatgcttggcacagcagcatttgtaggtgaaatggcatcagcagttacaacaactgtatttaatatgcttatgttatcacttaccggaaatattggagttgcggcatatggagttgttgctaattatgcctatatcggcacagctatattcaatggtatatcgcagggagcacagcctctgataagtgaatcatatggtaaaggtaataaaaaagaagtgtcacgagtttacagatatagtataattacatcagtggcattatttgctgttatgtatgcagtagttgcaggctttacaggacagcttgtaagtctttttaacagtgaaggagttgtagagctggcaggttatgcatatacaggtatgagaatatattttataggatttttgtttgcaggatttaatataatatcagcgggatatttcagtgctgtggagatggcaaaggaatcctttgttgtttcggttttaagaggctttgttcttatggttgtgatatctgttattttatcgcgtctgtttggaatgaatggagtctggagcagcttccctgcagcagagagcattacaacctgtgtatgtgttttatttattatattaaacaatacgagggtcaaaaggtctaaaaccatataagcagaaaggtaatatgttatgatgaatccaggttctattatgaaattaatgagtttaaagaataagtttgcaggtacacatccaaagtttgtatcatttctgaattattgtttttctacagggatacaggaaggaactattgtagaagtgacaataacaaaaccaggtgaaaatcctgttacagctaatatgaaagtgcagccatccgatattgagcttgtgaatgaacttaaaaatataaaataacttgcaaatgaattgaaaaataaataacttgtgaatggacttaaaaattctaaataaggtatttaaaaatatgaaaaaatatgaataatatgatggtataatggttgaaaaactggcagaaaaggggtattgttatgggaaatgtaatggattatctcgaatggcgtggtgacctgacatttgaacagtcaccatttaatgatgttgacaatgtcatacttgcacagcttgcatatgttgatttcagggatgttattccatcggtacagatgaacagaggcataaccttgaaaaaagcatcagagattttttttgatttacatacagaagaggagctaagccgggataaatcttttataaaggatgcaccttatctaatgaaaaaggctgccagtacaaaacgttttaaagatgttatattatcagattatgtagatacaatcgatgaaacacttgaaaaacagtttggagcatttcatattaaattaacaccacagttaacgtatgttgcattcaggggaactgatgacacgcttgttggctggaaagaggattttaatatgagttttatttctccagtgccatcacaggaggatgccgttaaatatcttaatgatacatgttcatatataagaggcaggctatatgtcggtggacattcaaaaggaggcaatcttgcaatatattcagctattaactgtaataagcgtgtgaaaaagaaaattaaatgtgtatataataatgatggtccgggatttgatatttcagtcattaaaagtgaggaatatcagtcaatgcttccatatatcaggagtattgtgccagagaattccatagttggaatgttacttgagcatgatgatgattatatcatagtaaaaagctcacagactggaataatgcagcatgatgccatgtcatggcaggtatcaggaccagatatggttacagtaagaagattaagtgcacaaagtagaagacttaatagagcatttagcagctggataagtagtgttgataatgaaaaaagatgtgagtttgtggaaacgcttttcggacttatatcatcatgtggtgtaaagaatctttcagatatatctgtagacagatttaaaagtacgagagaggttataaaacaatatgcaaaccttgataaagacagccgtacgcttcttagaagcatgctgctatcgcttactgaccagataggaaaggcaaggcttgaaaaataatgcaacagctgatttgctggattaaggagggacatatgtcaggaattattaatataatacttggagcagttattctgtttcttgtagtagtagcatttttatgggtatcaactaaacataaagaaagtggacttggtgatacatgtagtggaaattgttcatcatgccgtgcacactgtaaagatgaggcaaaaatagctggatcctcagacaaggatggcaaaaacagctgaggattttaggaggtagattatggtagatatctataagaccgataatagaatacttagtaagcttggcagcatagaggaaggctgctggattaatatggttaatccaacaagcagtgagttgtcgcttatttcaggatactttgatatagatgcagatgatcttgcaacagcacttgatgatgaagaaagttcacgtataagtctggaagacggatatacactgatacttgtagatattccaacgccggaggtgaggcatgaaaaaaagatgtatacaactattcctcttggtataatattgaaaaatgatgccataatcaccatatgcagggaagaaacaccggttcttacgtactttgtacgaaacaagctaaaggattttagcacaaagaaaaagatgcgttttatatatgaaatgatgttccgctctgccatgttatatcaggcatatcttcgtggcatagacaagaagagaacagagatagaagaacgtgttggtgatgatacacatgatacagatattattgaacttcatgagcttgagtcaacgcttgtatattttgcaacatcactaagatcaaacagtatagtgcttgaacggttacgaagatataaaaggcttgaacagtatccagaggatatggagcttcttgaagatgtaacagtcgaatatcagcaggctatagagatgacatccatatacagggatattattgatggtacaagagagctgctatcatcagtaattaataacaggttgaacaatgttatgaagattcttacatcaataactatagttatggctataccaactattatatcaggtatatacggtatgaacgttgatgagaaatggatgccattgtcaacaacacattatgggttctatattatagttggtattatagttgttatatgtgtatgtgtattgtggtttttaaagaagaaaaagatgatgtgagtggataaatgtgaacagatatatgtaagcagattgaagtgaacagattgatgtaagaggtaacgaggtaatgaatatattcagcagaataagaaacagactttcacatgcgcagattatggcgctgggttttcttatggttataataacaggtacaattcttcttatgcttcctgtatcaagcaggacaggtcaatggacaccgtttattaaagcattatttacgtctgtaagttcgacatgtgttacagggcttgtcgttgttgatacattttcttattggacagtgtttggacagcttgttatacttgttatgattcagataggtggtcttggatttatatcgataggtgtgatttttgcacttttctttaacagaaggatagggcttgcaaacagaacacttatacaggagagtgtgaattcaaatgtgcttaagggtatagtaaggcttatgaaaaatgtgatattaggaacagtggtgtttgaatgtataggagcattgctcttatcaatcagatttgttccacgtatgggagtcgcaagaggaatatataacggtatattccattcaataacggcattctgtaacgctggctttgaccttatgggcagatatgagccatattcatcgctgtcagggtattatgatgattatgtagttaacataacaattattgcacttatacttataggtggtcttggatttacagtgtgggcagacattaagcataacaagctgcattttaaaaaatatactctgcatacaaagatagttgtggtaagttctataatattagttgttattccaacaatcatgttcatggtgtttgaaagaaatggagttgaagcaggtatgccttttaaggacagatttataacttcattttttgcttcggtaacaccaagaacagcaggatacaatacagtggacttaggcgcaatgacacaggcaagcaagcttcttacaataatactcatgtttataggaggctgccctggttcaaccgctggcggtgtcaagacaacaactatagtagtcataatcgtgtatatatggtcgaatctgaggaattcagctggatgtaatatatatggaagaagacttgcggatgaagatataaaaaaggcaagtatggttataggtcttaatctgtttatggcggttgcagcattgctcataataagtggaatgcagaactttgattttgaagatttgtgtattgaggtgttctcagctgttggaacagtaggtctgtcaacaggaataacaaggcagcttaatacatgctcacagatagttataatgcttctgatgtttggaggaagaataggtacagtaacatttgcttcttcatttgcatacaacaaaaaacaggtgaagcttatgaatccggaggaaaatataaacgtaggttaataatagtgatcctattatgtggctgaatatatttttgaaatgtacatcatatggtaacagatgaccagaaaaagaaaggaataatatgaaatcaatattagttataggaataggcaagttcggacatcattttgctgagaagcttatagctcttggtaatgaggtcatgataatagatcaggatgaggataagataagagagcttatgtctaaggcaacaagtgccagaataggcgattgtacagatgaagatgtacttaacaatctcggcttatctaactttgatacagtagcagtatgcatatcggagaattttcagaacagtattgaaacaacaagtcttgtaaaggaacttggagctaagcatgttataagtgttgctagcagggatatacatgcaaagcttctgttaaagaatggagctgatgaggtcatatatccggacagggatatagcatacaggcttgctaagaaatacagccgcagccacgtgtttgaatacatagagctttctgacgaatatgccatatttgaggttcctgtcataccacagcttgtcggcaagagtatacgagaggcagatgtcagaaagaaatataagatgaatattataggaatagtgcatggagaagacgtacagataatgccttcagcagattatagattttcgtcagatgaacacattaaagttataagtgataatgatagtgtggatgcatatcttaagcacgtgaagtagaaattgttgtttaattgaatattagttggtgacgaacggacgacaaatataagctacaggcagtcctgcacactatgttcaatgccagaagcttcaatcggctgtctctaagac

SEQ ID NO: 409 - DNA, 219 bp, Unknown
  gut microbiota DNA sequence
aataatgaaaataccagcccatgcaaagtatcagattatttatgatactttgcaaaaaaacgataatctattgaatgtagctgccatgtgcgaaattgcaggagtatcccgttcgggctattaccattatctctcaacagaagaccagcgaatggaaagagaggaacgggacagacaggattttcttttgattctgaaagcataccagtatcgaggata

SEQ ID NO: 410 - DNA, 237 bp, Unknown
  gut microbiota DNA sequence
tccgatagggatttgctttgcggataggacactgtaagttatatttcctcatcagccgacggatttttttgatattcatcactataggcggttccatgtgcaacaacctcatatatatactacgggcacctttatggtatcctcgatactggtatgctttcagaatcaaaagaaaatcctgtctgtcccgttcctctctttccattcgctggtcttctgttgagagataatggtaat

SEQ ID NO: 411 - DNA, 8328 bp, Unknown
  gut microbiota DNA sequence
atctgttaattatagaatatacagttatatacattaatatacagtaatataaattttcacttgactttaatgcctgaagtgactataattagaacgatgttttaaaaaaaagtgctttagcacattgaaacttaaagaatattcttaccatatataataatggtagtgaaggaggtgcatagattatgaagatgacatttcagcctaagacaagacagagatctaaggttcatggttttagatcaagaatgagtactccaggtggaagaaaagttttagcagcaagaagagcaaaaggaagaaagagactttcagcttaattggttttacagcagatgggtacatcagtattcatctgttttttttatagtatcatttagtattattgaagattatttaacatggcagtttgtatcatattatgtgctgccataaataaaaaatatatggtggattattattatgaagtacaaggattttgaaacattaaaaagtaatgaagattttaaaagggtatatacgaaaaggaaatcttatgcaaatagagaacttataatgtatatagctaagaacggaacggatacaaaaagactcggtgtatctgtgagcaagaaggtcgggaatagtattgtccggcacagactggcaagacttgtaagggaggcattccgtcttaatacaagtcatatacccgatggcatagacgttgttgttgttgtcaaggctggtcttagagataagggttatgaagaaaccagtaattcaatgattcatttattaaagctccataagatatatattgcgtaattatcacgtaagtatcaaaagattattttgctgcttacagattggtaaggattgcttcaaagcaattgattattattgcaattgtttgttattgctattgttattgttattttatgtaaattgaaagtgcatattagaaatgatttatgctgaattcttgatgaaaatgcatattaatatgtatgttaatgaggaaaaatatgaaaaaatatagcaacacaggtaaaaaaatagttataaagctgatatgtttttataaggtagcgttatctccttataaaggaagaagctattgtaattatgttccaagctgctcacaatatgcaatagaagcgatagatatgtatggagttgtattaggtggatggttggcatttaaaagaatactaagatgtaatccattccatagaggaggctttgacccagttcctattggaaagtataaaagaaaaagattacattaataaccaggaggtttgatttgtttaatgcaattatcatgccaatagcacaggtgttaggttatatttttgatcttttgtttgaagcattaagcttcttacacatcggaaatgttgctattgcaattattctatttacaattatagttaagctgtgcatgcttcctttaagcataaagcagcagaagttagccaagcttaattcggtaatgagtccggaaataaaggctattaatgaaaagtataaggacaagaaaaatgaccagaatgcaatgatgaagatgcaggaggaaactaaggctgtatatgaaaagtacggtgtttcacagatgggtggatgcgtacagatgcttatacagatgcctattctgcttgcactttaccaggtgttcagattcataccactttatattacacagttaaagaatctttttacagcattccttactgataatggtggtataatgtctgcgagcggttatacagataccatgaagcagtttggtgaaaatatagattggacaaatgttaatacagcaatcacagaaattaacaagtttagtacagaaaactgggatgcgttaagaaatgcatttccagcattcagcgatattattgctaacagccatgcaagtcttgaacagatgaatacatttttaggtattaatatgtcacaggaaccaggatttgggcttacacttgcattccttatacctgtactttcaggtttatcacagtttataagtgtaaaggttgcacagggaaatacaccggtagatgatgataacccaatggctgcatctatgagaatgactacttatatattcccattaatgtcagcatttatcgcaatatctgttcctgcaggtcttggtctttactggatagcaacttctgtaatccagactattatcacagtatttataaacagatactatgacaagttaggtgctgaagcaatagttaaaaagaatgttgaaaagcgcaataagaagcgtgccaagaaggggcttccaccagaaacaatagctaagaatgctacagtatcaactaagaatgttaacagggaaaaagctgttaagtcattagaacagataaaagcagagaatgaaaaaaaggtaaaagaaataaaagaatctgcacagtattataagacggccaagccaggaagtcttgctgaaaaggcaggtatggtcgctaaatataacgagaagagcagtaagaatggtgccagaaagaactaacaggattttaatgtaagtgagggtaaaaacatggaatatattgaagttacaggaaagtcagtagatgaagctataacaaatgcttgtcttaagcttgaaacatccagcgacaagatagaatatgaagtaatcgataaaggaagcaatggcttattcggaatatttaattcaaagccagcaaagattaaggcaagagttaagtctggtgttgattctgtagatgaagaatttaaagaatttgaaaagaatgaaaagaaagttattaatgagacgatagaggttaagaaagaggcttctaagaaggaagctgttaaagcagaaaaggctgttgaagttaaagacaatacagcagaacataaagctttagcaacagagaatactatggaagctgacaaagaagaaacagctgttaaggcagaacctaaggctgtattatctaacgaagagatagagtcaagaattaataacttcctcaatgatatgtttgaagctatggagatttctgtagaagttaagattacatttgacacagatgatgagtgtgttaatgtagagctccttggtgataatatgggacttcttataggtaagagaggacagactcttgattcaatacagtatcttacaagccttgtagtaaataagggtaaggaaaagtatgtaagaatcaaggttgatactgagaattacagacagagaagaaaagatactcttgaatcacttgcaaaaaatattgcttataaggttaagagaagcagacgttcagttgcacttgaacctatgaatccttacgagagaagaattatccattctgcattacagaatgacaagttcgtttcaacaaagagtgagggtgaagagcctttcagacatgttgttgtttatcttgacagagaaaagagtggcaataatagatattcaagaaagaattataatgataataagtaagatgaacattatatgagtatcagattttaaaatcgaaaaagtgttatgatattttgcttgttaagggctgctgtggtattattacaacagcagccctttctggtaatatattgcttaatcagcaactgcaaaatgggcagaatgacagtgataattatgtttatgataaaggcgttaattatatagaacaggagtgtatatatggagcatacaatagcagcgatatcaacgagcactatgtcaagtggtggaataagtatagtaaggctgagtggagtggatgctgttgagatagcagataaaatctttgaagctaagaataagaagaaattaaaggatgccagaagccacacaatacattatggtgttataaaagatggtgatgaggtgatagatgaagttttagtatctgttatgagggctcctgacacgtatacaagagaagatgttatagaaataaactgtcatggtggtattcttgtgacaagaagagtgttagatacagtacttaagaatggcgccaagccggcagagccaggagaattcacaaagagggcatttcttaatggaagaatagatctttctcaggcagaagcggttatagatattataaatgcaagaaatgattatgcacttaagtcatcagtaaatcagcttggtggaaaactatctgaaaaaataaaaaaaataagagaaatcatactggataatgtagcatttatagagtcggcacttgatgatccagagcattatgatattaacgataatgttgataaaatgtgcacagatgtggataactgtgtggaaagtgttgataagttgttgaaaacagctgataacggacgtattatgagagatggaataaggacagtaatacttggtaaaaccaatgctggaaagtcaagtcttctcaatgcacttgccagggaggaaagggcgatagttactgacattgagggcactacaagggatgttcttgaggagcagataaacctgtcaggagttacgcttaatcttatagatacagcaggtataagaaagacagatgactatgtggaaaacataggtgttaataaagcaaaacagtatgcaaaagatgcagatcttataatatatgtcatagattcatcaagaccacttgataataatgactacgaaattatggatcttattatgaataaaaaagtgcttgtacttcttaataagtctgacatggaacaggttgttactaaagaagatgtactaaagcatttgtcatgtaacgtaatatctgtatcagcaaaggaagaaacaggtatagataagcttgaaagtgagataaaggatatgttctttaatggtaacatatcaacaaatgaagaaatatatataactaacttaagacataagaatcttttaagagaggcgcttgaaagtcttaagcttgttaaagaaggaatagacagtaatatgagtgaagattttcttacgattgatcttatgaatgcgtatgaaaaacttggacttataataggtgaggaagtagaagatgaccttgccgacaggatatttgagaagttctgtatgggaaaatagcttattacatttaaatgaaaagacaggaaggaagtaatcatgcctaatattaaggaaacatatgatgtagtagtagttggtgccggacatgcaggctgcgaggcagcacttgcaagtgcaagacttggactagaaactattatatttacagtgagtgtagagagtatagcaatgatgccttgcaatcctaatataggaggaagttctaaaggacatcttgtaagagagatagatgctcttggtggcgagatgggtaagaatatagatgctacatttatacagtctaagatgcttaatgcatctaaaggccctgcagtacattctttaagagcgcaggcagacaagtcagattattcaagaagaatgagacaggttcttgaaaatacagagcatcttcatataagacaggcagaggtatcagagataatagtaaatgatggtgtaatcggaggcgtaaagacggtatctggcgctgtatatgaggcaaaatcagtaattttatgcacaggtgtatatcttaaggcaagatgtatatatggagatgtaagctaccatacaggtcctaacggactccaggcagccaatcatcttacagaatcacttataaataacggaatagaagtaagaagattcaagacgggtactcctgccagagtggataaacgttctgtagattttagtaaaatgacagagcagtttggtgataagacggttgttcctttctcgtttgaaacagatccggctacagtacagaaggatcaggtgagttgctggcttacatataccaacgaagagacacataagattataaaagataatatagaccgttcaccattgtattcaggtgatatacagggaacaggaccaaggtattgcccttcaatagaggataaggtggtaagattcgctgataaagacagacaccaggtattcatagagccagagggactgtatacaaacgagatgtatcttggtggtatgagcagttctatgcctgaggatgtacagtatgcaatgtataagacagttccaggtcttgaacatgtaaggatagtaagaaatgcatacgctatcgaatatgactgtatcaatgcaatacagcttaaatcatcactagaattcaagaagataaagggactttttgctggtggacagtttaatggaagctcaggatatgaagaggcggctgcacagggtataatagcaggtattaatgctgcacagtatgttaagggaaaagaacctctcatattagaccgttcagaaagctatataggtgttcttatagatgatcttgttacaaaggaatcatttgaaccatatagaatgatgacttcaagagctgaatacaggcttatattaagacaggataatgcagatataagacttacaaagtatggtcacgacataggtcttatatctgatgaaagatatgaaagacttcagaataaaataaagcttatagatgaagaaatagagcgtgttaaaggtgttaatataggaactaacgaacaggttcagaagcttcttttagaaaatggaagtacagagcttttaacaggagtgacattagcagaacttataaaaagaccagagctttcatatgagctgcttgcacctattgataagcacagaccagagcttccttgggatgttagacagcaggtaaatattaaccttaagtatgaggggtatataagccgtcagttaagacaggtggagcattttaagaagcttgaaaagaagattattcctgaaggactggattattatgagataaatgggcttagaaaagaggctatgcagaagcttgataagttcaatccacgttcgataggacaggcatcaagaatatctggtgtatcgccagctgatatttcggtgcttcttgtatatcttgaaagctatagaagaaataagcaggttattgatgaataaaaaagcaggcttgtaattgaaaatttatgtaaatgtaaataaaagaagcaagcatgtaaatataaataaaggaagcaagcttgcaaatgtaaatagaagaagtaggcttgcaaatgtaaaaataaaagtgtacgtgtaactgattaataaaaagtaagcatgtgattgaggaataggagagaatatgccaagtacagtgtttaaaaggaatcttgacagtataggggttagtcttaatgatatacagcttgaacagcttgataagtattatgagctgcttgtagaatggaatagttttatgaatcttacaggtataactgattatgaagaagttatgttaaagcattatcttgacagccttgttcttaagcttccaataactggggataactcaaggctgcggcttatagatgtgggtacaggtgccggatttccaggacttccactaaagattgcatatcctgatactgatgttgttttgtttgactcattaaataaaaggataaagtttcttgatgaggttataagtcagttgtctttaaaaggtgttactaccatacacggaagggcagaggatggtgggagaaatcctaagctacgtgaacagtttgatgttagtgtatcaagggcagtggctgatcttgcagttttatcagagtataatctgccttttgtgaagataggtggatattttgttgcatataagtcaggagatgttgatgctgaggttgaaaagtcgaagaaggcagtaagtattcttggtggagttatagaaaaggttgataaattcaaacttccagaaacggatattgaaagatctcttgtatatattaaaaagattaagagtactgggaaaaaatatccaagaaaggcaggtatgccatcaaaggagccattggggtgattgatgatatcgtgtcgtggatcagctggatggttaaattgttgtttaacacacattcggttggcgaactgacgacataatataagtgaaaatcggtgctgcacatacatcatcgatgccagaagtttcaattggatatttctaagacttttcttataggttgtgactactgccgctaccgttcgatacgggacatccatgtcccatatctcacttccacagacatccgtgtctgtggatagctggggggttaaggaaaagtctaagaactatcacaattgaacttcaagtgcatctcacgacgtatgcgcagcaccgattttcacttatattatgtctggttgtggcttaatttacgaaaaatgaatgtgtgctaaatcagaagggagaggcatgaagggcggaattgtgcgcaaagcgcacaattccgccctgtttcgtcaccttgatt

SEQ ID NO: 412 - DNA, 201 bp, Unknown
  gut microbiota DNA sequence
tcaaaacacaattacgatgctgataacccgaatgattattaaatcattcaataacaatcaaatatctatttctacataaaccatccgttaatcacttaactgatggtttatgtctttttcaatccaaaaattctatgatagttatatcaactataaaggatgtcgctattgatgaaagaaagtgaagaacgaagcagtaat

SEQ ID NO: 413 - DNA, 228 bp, Unknown
  gut microbiota DNA sequence
caaatcgggatacactttttgttatgattaaatcaatttttccgccttcacaatcttcaatcatttttttgaatgcatctctatgttgaagcgaagtgcctgaaatgccttcgtcggcatatatttcgacaagcatccaattcggatttttatttactacatcctgataatgatttttctgtaattcatatgaggatgtttggcgtggatcatccgtagatacccttg

SEQ ID NO: 414 - DNA, 228 bp, Unknown
  gut microbiota DNA sequence
caagggtatctacggatgatccacgccaaacatcctcatatgaattacagaaaaatcattatcaggatgtagtaaataaaaatccgaattggatgcttgtagaaatatatgccgacgaaggcatttccggcacttcgcttcaacatagagatgcattcaaaaaaatgattgaagattgtgaaggcggaaaaattgatttaatcataacaaaaagtgtatcccgatttg

SEQ ID NO: 415 - DNA, 762 bp, Unknown
  gut microbiota DNA sequence
gtataagcaccttgctaagtctttaaaccgtgcaagatgtatcgctggtgaccatgatgatattacaggaatcgagcagcttgataaggttatagatattgaccagtcgccaataggaagaactccacgttctaatcctgcgacatatacaggcgtatttgatatgataagggatctttttgcttcaacaacagatgctaaggaaagaggttataacaaaggacgtttcagctttaatgtaaagggaggacgttgtgaggcttgttctggagatggtattatcaagatagaaatgcatttcctgccggatgtatacgtgccttgtgaagtgtgtgatggaaagcgttataacagggaaacacttgaagtaaagtataagggaaagagcatatatgacgtgcttgatatgacagttgaggatgcagttgatttctttgaaaatgtgccatcagtcagaaggaaaatagaaactcttaatgacgttggactttcatatattaagttaggacagccatctacagagctttcaggtggtgaagcacagagaataaagcttgctacagagctttctaaaagaagtacaggaaagactatatatattcttgatgaacctacaacaggacttcattttgccgatgtccacaagcttgttgatatacttcataagcttgcagagggcggtaacactgttgttgttattgagcataatcttgatgttatcaaaacagctgattatattatagatatgggaccagaaggtgg

SEQ ID NO: 416 - DNA, 420 bp, Unknown
  gut microbiota DNA sequence
ttttaagtctaaataactaccttcttgccgaaaagatagaacatctcagttatcatgatatgaaaagggaattactgtggaataattacgccaaaccgatattaaagaaagaatcttccgtttctattccatctatacgcaatctgccacaatttgatccagatgcggaaattgcaagtcttacgttgacgattccctcatggaacagttctatcgaaagagtattaaaagtttcagattttaaaattgcatctgatacagcaaaatataagcttaaatatcagcttatgtgcctaatatcaaccacaaataatattttgaaaaaattggaggaaatataattatggatggaaataccgaagatttacaaaagtttgttccccaagtgcattttgagcaaatacctattaaaaatttatg

SEQ ID NO: 417 - DNA, 5122 bp, Unknown
  gut microbiota DNA sequence
ataaagaaaaggaaagaggaaaaggaaagaggaaaaggaaagagaaaaaggaaagagaaaaagggaaaataaacaaggctgccacaatatgtaatcttattgtggcagctttataatacaatatataatcattaaaagtagcaatctgttacttataaatttcctgccagcgggataccatctcgactgcctccatttcagatgataccttcgtcacaatcatgtcatcaagatagatttcatatactggaaactttttcacgctgtttccgtgtttcacctctactttgctgtactttacacgctccataataaaaacctccacatattaatattgttatcaagctgatatattcaataattaataacaacatgttgtattatatcatagtgaattttaaattaaaatactacattttgtattggtactaaagtaccagcaattggtaaaaatgttacaaaaaaggctgtaaaaacattgcatatttgttaagaataaattataatatataacatggtttgtcgtatataatggtattaaggagaagaaatattatgcattcacaacaggatgctgcttttaacgacagttatatagcagcacacagacttgacagaagaaaagctgttatagatagattttatctgacaagtgtaacaaatagggcattcaatgaatattttggtaatgttacatatggctgcctgacagagtttgttaatccaggggaaaaagaaagttttatagaatttattgacgggtttgatggtgtagaaacagaaaagtgttttttatttaagaatggcaatggtgagtacaggcttaaccttattaagcttattgcttttgaaggtgattctgtgctgcgtaatattgatattgagatgctggatatagacagtatagtggagactaattacaagatatgtgatgatatagccagagaacgtttggttatgggacttactggggaatatgtatttacatattctggtcagagtggagatatcaaaatagtcaggtatgagggaagcacaagagaagtcagagttcgtatgccactagatgaatggcgtgagtatatggctgatggaatagtagtacctgaagatattatagagcttgataaccttgtcaattgcatgaaaacatatatgtcagatttctgtgtgaagcttactacaagtatgagaactatggggaaggttaacgaaaaagtcaagtttataggtactatacatactaaatatactggtgagaatattgtcacaggaagaattgttcttgcagatggagttaacagcatgggaaacatagttgaggttgttgatgaacttactatggattcacttacgaaggtatataacaagaaaaccataacagaatatgcggctaagcttgttaagcaggatacggttgacagggtaagtatagttattcttgatgtagattacttcaagcaggttaatgacagatatgggcatctttatggtgataaggtgcttgcaagagtggcaaagaagcttaaagaggttgttggagaagatggtatagtaggacgtatcggtggtgatgagttcatgatagtccttaaaggcatcaatgatgactatgctttaagaggcgtgctaagagccataagaacacaggttaagtgggaatttaagaacgattatgagaacttccaggttacaacctccataggtgttgcgttcagccctaataatggtcatgaatacgaggagttatttaaaaaagcagatttttgtctgtatgtggcaaaggaaaagggaagagacagatatgtattcttcagggatgaaatgcacagggaggcttatgaaaattctattaacaagaaagataagataatcaatgatggcagggagatgcgcgagctaagataccttactgacattatgatacagtataacaatgataaaaaagctgcggttatggctatgcttgaacatatgcagaagctgtacaaggtagataatataagcatatatgaaggcaaggatttagtcaggaaaatatcagttggtacaagcattgaggatgaagatatgtcatatgtatactcagatggttttaagagacttatgggagataagacgtatatagcagccagctttgttaataacaacagagatgtcgcaccagagttcgcagatgagatgagaaaaagacatatatattctacgattcattgtcttattggaagtaaggatgaagttaaaggcatgtttacggtaaacagaatgaaagcagcatcacaatgggcagaatatgagatagaatgtagtgttataactgctacacttgtcaatatgcttatgcagtaaagatgatcagcaagagaagatgattagcatatgttagctgtgttctaaagttaaaagtcttattatgcagtcataataagactttttaagatggctatgcttacattatacttatagaattatttaaaatattttagtagttttataatggatgtattttcacaaatgcagtagttataaggcatagaggcgtgtttgtatctaatactatatatagtatggtaagttgacgaaagcaccaatatgtagtaaaatttaatttgttcaaagatagtgattattaatgcactatacaggtgataaccaggacacttgtatagtgcattacattgtctataggctgtctattgagtttcttgtgataggcagattacatagtgatatgtatgtcgaaagtgaattttgacatttacattaaaatatctggcatatatgaatgggagggtttaattaaaatgaagataattaagcgtagtggttcagaggtaacatttgacattaccaagattatggcggctgtttctaaggctaatcaggaagtggttcatagtgagagactttcagatgagcagattcagacaatatcagataatgttgagagcatatgtgaggagatgaacagatctcttaacgtagaggagattcaggatcttgtagagaatcagattatgaatcttcgtgcatttgcagttgccagaaagtatattacatacagatataagagggcgttggtaagaaagtccaactcaacagaccaacagatattaagccttcttgaatgtaacaatgaagaggtcaagcaggagaattcaaacaagaatcctactgtaaacagcgtgcaaagagactatatggctggtgaagtaagtaaggatataactaagagattcttacttccagcagatattgtagatgcacatgagcaaggacttatacatttccatgatgcagattattttgcacagcatatgcataactgctgccttgtgaatcttgaagatatgttgcagaatggtacagttataagtgaaactatgatagaaaagccacacagtttttcaacagcttgcaatatagcgacacaggctatagcacagatagcgagctcacagtatggtggacagagtatatcgcttgcacatctcgctccatttgtacagataagcagggaaaagtttgtgaagcaggttgctgaagaattcaaagcaacaggtatagcagcaagtgaagaaaaggtaagagaggttgcagagctaagagtaagagatgagataaaacgtggtgtacagatgatacagtatcaggtcatcacacttatgactacgaatggacaggcaccgtttgtaactgtatttatgtatatagatgaggttccagaaggtcagacaagagaggatcttgcacttgttatagaggaagtgttaaagcagagaatccagggtgtcaagaacgaaaagggtgtgtggatcacaccagcatttcctaagcttatatatgttcttgaagaggacaacataagagaggattctaagtattggaatcttacaaaacttgctgcagagtgtacagctaaaagaatggttcctgattatatatcagagaagattatgaaaaaacttaaggttgataagaatggtgatggacattgcttcccatgcatgggctgtcgttcgttccttactccatataatgatcctgagacaggaaagcctaagtactatggcagatttaaccagggtgttgtaacacttaatcttgttgatgtggcatgttcatcaggtaaggatatgaataagttctggaagattcttgacgaaagacttgaactttgtaaaagagcacttatgtgcagacattacagattaaaaggaacaccttcggatgtagcaccaatcctgtggcagaacggagcgcttgcaagacttaagaagggcgaaactatagataagcttctttatggtggatattcaactatatcgttaggttatgcaggtttatgtgaatgtacatattatatgaagggggttacacatacagctcctgagggaacagaattcgccttaaagcttatgacatatttaagagatacatgtaacagatgggcagaagaaactaatatagatttcagtctttatggaacaccactggaatcaacaacatataagtttgccaagaatcttcagaagagattcggtaagataaaaggtgtaacagataagaactatataactaacagttatcatgtacatgttacagaaaatataaatgcatttgacaagttaaagtttgaagcacagtttcaggaactgtcacctggaggagctatcagttatgtggaagttcccgatatgaatgataatattcctgctgttctttcagttatgcagtttatatatgagaatattatgtatgctgaacttaatactaagagcgattattgtcaggtatgtggatacacaggacagattcagataataacagatgatgacggaaagcttatctgggaatgccctaactgtggaaaccgtaatcaggataagatgaatgttgcaagaagaacatgtggatatattggtacacagttctggaaccagggacgtacacaggagataaaagaaagagtgcttcatttgtaaaacagagttgatgtttagaacacattcttaacgtactgacgacagcatatatgagaaaagcaggtgtgcatacatcaacgatgccagaagcttcaattggatatttctaagacttttcatatacgtaatggtagttt

SEQ ID NO: 418 - DNA, 1482 bp, Unknown
  gut microbiota DNA sequence
gtcccatatctcacttccacagacatccgtgtctgtggatagctgagtagttaaggaaaagtctaagaactatcacaattgaacttcaagtgcatctcacaatgtatatgcagcaccgattttcacttatattatgtctggttatggcttaattctctctgctgctacatcagataagtccaagtgttcttaatataaatatccagcccgtaagcgttacacttgataatactgttgtcaaaacaactatacttgatgacagcacttcatcattatccatactctttgccataacatagcttgtaactgttgttggcgatgcaagcattataagtgctgcaacaagctcctgatttctaaagccaagtgcaactcctactggaataaaaactgccgcaagacctataagctttataaatgttgccgcaagtgtaggcttcagcttttttattgcttttcttccctcaaatcctgcacctatgcatataagtgctataggagtggctgtctgtgcaatgctttctattgttttatttacaataaccggatatttcatgccaagcatagatgatataaatccaagcacgatacctatgataataggattctttgctatattaacacaagctttcttaatgttatctgttttatggctgactgtctttttaatctttatatcatcagtaacaacttcttcatcattacttatcttttcaactgtttcatttacattaacctcttctttaagaactttctcaggatgcgccttaaatgtaagtacaacaactgcaaatatattaaacagtggaaccgcagcaacaatcataagaggtgccatgcctgtatcagaatacatattctgtacaaaagccatgccaagtatcgccgcactgcttctacagcttccctgtatgaatgcgcctttttgtgtatcatccttcatcagtaattcagtaaatatccacactagtgaaaacatgagtattgttactatgctacaatacaaaacgaactttggttcaaactggcttttaaaatctgattttgataaatccctgaacaaaagtactggtaatgccactttaaaaacatatctgtttgctacattggcaaaatggtcatctataataccaagctttttaatcacacccccaagcagcataaccagaaatactggtacagttgcattgatactatacacaaaactatccacaacaatctccattcagctgtatgctatgtatgctacagcgctttatttaactagcacatcgttttcgaaaatatgtaatagtacatattttcattcagcaatcacaacttatatagtacttgctgaagaatggttatataatactcttctcattaaaaaaatgcaaataattgttgtttaattgaatattagttggtgacgaacggacgacaaatataagctacaggcagtcctgcacactatgttcaatgccagaagctttgattgga

SEQ ID NO: 419 - DNA, 201 bp, Unknown
  gut microbiota DNA sequence
cagataatcctcgttgtttgcgggtttctcttatacgtttgcctataagtgcataatttatttccatgtcctcacctcctttccatcacaacttgacttttttgtgttgtagatagaaaaaatggtgagctatacaacagcaattagttgtataaagagaagtatatcatatgtatatagcaaaaagaagattgtcgattg

SEQ ID NO: 420 - DNA, 217 bp, Unknown
  gut microbiota DNA sequence
tttgtactcccgcagtactcttcctttttcctctaattcctccagtgttttgatttcctctttatctgccatgtattttcctcccagacataatttttaacacataaataataacctttttttcgctgttgttcaattacaacttatcgcctttttctcccatcaatcgacaatcttctttttgctatatacatatgatatacttctctttatacaa

SEQ ID NO: 421 - DNA, 9569 bp, Unknown
  gut microbiota DNA sequence
gaggttttgtatacgtaagagaagcggaagagcttcttaacgaggcaaaggcaatagttacagattctgtgcttagatgccttgataagaacattacagactggagcaagataaagaatattattaaggatgatcttagtgagtatttatggaagaagattaagagaaatcctgttattcttcctataattatggaagctcagttataatatacagttattatgatgtcatatatgggagtatttcatgcagaaaatagatcagttgaagtctgatatagctcataccataaaggaaagtgcagagtataaagaatataaaaggttagaggctgtagttaatatggatcctaaccttaaaagaagtattgatgagtttcgaagaagaaactatgagatacaaaactgtggtcaggtagaagatatatttgcagctcaggaagaacttaataatcaatataaagatatgagaaatcagaacatggtaaacagataccttctcgctgaggtatgcctgtgcagaatggttcaggatatatgcaggactgtggttgatgctattgatttcgatcttgattttcttggctgatccggtatgtcttcataaagaagcgttattatattatgtaaaaacagcttttttatgatatatcaggtgatgaatggatggataattaattatgaataataagtcaatcagaatgattgtttcgatatcattgaatgcattatttatagccattgctgttattgtggttgtaacagtcggaactaaggcatatacatttggcaataaaatattcaacgagagagctgtagatgcagtagataatgcaaaggtcgttgatgttacaataagtagtggtgtgtcagcaggacagctggcatcacagctatatgataagggactgatagatgataaaacagtgttctattttcaggttaagctatcagattataaagataagtttaaggatggaacatatagtcttaacacaagtatgaaacctactgatatgatgaaggtattatcaggtgtaagtgatagcagtgatgaaggtaaataaagccatatataaacataattatacatttgtggatggagggtacgacagtgattgttaatgaaagagttgtctcttatattaattcgctggatcgtggcaattctgacatatgtaatacaattgaaaaagaggcaattgaggaccaggtcccaattataagaaaagagatgggcaatctgctaaaggtgctgcttaaacttaagcagccagggtcaatccttgaagtggggacagcggtaggttactcatctattcttatgagtgaaaatatgccaaaggattgcaggatagtcacgatagagaattatgataaaaggattcaggcagcgcgtaataacataaaaagagcaggaaaagaggactgcatacagcttatagaaggcgatgcccttaaagtccttaaggagcttgaaggaccatatgattttatatttatggatgctgctaaagggcagtatataaattatcttcctgatatattaaggcttatgccttctggcgggcttcttatatctgataatattcttcaggaaggcgaacttgtggaatcaagatatgttgttacaagacgtgacaggactattcatacaagaataagagagtatgtatatgagcttacacataatgatgagcttataacatctatagttccaataggagatgggataacactaagtgttaaaaagtaataaaagataataataaaagacgaattgataaaagagtaattgataaatagcaattgataaaataacagttaatgaaacagtaattaatgaaagaataatataaggagcggattataatggcaggacattattacaatggcagagaattagaacttctgataccagcaagctgtcttgaggtattaaaaacagctgttatattcggtgctgatgcagtgtatatcggtggagaagcatttggattaagagcaaaggctaagaatttttctaagcaggatatgatagatggaattaagtttgcacatgacagaaatgtaaaagtatatgttacagctaacatacttgcacataactatgatcttgatggagccagggaatattttaaggagctggatgttataaagcctgacgcggttattatatcagatcctggaatgtttacaatcgctaaagaagagcttcacgatatagatattcatataagtacgcaggctaataatactaattatatgacatatagattctggtgggaacagggagctaagagagtggtatctgcaagggaattatcacttaatgagattaaaggaataagaaaaaatataccagatgacatggaaatagaaacatttattcacggtgctatgtgcatatcatattcaggaagatgtcttcttagtaactttatggctggaagagatgcgaataagggtgcatgtacacatccatgcagatggaaatatgctgtagttgaagaaaacagaccaggtgaatatatgcctgtatatgagaatgagagaggcacatatatatttaactcaaaggatctgtgcatgatagaacatattcctgaacttattgaagctgggatagacagctttaagatagaaggacgtatgaagacagcattatatgttgcgactgtggcaagaacatacaggcttgctatagatgattttcttaaggatccagaactgtataagtcaagaataccattctataagtcagaaataagcaaatgtacatatagacaatatacaactggtttcttctttggaaaacctgatgaaaatactcagatatatgaaagcaatacttatattaaggaatatacatatctgggaatagttggagatatgaacgaagaaggcttgtataacattgaacagcgtaataagttttctgtaggcgaacagatagaggttatgagacctgatggagagaatatacaggttactgttaagagaataaccgatgataagggtaaagacatggaaagctgtccacatcctaagcagcagctatatattgatcttggtgttaagcttgacagatacgatatattacgtcgaaaagaggagtaatagattttttacaataggatatgcaataaaaggcacttttacacataaaataataaaaatatgtgtaggggtgcctttctttgaaagcgtttgaacaaccattatcagagcgtgaagaaaaggaaatgataaagaagagtcagaatggggatatgaaggctcgtaatatacttgtggaaaagaatatgcgccttgttgcacatatgattaagaaatatatgtcagcagacagagatacagacgatcttatatcggttggaacaataggtctgataaaagcagtgaatacatttaatcctgataaaaagataagacttgccacgtatgctgccaaatgtattgataatgagctgcttatgatgctgcgtaatgatagaaaaaaacttatggaattatcattatctgagccaataggtactgataaagaggggaatgatataacatttatggatatagtcggggatgaagagcgcgatgatgtggcgcagcttcttttggaagagcagttaaattgtataaaaacacacatgaaggatgttttaaacaaaagagaaatatatataatatgtggaaggtacggacttggtggtgggaaagaaaagacacagaatgagctggccgataaacttggaataagcagaagctatgtaagcaggatagagcagaaagcgttagagaagctatataatctgcttggcagttacagactactgtgatataattaccgcgaaagacatatgataaaatgccaggatatataatgtattcctggctttttgaaattattaaaataatgcccggttcatgggcttaaatccttagtaaggtggtaaaaaagtatgggtgattcttatgttgttaaacaaagattaaataaagtaagagaaataatgaagaaaaataaagtggatgtttatgtggtacctactggagactatcatatatctgaatattcaggagattatttcaaagaaagggaatatataactggttttactggttcagcaggaacagcagttatatgtgctgatgaagcagtcctttttacagatggaagatattatgtgcaggcacaaagacagcttgaaggaagttctatagagcttatgcggatggggagcgaaggtgttcctgatatatatgaatattgcagaagcaggcttggaaaaggaaagaaaataggatttgatggcaggtgcttagaagctaaacagggaatagctttaagaaatgcagcatatgattcaggttcagaatgtgactatgaattcaatgcaatagaaaaaatatatacaggcagagctgaatttccacatagtaaagcatattatcttgatgaaaaatattcaggagaaaacatagcggataagctcgcaaaaataagaaagctgatgaaaaaagaaggtgctgattgtcatataacagcaacgcttgatgatatatgctggttatataatataaggggaaatgatgttcattgcaatcctgttattatggcatattcatgtatatatcaggatgaagctgttttatatacagatgaggatagaatgactggtgataacggattaatactggacaagctttctaaggcaggagtaaggattgctccatatgaaaaaatatacacagatatacatgatataaaagaaaatggacaggcaaaatgcagaatgctgctggattctaagcgtataaacacacgtttgtatatgattgcggcaggtaataacaatattgatattgttgacagacagaatccagaggtactattaaagtctataaagaatagtacgcagatagataatctaagaaatgtccatattgatgatggtctggctgtaacaaggttcatattctggttaaaggaggcggtaaagaggggagaaaagctaacagagtacgatgcagctatgtaccttgataatttaagaagtaaaatacaggactatatagagcttagttttgatacaataagtgcctatgcagataatgctgccatgatgcactatcaggcagctaaagataactgtgcagtacttaaggcacaggggatgctgctggttgattctggtggacagtatttaagaggaacaacagatgtgacaagaacaatagcattaggaactgtcacagatgaaatgaaaaaatgttatacattgacacttaaaggaatgctgaatcttgccaatacacattttctatatggatgtacaggctataatcttgatattatggcaagagcaccgttgtgggagcagaatatagactacagatgtggaactggccatggaataggttatcttttaaatgtgcatgaagcaccgaatggttttagatggaaacatatacagggagtaaacgatcttgcagtgttgcaggaaggcatggtaacatcagatgagcctggggtatatgtagaaggacagtttggcataagaatagaaaacgagttgttaactgttaaagataaacaaaacgaatatggtacatggcttaaattcgatatgcttactgcagtaccagtagagcttgaacttgtagatgtgaaatatctgaatgaaaaggataaggagcagctgaatggatatcacaagtgggtatatgatacattaagtccatatatgcagggacatgagcttgaattattaaaagaaagcacaagaaaattataataaagaaagagagacggactgtatggatataaaagaattcaggaataataacaacagagaaggtaagaaacgcccggaatatcctgatgagaaagatggtacagttaattacaaaatatatgcggttataggtattattgctgttgttttagcagctgcaattgccatgtttataaatattaacagattcgatattaagaaatatataaagcccatatataccggtgctaacggatatgcatcagtaaggtttgacatagatgaggccggtcttgaaaaaaagctttcaggtaagaatcctgatggtgatacacagtattatgtcagaaaatttattgaatctatatcggtacatacagataatacagatataaagaatggagatatagtaaaggtatcaatagattataacgcattatatgctgataaggtgaaggcatatataccacatagtgaatatacatataaggcgagtggtataacagatggggctgtagttgatatatatgcaagaatcaatgttgcatttacaggtataagtcccgatgccatggttctggtaaataatgaatgggaagatgattatcttaaaacattaacattttcagtaaataaagcgaatggcataacacttggggatacaattaaagttacatgtgaccagccatatgaagaacttgccagacatgggataatagcccgttcaatggatatgagttatacagctgatatgttaagctcatattgtgagttaaaagaagatattgataaaactgttataaatacaatatattcagaaataacggatactatcaggaaagaaacggctgatgcaacatacagaatgctttttgcggcaacaggaaatacagaatatctttatcatcttaatgaggaacaggcagataacattaaaatagaagcagcatatttccttgataaaaatgatggagaaagtaacaatactgataaatcaggaaatattataagaaactatatagttgttgaagcttcggcagatatcagcgataatgagggcagcgagaaagtttattttatgtttgtatacaataatgcatatgttacaattaatggtacatttaatatagcacatgataatccacagaaaagatttgcgtgtgctataaatgaggaaaaattgtatgatgaatatgtaggtgacttgaaaaataactatacaattgataaaataaagtgagtatgtaataaggagctataaacgggatgatttacagaaaaaaagtacgactgggtgatttgcttgttcaaaagggaatcataacagaggaacagcttagtgaagctttaaagcagcagaaagaaaagaaactcatgcttggagagatgatagtttccatgggttttgcctcacagagccagattaatgatgtgctgtgtgaacatcttaatattgactttgtggatatgagagaggaagaacctgatccacaggtattatcattattagatgaatctattatgagaaaatatacacttgttcctttaaggcatgacaacaataatgccggagctcttcaggtagctatggcagatcctatgaatatacttgctatggatgatatcaatattataacaggtatgcaggtagttccaatccttgccaatgcacaggatattaatgcttttcttgacaaggcgtttggacagcagcaggcacagaatatcgttgagttatataagagagagcagggggataataacaaagaggctgaaaaggaaaataatgccagaagagaagaaattgagaatgcgcctatagttgttcttattaacaatattatagagcaggcagtaagacagcgtgcaagtgatatccatatagagcctatggaaaaaacagtaagggtacgatatagaatagatggtaatcttaaagagataatgaaatatgataatgctcttcttggagctattacaactcgtcttaagattatgtctggcatggatatttctgaaaaacgtaaaccacaggatggacgtataacaacaacagtagatagaagagaatacgatatccgagtttctaatctgcctacggtgtatggcgaaaaggttgttatgagaattgcgtcaaaagaaggatttaatgttgatatatccaagcttggacttacagaaagagatagaaaggtatttcaggatatattaaggaatccacatgggattatacttgttacaggacctactggtagtggtaagtcaacaacattgtatacagcgttaagcgaacttaatacagaggatgttaatattatcacagttgaagatcctgtagaagccaatatagatggtattaatcaggttcaggttaatacaaaggctaatcttacatttgcgtcggcacttcgttctatattaagacaggatccggacataatcatgataggtgaaatccgagattcagaaacagccgaaattgcggtaagagcttctattacaggacatcttgttgtaagtaccctgcatacaaacagcactgcaagttctgtagcaagacttgaggacatgggtgttgaatcataccttatagcagattcaatggttggtattatagcacagagactagtgagaagattgtgtgaatgtaagaaaccaaaggaggcaacagttgaagaaaaacagctccttggtgttgatacagataagtcatgtactatatacgaaccatgtggctgcaagctgtgtaataatacaggatactatggcagaatgggtatatatgaaataatgaagatatcccctgctattaaaagacttatatctaaaaatgcagatgctgaggatattaagaatcaggccgttaaggaaggcatgaatacactgaagatggcagcagccaatggggtaaaagaaggtataacatctattgcagagatgattaaggcaacatacgaggctgaggaggaagagaaaaagtgattacagtagaacagctgcttatgacagcaaaagaacagggagcatcagatgtacacattacagttggtgtaccacctaagatgagagtgaatggagaattgcttgatcttgattatccaagacttatgcctgatgattgcgaaaagatagtattaagcatcatgaacgaaagacagcttgcgatgtttaaagaaaatggtgagttggatttttcattttcaataccacaggtaggacgttacagagtaaatgtattcagacagagaggctctgtagcatgtgcaatgcgtattgtaggtactgaggttcctaagccagagcagcttggagtgccacagtcagttatagatctttatgataagaagaggggacttgtgcttgtcacaggacctactggaagtggtaagtcaacaacattagcttcgcttatcgacagaataaatgatgaaagaaatgcacatgtcataacgttggaggatcctatagagtatctgcattcacatagaaaatcaatgattaaccaaagagaaatcggtatagatacacagtcatatgctaaagcactaagatcagcattaagagaagatcctgatgttattcttgttggggagatgagagatcttgaaactatatctacagctataacggctgctgagacaggacatcttgtattttcaacactccatacaataggagcagcagcgacaattgacagaataatagatgtgttcccaccacatcaacagcagcagataagagtacagctggctactgtgcttgaagcagttatatcacagcagcttgttccgcttga

SEQ ID NO: 422 - DNA, 14880 bp, Unknown
  gut microbiota DNA sequence
aagaagggaagagtggctgcttttgaggttatgcatggaacggttgccataaagaatcttataagagaaggaaagacacaccagataacaggaataatccaaacaagtaagaaaaatggaatggtaactatggatgatgcgcttcttgaactgtatgacaaaggttatataagtgcccagaatgcaatcagcttctcgcaggatacatcttacgtagaaaaacgagtaaacataatataatgagcacaaaagaaaagtaagcggctgtcttgtaatataaaaagcaggtttcatgttggaaacctgcttttataatactatagacagctgtcatagcatataaatattcttataatcagataactgacaaatattgattaaacacgtgagatatattcacctgttcttgtatcaatcttaattgtatctccctggttaacgaataatggaactaaaatcttagcacctgtttcaaggatagctggcttagtagcaccagtagctgtatcacccttaacacctggttcagactctgtaatctgaagttctacagtgataggtggttcgatagagaatacattaccattgtgtgagcaaagcttaaccatttcgttttccttaacgaacttaagtgaatcgccaacattctcagctgataaagcaatctgctcgaatgtttcagtatccatgaagttgtaaagatctccatcagagtaaagatactgatattctctcttctcaatatgagcaagatcaaacttttctgtaggtctgaaagacttttctacaacaccaccacttacgatgttctttaacttagttctaacgaaagcagcacccttaccaggctttacatgctggaattcgataatctgccaaatgttattatccatctgaattgttaaaccattcttaaaatctcctgcgcttaccattctttggtatacctcctaattatcataactacttaccattctataataaaaaggcgagtttggcaactgttttttgagtatattagctcaaaattatttagttgtgaaggtagcacatactgtgtcgtcagagtttacagcagttattcctgatatatcaacatggtctgcgtggcatgcattgtcttcgttatatatgcagttatgtgcggcacattttattgaaaggttaagctttggtgagccacaagagttgctgcttgtattttccttgtgctcaaagcttgtgcagcatgtttcatcacaagaacatgcgtcttctcctttgatatcaataccgctaaggcagcagcatttgtctgagttgtgggaacaagtagttgcattacagcttaagttagtcataaaaaacctcctgttaataataataatacactctttaattaagagatgcatttattattattaacaggaggcagaaaattatgtcctatgaattaaagataattgttaaagtttatttaataagactaaaagctattttggatttttcgccactgtagtagcggaacataaccttggctatgattttctcttttttaacgaaagtgttaacccagtatctggaatccttggagttgttacggttgtcgccaagcataaaataacagccttcaggaacaatataagtatatgtttcaccatcatcaaagatgtaatccttgatataaggttcatcaagctcatctccgttgatatatacccgtccaccttttatctgtacaatatcgtttggaagaccgattatacgtttgacataattctgggattcgtcatctggaaacttgaatatgattatatctccacgttcaggttctgagaatttatatgaaagcctgaaaccgaataatctgtcgccttcccatatagtatcacgcatggaaccagatggaacctcagcgttgattattatgaaattcgtaaatataagagcaaatatagcagcaaaggctactattttaaagaaactaaaggcttctgacaaaataaagcttacaagtccctgtgaattatttttctggctggaagcttttgaatcatatttgttataattacgattgatggaataatcatcatctgaatcgttgtaagaatcagcatattcatcatcgctatcataatactcatcatcattaccatcatagttatcatcttcaaaatctataaaaccataatcttcatcatcatcttctggtgtaaaataattattattgtttgacatatatttccccattctggtgcgtagtaaaaagtcatatgaatttcattaaaataaccccaccttgcttgaaacagatggggttatctgaaatactaagcacaatttaatatatgcttatataatatgttatattaagttattttgcaagtaattccataatcttattacttctttgtataaatgcagtcatctgtgcaggagcaagaggtgcatggcttataagagcaagatcatataactgttggcagatgatgtcagtattttcaccatccttgtgctctacgatgtattttacaagctcattgttggcgttaagaacaagtgtctgtccgtttgaaccaaacatagctggatccataccagacataccatacattttcatcatatcctgcatacgtctgtcctgttcagaaagagtaatcatagaagatacagatgcatccttaagtttttcaaccttgatatttatattatcgttattaagagctttcttgaaagcagcagtaagagcttctgtagtatcctttaactcatcttcgttagtttcttctttgaatatatctgaaagatctgtatcaattcttgcaaacttaagaccttcattcttaccttcaagatgagtgatgaatggctggtcaatattatgggtaagaatgatagcatccatattctctttcttaaacatattgatatactggctctgttccttttcatcagttacatagaatactgtattttcatgtttttctttgttagcttcaagataatccttaagagttacatacttaccttcaagattcttaaagataatataatcattcatcttctcagcgaacttttcatcctttaagcagccaaacttgataaatggattgatatcatcccagtacttttcatagttttcacggtctgttttgcacataccagtaagcttgtcagcaacctttttagtgatgtaatcagatatcttcttaacaaaaccatcattctgaagagcagaacgcgaaacattaagaggaaggtctggacagtcaataacaccctttaataaaagaagaaattccggaataacttctttgatgttatcagcaacgaatacctgattattataaagttttatagttccttcaatagattcatactcagtattaatcttagggaagtagagtataccttttaagttgaaaggatagtccatgttaaggtggatccagaataaaggttccttataatcattaaataccttgcggtagaattccttgtattcatcagctgtgcattcattaggatgctttgtccagagaggatgtatatcattgagtgcaactggtctttttacaatcttagccatctttttggctggaaccttttcaactgtttccttagttccatcttctttttcaacctcttcagtaacagcatctttaataaatgtgtcaaggacagtatccttttctgtaacctcatcttcagggatttcctctgttaactgaccagcatcttcgttagttaagaagattggtataggcataaatgaacagtacttttctacaacttcacgagccttgtattcatttgcaaattcatagctgtcttcattaaggtaaagtgtgatagtagtaccaggtgctgtggctgtaccatcagccatatcatattctgtaccaccgtcacattcccagtgaacagccttagaaccttccttgaaagaaagagtatcaatagtaaccttatcagctaccataaatgctgaataaaaaccgagtccgaagtggcctataatctggtcgtcattagccttatccttgtacttttcaagaaaagcttcggcaccagagaaagctatctggttgatgtactgttcaacctcatcagaagtcatacctataccattatcaataatcttaattgtcttgttattagcgcttactttaacatctatcttatattcaatatcctcaggtgcttcatattcaccaatcatatcaagcttctttaacttagtgatggcatcgcagccgttagatataagttctctgtaaaaaatgtcgtgatcagaatacatccactttttgataatagggaaaatattatcactgttaattgataaactaccatgtgtattagccataattaaattctccaatctgcgtaatatacgcctaaatctgatatttatatactacggtttatattagtatcaaagtctggggcttttgaccccgacatcatcatatatgcccgcagcagttttattgcataaaagcaatttcataatatgtagtttaatattctgttaaaaggaagtcaagaagaaattagcactcaaaactggtgagtgctaataaaagagccgcaaacccagtaaaatcaagggttccggaaaatattaaattaatataaaaagttatgaatacagctttgcatagaagctttttcatagaagaatgtttttatattgtttcttcaaaatcaagtccgttatcaataaggaaatttcttatgtatgaatcaaaagaagagtcaagtgttttgtcaaggctgaagatatttaaagatgttcctgtaatgatatctgcatgcccatcctgatattttatattgataaaaagtccattgatgttatcatatgaaagtaaagtctctgaatcattaagaagctttacagtagcactggatgacaaaagcattactatcttcatagatgatggaactttgctgcccttaataagactaaagcagtatggcttttgtacaagccaggaggtgtattttttttcatcttcatcaagttctgcccattcctcatctgagtagaaggaatggttaatcttcccttcaatagaatgcagacaggaagtgttgatagaagcttctgataacaggaagttatcaaaggtatccttaacaagaagatgtgacataaattttctggtatctttaattctaagtgaaatcatgtaataatctccaatctgtatttttgccccagttaattatactatgctttcttaagtatttcactaatattttattgaaaagtcatgagcgaaaatgtcaccaggttttttcaagcacatcgacaagcttaaatagcagggtggatataatacatagtataacaatactcatagaaacataagtcatcttaaatacctgtgagccatatattataagatatccaagaccatggctggcagcaaggaattcacctatgataacacctacaagacaaagtccgatattgacctttgtgttacttattatgatttttttagagccgggaagtatcagcttagtaaggatatcttttttggtgccgccaagtgtctttatgagtataatcttttctttatctgtttcaagaaaacctgtatatatgtttatgatcattccgaatatcgcaacagatatcgcagtgattataatagctttcatgttatttccaagccatacaataatcattggggccagtgctgacttaggaagactgttaagtacaataaggtatggttcaagacaatcagaaagaccgcgccataaccatagtatgatggcagttccaagtcccaaaactattataagaaaaaaagagagaaaagtttcaaaaagagttacaaatatatgcatgaatatactgccatctttagccatatatataaatgtgttaagaattcttgatggtgaactgaaaataaatggattaattacgccggttgctgcagatatttcccaaagtgcaataaaacctgcaagaataaataaacgtacaaaagttataattgcatgataatgtttttgttgtcttatataggtctgccgttgcagactaagattattaaaagaagtttttttagtcattggatttcctcccatatatcattaaaatagcctgcgaattcaggagcctggcgggatgtaaaaggtgtcctgtcaggtatggaaaaatgtatatctatgatttttttgattgttgcaggacgctgtgaaagaataacaacctgatcgcccatagatatagcctcagatatatcatgggttacaagcaatgctgtttttttctgttctttaataatacttccgatatcatctgaaacctctaaacgtgtctgataatcaagtgctgagaaaggctcatcaagaagaaggatatctggattcagtgcaagcgttcttataagggcagcacgctggcgcatacctccggataattcgctcgggtgaacattcctgaactgatatagaccatattcttttagcatattggcgatatcagcaagatgtttttcatcctttaagtggttgatttcaagtccaagagttacgttggcatatacagttctccattcaaaaagagtatccttttgtggcatgaaacctatatgctttatataagaatcgtctttgttatacgctgatgatactatttcgcctttatccggttttagtaaaccacatattatagaaagaagggttgatttaccacagcctgaaggaccaacaatagatacgaaagagccgggtgcaatatccaggcagatatcggtaagtgcaggtatttcagctttaggtgtattataagagtaagatatatgttttagcgaaagaagaggtgcggttttattattttgtgtagaaacgttttcataaatatccaagattgcctccgacatataatatattactataatttatgcatacgttggcagaattgttacagttaaagagcagggcagattttttaaactgtattgcaaataaacagattaaggatataatgtaaggagcaggtaattctgtaggatacggatctgcatgaaaaacaagcaaaaaggaaaatatattatttagggaaaatacattatttaatgaggaagttgtatgacaaagttagaagaaatattatcatatataaaaggtaaaagtgtatatgtacagatgcataattttccagatccagatgctatagcaagcgcgtatggcatgaagaagcttcttgaggctgagggaatcagtgctgagatagtatataagggtaatatagaaaaaacagttacatctaagatggtatctcttcttaatatagatatattggagattaattgtgcagaggagcttgatgctgaacgggaagtcattatagttgatgcacagaagggaaacgctaatatagttgacgcacattcagataaaacaatatgcatagatcatcatcccatatataattcaaacaagtatgtattttcagatataagaccagatgttggagcctgtgcatcaataatagcttcctattatatggaaaataatataaatatagatgttcatatggctacggcgcttctatatggaatcaaggttgatacagctgatatgaaaagaggagtgacacagcttgatcttgatatgttttatagtctatataatatggccgaccataaagtacttaacaagcttgatacgagtgtaagacagtatgatgatcttaaggcatatgcatatgctatagccaatcttgatgtaaaaaaagatgcctgttttgcaagtacaggagataattgccaggaatcactcatagcatctatatgtgattttataatgtcgctggatggtatagattttgctgtaacatactcagctaaaaaagaaggtgttaagctgtctataagaagcagtggtgtgtatgatgcgggacgtatatctaataatgcacttaaaagcataggcaatggtggcggacatgaacatatggctggtggctttattagttattccagtcttgataacagggatgcatcatatataagaaaagttatagaggataagtttttagaagaattaaaaggatagattaaaagatctggttaatattgtgaagggttcaaggccgttttcctgcttaagaactgtcttatgcaggcttagaccttttgccccttgtaatcatgtttaatcatgctatgtggaaatatattttttcatattttttaatgcacatttttccagacggcttacttgtgcctgtgatatgccgatttcagatgcgatttccatctgtgttttgtattcatagaaccgcatttttataatctgttgttcccggctgtcaagctttctatatgcatcgtttagtgcaagatgtgtaacccagctgtcttcgccatctttagaatcttttagctggtctatgacgtagagagtatcctgtccttcgttaaaaaccggttcatataaagatacggttggagaaactgcttcaagtgctatgactatgtcctccttagatacacctatttcaccagcgatttcggatatggttggttcatgttgatttttctttaataactgttctttagtgtatatagctttatatgccatatctttaagactgcggcttacacggatggcactgttatcacgaagatatctttttatctcacctatgatcattggaactgcataagttgaaaactgtacaccctgtcctaagtcgaaattatctatggcttttattaatccaatacatccaatctggaataagtcatccatattttcgttactgttagagaatcttccaacaatgcttaggacaagccgaagattacctttgatgaaagcttcacgtgcgctgttgtcgcctgccttgatttttgtaaggagttcttttttatcttttgcactaagcagcggcaaatccttagtatttacaccacatatggtaactcttacacctgccatgaatattcctcctaaagaatttgcgaacatttagctttagttacatgagtatcctggttaatcgtgatgctttgttcgcctatagttaaatcattgccagcaaaagaatttttatacgatatgtttcataaatgtttgctgccttcatataaatgcctattggtgaatgtttattgaataatagttttgtaaatctttattggataatagtttttgacagaatcattgctctgggatataattattttaactatatatttacatggaacgatgattaaatataagataaaagctgcttgggaggtttaactgctatgaagtgtccttattgtggaaaagagaatacaagagttattgattcaagacctacagatgatagttcaatcagaagaaggagacagtgtgatgaatgtggcaaaagatttaccacatatgaaaagattgaaacattgcctcttattgtagttaagaaagacaataacagagaaccttatgacagagaaaaaatcattgcaggtattgtaagatcgtgccacaaaaggcctgtatctatggcacaggtgaatgaaatggtagatgacattgaaagccagatattcaatatgggggaaaaagaagtgccaacaaccacgataggggctatagttatggacaagcttaagaatgttgatgaagtagcatatgtaagatttgcttctgtgtatagagaatttaaggatgttaatacatttatggatgaaataaagaaaatccttaacaattaataataaagctgagtgaaaatgaggattgatatgttagaaagattttaccctgatatgtatatagattctgtatatgatatagattataagggattatatgataaaggatacagagggattatattcgatgttgataatacacttgttgaacatggtgcacctgtaactaaaagagctaaggaactttttgaagagttaaggaatataggttatgacacatgtatcatatcaaacaacaaagaatatcgtgttaagccgcttgcagatgaagttgcttcaaagtatgtaagtaaagcagataagccatcacctaagaattatataaaggctatggagtatatgcatacagataaagatactacgtattttgttggcgaccagctttttacagatgtatggggagctaacagggcgggcataatgtcgatacttgttaagcctatagataagcatgaggagattcagattatactgaaacgcaggcttgaatggatagttcttttcttttataaaagaagattacataagcttaataaaaagacatatagatagaaaatatttattttcaataaaatgattagaggtagtatagtgatgaatattaaaggaacaacaagagtatgtggtcttataggtaatcctgtgggacattccatatcaccagtaatacataacacgctggctgatattactaaaaccaatatggtgtatacaacatttaaggttgaaaagggggatgttgaaaaggcagttgaaggtgcatatgcacttgatatacttggacttaatgtaacagtaccacataagcaggaagtgatggatgtacttgtagatatagaccctcttgcacgtgccataggtgcagttaatacacttgtaaggacaactgacggatataaagggtacaacacagatatactcggacttaaaagggagcttgaagaggaaaacatagagcttaaaggaaataactgcataatacttggagctggtggtgcggcaagggcaatagcatttctttgtgcacaaagtggtgcagataaagtatatatgttaaacaggactgttgaaaaggcagaagatattgctgatgcggtcaatggatactttaacagggaatgtgttgtgccaatgcacatggatgattataagtcacttaaagaaaatgattatattgttattcagacaacaagtgttgggttatatcctaatgtgaatgatacagttatagaagataaagagttctataaaaagataaaggcgggagtagatataatctataacccatctacaacgaaattcatggaattatgtatgaaagcaggaaaaccggcatttaacggtcttaagatgcttttgtatcagggagtagcagcgtatgagctatggaacaatacgaaaatatcaaaggaagaagctgatatagtatacaacaaaatgaaagaggaacttggaattgaatgataatattgttcttataggatttatgggaagtggcaaaactactttcgggaagtggatatcaagaaaatatggatattcattctgtgatacagatgagtatatagaaaagaaagaaaaaacaacgattaatgatatatttgcatcaaaaggggaggcagcattcagggatatggaaacagaaactgtaaaggaattcgctgattccctgaaaaaatgtgttgtttcggtaggtggtggccttccggtgcgaaaggaaaatagagaaatcttaaagaatatcggaactgttgtataccttaaggcatcagaggaggagctgtgtaaaaggcttagcagagataatacaaggccgcttcttaaaggtggtaatcttaaggaaaaaatacatacgcttatgcagcaaagagaagacatatatatggatgccgcagatgtagtgattaatacagaaaatgtttcttttggacatatgtatgaagagatcatgtcacaaaaaatgcgataatacgcagtgcatacagcgcttttttagggctttatcacaagattaatgagttataaggagaacattaaaatgaaaattttagttatgaatggtcctaatattaattttcttggaataagggaaaaaggaatatatggaacagataattatgaaacactggtaaacatgattgagaataaagcaaaggagcttggggtagaagtcgaagtattccagagtaatcatgagggagctgttatagataagattcaggaagcttattatacggatgttgacggaatagttatcaacccgggagcatttactcattatagttatgcagtaagggatgcacttgcatcagtagcttctattcctaagatagaggtgcacatatctaatgtacatacaagagaagagttcagacatacatctgttactgttcctgtatgcaatggacaggttgtaggacttggacttaaagggtatttatatgctatggaagctgttgtggatatggttaagtgcaaagcaaagcagtaatgctgatacattttacgatgtgaacaacaaaatatttaataaagatatttgatgttacacttggtgcagcataatgctaatcaggctgtgattctggcaaaagtcaggatcatagccttttttatacaggtcttggaatttaaacttatataaaagaaaatcatcatggatgattactaagaatgtgattgttattagtaaaaaaagggtgtataatgtagcaacgaataacaattaggagaaagaaatatgaataagcaggaagcaataagtattttaaaggagcataatcaggagcatgttattaaaagattagaggcattaggagatgatgcagctaaaaagcttatatcacaggttgccatgattgactggaaggtagtagagagcattaatgataaggcagaggataaaggagaggctaagaagattgagccattagctgcagtagagattaacgatataaagaataataaggaaaagtatactgcaaaaggtgtagaggctataaaaaatggcaaggtagcagcagtgcttcttgcaggtggacagggaacaagattaggacttgataagcctaagggaactcttaatgtgggagttaataaggatttattcctttttggacagctcatacataatcttatggatgttgttaaccagacaggagcatgggttccactttatatcatgacaagtgataaaaacaataaagatacagtagagttctttgaagaacataattattttggatatgataaggactatgttaaattcttcatacagagcatggttccatcagttgattacaacggaaagttatatatggagagcacagacagtcttgctatgtcaccaaatggtaacggaggctggttcttatcattaatagcagctggacttgacaaggatatgcaggataagggtgttgaatacgttaacgtatttgcagttgataatatattacaaagaatagctgatccagcctttataggagcaactatacttgcaggggctgagtgtggttcaaaggtagtaagaaaatgtgagccggaagaaaaggttggtgttatgtgcagggtaaacggacatccatctatcatcgagtattatgagatgtcagaagagcttgccagcttaagaagagaagatggagagcttacttatggctttggtgttattcttaactatcttttcagctttaagaagcttgtagagatatctaacaggaatcttcctttacatatagtagagaagaagattccatatatagatgagaacgataactatatcaagccagaaactcctaacggatataagtttgaaacacttgtacttgatatggtagagatgatggatgactgtgtaccatatgaggttgaaagaagctatgaattcgcacctataaagaacaagactggaaaggactcgctggaaagtgcaagggaacttcttaaggttaatggaattgaattctaagagtgtaaagattagttgaattatagtatatggaggaaaatatggttgttttattagcaggcggagccggatatattggctcacatacagcagtagagcttattaatgcaggtcatgaagttgtcatcgtagatgactatagtaacagctgtcctgaatctataaagagagttgaagaaataacaggaaaaagcatagtatcttatgaagcagatgttaaggataaagctgcactccgtaagatatttgcagagaatgatatagactgcgtgatacatttcgcaggacttaaggcagttggagagtctacaagacttccagcaaagtattatcgtaacaacattgatactactctttcacttatagagtgtatgaaagaagctggtgttacaaagatagtattctcgtcttctgcaacagtatatggtgaccagaagccaccttatgtagaaactatgcctaagggagaatgttctaatccatatggctggacaaagtctatgatggagcagatacttacagactgtgccaaggcagatccagagctcacagttgtattgttacgttactttaacccaatcggagcacattcatctggcaagattggtgaagacccacagggtattcctaacaatcttatgccatatgtatcacaggttgcagctggagtaagagagcagcttactatattcggaggggattatcctacaccggatggaacatgcagaagggactatatacatgttgttgatttagcatgtggtcatgttaaggcagttgaatatgcagattcacataaaggggttgagatatttaacttaggaacaggaacaccatatagtgtacttgagatagtgcatgcttttgagaagtctactggcgttaagttaaactacaggataggtgagagacgtccgggagaccttcctgattcatgggcagatgctgctaaggctaaggagattcttggctgggaagcatctaaaacacttgaggatatgtgcagggattcatggaactggcagagtcataatccacatggatacagggattaaaaattaaaagaattcgttaagacattgcaataagacttgtagtgaacatataataaataataattattatctattatatgtttgccgacaagtctttttaatatgacttttggtttttgatgatatatacgtagta

SEQ ID NO: 423 - DNA, 5371 bp, Unknown
  gut microbiota DNA sequence
aacaaagagagttattcttgaaggtaagagtacgaaagtgcttgacagaatacggatgtataatatagaatatttaatgtgcagttttgaaggagcaatctttcttacttaatagagatatctaataagtattcctcgatagctcaatggtagagcactcggctgttaaccgagttgttgtaggttcgagccctactcggggagctgtaagaatgggtgtgaggtattctcgaattcattcttatttttataaaaatataaggctccatggtcaagcggttaagacaccaccctttcacggtggtatcaggggttcaaatccccttggagtcatcagcagaataaaaagtggtttaaattgccgacatggctcaatggcagagcagctgatttgtaatcagcaggttgttggttcgactccgactgtcggctctttggacctttagctcagttggttagagcaaccggctcataaccggtcggtcctgggttcgagtccccgaaggtccattttctttttattctgcttattatggcctggtggctcagctggttagagcgccgccctgtcacggcggaggtcgtgggttcgatccccatccgggtcgcttacaattgcatattgtaaacatttaatgtcatatgggatcttagctcagctgggagagcatctgccttacaagcagagggtcacaggttcgagccctgtaggtcccatcctttattaatttatattaatataggccggtgtggcggaactggcagacgcacaggacttaaaatcctgcgggacttatactcccatacgggttcgattcccgttgccggcattggtgtgtttacatcatgttagtacgtgtagctcagctggatagagcgtctggctacggaccagaaggccgcgagttcgaatcttgtcacgtacataagccttacatatcatgtaaggctttttttgttactaaataatatatcaatgctacttattgtaaataaacagtataacaaatactataaatatagcaatttatatttttgacatttacatcataataacattttttttagaaaatgaaatatgttcaaaatattcttggtataacgtgttggttttaataaaatagtgtataaaataatgcctactaagccatactattattgaaaaatcaataaggagggcattattatgtcatataattcatcaaataatgaatctaacacttataacgaatcagctaaggcatcaaagaattcttacaatacgtcaaagaacagcacgaagaattcgtcaaagaattcatcaaaaaacagttcaaagaattcatcaaaaaattcttataatcagtcatcagatagcacagattgctactagatggcaggctgcatatgcagcctacatatttttttggcaatatttttggctgaatgtattataagttgatttatacagaagttatttatgttagaaattaattatatttcctaagtatccatcataaaatattataaaaatgcgtaagaaatatgatatatgagatgtgaattaattggcccaggaagacttgattattatataaacaatccatatactaatataattgatgtaaggccagaggatatgtataaaaagcttcatataacaggtgcttataattggccatttttaaagttaaatacatttgaaggatataaaaaattttcacaatattttgcggacaaaagggtgatatatgttatatactgtgatatgggtgtaaatagtatgatagcaggtaataatctggcagctatgggatatagggtaaaatcacttgtaggtggtatatctggatataaaggaaaagaacttgttacatctgacaattaataattaataatgcagtttaataacaatgattaactataaagaataaagaaatggagaaaagaatgatagatacatatgaattgattgctccgtgtcattttggattggagtcggtgcttaaaagagaaatatatgatcttggttatgatatttcgaaggtagaggatggtaaagtaacatttataggtgatgcggatgcaatagccagagccaatatatttttaagatcagctgaaagagtgttgcttaagataggcgaatttaaggcgacaacatttacagaattatttgataatgtaaatatgctggaatgggagcattttatacctgaaaatggaaggttctgggtaacaaaggctaattcaattaacagtaagttatttagttcatcagatatccagtctattgtaaaaaaagctatagttgaaagacttaagcagaaatactctgtaagctggtttaaagaggatggagatagttatcctataagggtaagcataatgaaagacgttgtaacagtttcacttgatacatcgggggattctcttcataaaagaggttacagaccagcagcaggaaaggctccaatatctgaaacacttgctgcagctcttataatgcttacaccatggaaaccagatagaatattaatagatcctttctgtggaagtggaacatttcctatagaggcagccatgattgcagcaaatattgcaccaggtatgaatagacgctttacatctttacgatggactaatataataaatagtagattatgggatgatgccgtagaagaagcagaagacttaattaatttaagtgttgatacagatattcagggctttgatattgatgataatgttataaagatagcaagaagtaatgctgtaaatgctggtgttgataagcttatacattttcagtcaagaagtgtagctgaactcagccatcataagaagtatgggtttataataacgaatcctccatatggtgaaagattagaggataaagaaacacttccagcaatatattctgcatttggaaagcagtatgcaaagcttgattcatggtcagcatatatgattacttcatatgatgatgcagagaagtattttggacgtaaagcggataagaaccgtaagatatataatggtatgctaaaaacatatttttattcatttatggggcctaagccaccaaagaaaggttgattatgaaaagaataatacttgcatctaataataaagataagattaaggaagtaaaagagatacttacgggatatgacatcatttctataaaagaagctggagtcaatgttgatgttgaggaaaatggaacaacatttgaagaaaatgcacttataaaagcgagagctattatgaagattacaggtgaggtcactatggctgatgattccggacttgagatagactatcttaataaggaaccaggtgtatattcagcaagatatatgggacatgatacgtcgtatgatataaaaaatgcagctctgctcaaaagacttgaaggagttgaaggaaatgatagaagtggacgttttgtatgtgcaatagcggtatgttttccagatggaagagagatagttaaaagaggaactatggaaggccttatagcaaaggagataaaaggaaacaatgggtttggatatgaccctattgtatatcttcctgagtatggaaaaacttcggcagaacttgatccagaagagaagaacaggattagtcatagaggaaaagcattggctttgataaaagaagtactggataagtcggaggatatatatgcagaggataatgataataagtgatacgcacagaaggcatggtaatttttcacaggctctttacaatgaaggaaatatagatatgcttatacatcttggtgatgttgaaggtgaagaagatattataagtggaatggctggctgtgaatgtatatttatcgctggaaataacgattttttttctccacttgatagagaaagggaattagagatagctggtaagaagatatggttgacacatggacataattattatgtttcgcttgatcttaaagttataaaagatgaagctagagcaagaggcatggatattgttatgttcgggcatacacatcgaccagtaatagaagtggaggatgatataactcttattaatccaggaagcatatcatatccaagacaagcagatggtatacctacatatattatgttagaaattgatgataataatgaatttagttttgaacttaaaaatgtgtaatggttttccgaaacagtataatgtcatggtatgtggatttaaagttgtggatttaaagttgtgggtttagagttttgaattcaaagttgtgagtttaaagttttgagttcaaagtgaaattttatgttgattgaaagtttataaaaaattaataattaaacattggtgcttctcactcttaaaacatatatcagatgatttttttgtagcatttttagaaaatcgagatagaaatacatgataaattatcaggaaaaaatatgataaaaattaaaagttttcaattttttaaaaaaatataaggtataataagtacggaaaagccagtaaaatagcggcttcgcaaaggttgtaaaaaaagtttaaaaaaattacaaaaaagtgttgacataatgcacatattagcatataatctatcttgttgttgcggtacacgagttaagaacttaagaaaacaacaacaagataaaaccttccggggtgtggctcagcttggctagagcgcttgatttgggatcaagaggtcgcaggttcgaatcctgtcaccccgacttacaacttaatataacatgcgggtgtagttcaatggtagaacactagccttccaagctagatacgtgggttcgattcccatcacccgctttgtgtgttcgtagctcagctggatagagcaacggccttctaagccgtgggtcgggggttcgaatcccttcgggcacactttttttatgttatggtgggtatagcacagctggttagcgcgtcagattgtggctctgaaggtccagggttcgaatccctgtatccacccttatttaactaatgggctatcgccaagcggtaaggcacagggttttgatccctgcatcacgctggttcgaatccagctagcccagctggattggataggaatcctattagctaaatagctttaaagattatatatgggctcatagctcagttggtagagcactagacttttaatctaggtgtcccgggttcgaaccccggtgggctcattgcaaagggaatggttgaaataccgttcccttctttttttgccatagtggactaggggtcaaacgggtgtcatagtctgagaatggggaaagtgtgattttaatagaaaaggtataaaaagtctgcaaagccgcatagatactgggagaatcgttggtggtgaaattgggcacttttgtggcactttgtgtcaggg

SEQ ID NO: 424 - DNA, 10045 bp, Unknown
  gut microbiota DNA sequence
atttcaagatatagagagcagaaagctatgcaggctaaaaaatacagtttgcatttttattggctgcgtagtatcatttaatggagtattatttttcgacagagcaataaatgcagtttattgttaatgtatataaaatattacttatattaggtttaatagtttaatgatagatggaggcacatatgaagttcatagcaattggcgaattgatgttaagattatcaccacctaactatgagaagatagttacaacccacaatttcatcgttaattatggtggagcagaggcgaatgtagcggtttccttagctaaccttggtgttgattcaacattttttactgtattacctaatacagatcttggtaagtcttgtattaactaccttaaggctaatgatgtacatactaagcatattattaaggctgacggaagaatgggactttactatcttgaggaaggcgtttcagtaagaccttcacaggtaatatatgatagaggaagttcagcatttgctgaatatgattataaggatgtagactttgagaatattttaaaggattacgactggttacacttaagtggcatcacacctgcactttcatataactgccgccgtcttatagataaggctatcaaggcagctaagaagcttgggcttacagtaagctttgatcctaacttcagaagtacattatggtcttttgagactgcaagggatgtactcagcaaatatcttccatatgtagatgtacttataggtattgagcctatccatgtatacaatgcagatggtacagatgttaaggatggtcttactatggacccatcatttgaggatatggacagagtgtttaaggctattgatgagcagtaccatatgaaggcaattgcaagaacagtacgttatgttcattcaggaagtaataactctcttaaggctttctactatgctgacggaaagacttatgaaagcaagacactcaactttgagattgttgaccgtgttggtggtggagatgcattctcttctggtcttatctatgctcttatgcagaatgactggaagcacgaagatatcgtcaacttcgcagtagcttcttcagtaatgaagcacgctatccgcggcgatactaacatcacaagcgttggccagattaagaggcttatgaataatgcatcatttgatgtacagagataatgaacgcgggtcattagtcatacagaaggaaggtctaaggaaaatcaagtacttgaataatgattttccctagaccttattcacatgagattaataacagatagattatggttaatataccggaggatatatgaaaaagataaaagaacttatgccggaggcatatgattttaatggaaagctttcattaaaacaggcgataccacttggacttcagcacgttatggcaatgtttgtaggaaatcttacaccattgcttattattacaggagcctgtggtattggagcaggaagtgagtatgcatctattcaggttgcacttttacagaatgctatgattatagcaggtattgtaacgcttatacagttattttcagtaggacctgttggaggaaaggtgcctattattatgggtacgagctcaggatttatcggagtgttcagcagtataacaaaggttatgggtggcggaatattagcctatggtgctattatgggtgcttccattataggtggtctttttgaaactgtgcttggtgcatttattaagccgttaagaagatttttcccatcagttgtaacaggaacggttgtgctttctattggattgtcacttatttcagttggtatcaattcattcggtggtggaaatggagctaaggactttggctcactagagaatctgtttctggcatttgttgtgcttgttgttatattatttgttaagcattggacaaagggatatcttagttcatcatctatactcattggaattatagttggttatattgtagcagctattatgggttgtgtgcttccacatacagcagttactgctgagggagttgaatatactaaatcatgggtacttaactggaataaggttgcagaagctaagtggattgcgattcctaagtttatgccagttaagcctgtgtttgatttaagagcaatacttcctgtgcttgttatgtttgtggtaacagcagtagaaactgttggagatatatctggtgttatggtcggtggagtaggaagagaagcgacagataaagagctttcaggcggagttatgtgtgatggtttaggttcatcgcttgcagcacttttcggtgtgcttcctaatacatcattcagccagaatgttggtcttgttgcaatgactaaggttgttaacagaattgcacttgcatctggtgcggtattccttatattatgtggtcttattcctaagcttggagccttaatatcaattatgccacagtcggtacttggtggtgctgcagttatgatgttctcatcaattattgttagtggtatccagcttattactaaggaaccgcttgatgcgagaagactttctattgtatctgttgcactgggtgtaggctatggtatgggtgtaagccctgcaattcttgcacatacaccacaggctgtacagcttatgtttggtgagtctggtattgttccagcagcatttgtagcgatattacttaatataattcttcctaaggataaagctgaggaaacagttaaagaagttgtttcagaagaagcagcaacaataaaggaaaaggctgtaactaaataaggtacagcaattagcaaggatactgggaaagacgaataaggtcatcaggagtatcaatatcaaataattcatattcatcctgtgcaggaactaaaacaacctgtgcaggatgtttttttgcaataaagcctccacccttgccctgtggaagtgtaagaagctcattataatagcacgcaggaaatattactggtgcacctgcgttttcgttgaaagcaagccggcatatcttattattattgttattattattggaataatcattattggcattgctggatttatctgcgttattacaagcaaaatgactgctgttgtagtaaataaataaaagacacagcagctgcaggcttgtcttagtgataagcggctggtctgatggaagaaataatatcccttgggtgcagcagcttttctggcagcaggtttcctttagaatatgtgaaacaccaagacgtaccatatcatttctgtaaggcatattgtgtttaatgcaatgtatatgttcccgttcacatatctgtacaagctcatcatgacgggttacggcaagagttttaccaaagctgacaaagcggcttatatttatcgcattttcaaagagagtgttgttgttaaaggcagctaaaagcttgttggtaccgaatctttttgacataccagatgccataataatgcacgaaatagagctgaaggtattatcaatatcgattaaaagtacatcagctctgcttttaatactgtcaagaaattctgtggattgttttctgatgacagctaatacgcgtgagttatcaagaagagtcctgatatgctcctgaaattcaccacaggaactttccagataaccaagctcgtcaataacaaatacactatcagcagaggtcataagatgcttcataatggcaggacaggcgcagttaataaagccatcctctacaatggtcatgttgttgccatttttagggggaacaggagtgagtgtacgcggtctgccaatcacatattcttttccatcatctataagattggatttaataacaacttctggggtgtctgttctgcggcttagcagataattgaaattgaaaaaatcagacatatccgtagtgtctttagtctggtttaaaatgctgtttaacagatatgatttgccacttccccggtctccggtaataaaaagatgctttttatctgacatcttaaaaaatgtaaagacagccagagcgtctaaataacaattatccatagaataagtcacctcatttcagtaaatgcttttataacgtatgtgtgtcctgtgtgaatagatatatatctgtagtaaaggtttatagtgccacaactacacggtgtgttttatggtggatatcggtacattcaataacattaatattatcatatataagagacagcttttcgttaataatatcaagggagtcggtatgagtattaatgctggtaagtattgttccggctttcataagaaatatattatcgcagtattccaaagcaagctcaggactatgaatacacataagtgcgcatcttccatcagatacaatgcttcttatgtgctgcataagcagatgacggttagaaaaatcaagtgcactatctggttcatcaaggagaagcagaggtgaagcctctattatggtgcgtgccagaatacataactgcttctgcccttcgcttaaagctaagaagtcggattcgtataaaccattaagtccaaccatatcaatagctttatcggcacgttttatcatatctgtggtgtagcctccaagtatgtgcatatgaggattgaagccaagcagacatacctccctgacggtcatgcttatggtaagattgtttctttggggaatgtagcttatcagctgggccttttttttaacagagaggttttcaagtaagtgttcattaagctgacattttccgttgtgctttataagtcccataatagctttaataagagaggttttaccacagccgttattgccaataacagcattaagctgtcctggcataaggtcaaagcttacgttatcaaccgcacaggtgctgccataatatacagatattccggcagcggaaaatgtagtattgaataaatcggacatcataacgcctcctttttattagctctgataagcagaatgataagcagtggagctccaagaagtgaggtaaatatactgactggcagctctgatgaggatacacttcttgccagtatatcagcaagtgtcaataaaatagctcctgtgaagccgcttgttatatatgtgaatatgtcattacgtttggtaagcagtctggcaatatgaggtgcgataagtccgataaagcttataagccctgtaacacatattattgatgatacgataagagtagcaagcattaatataataaaacgcagaattgctacatttacacctagtgatacagcttcctcttcgcttgtagagagaatgagaacctgtctgtataacatagccattataataaagccggcaagtgttgtgaggaacggaatagcaaggctgtcccttgaaataccattaaggcttcccataatccagtattcgattgaagcaagctgtttttcaggatctgcagcaagctttagaaacataagtatagtctgtgccacagaatgaatagctataccggcaagcacgatagtataactgtttctgccagggacaagataagccgtaagcagagttattatgagggctgttacagctccgataaatgcagatatggagatgactggaacagaagctgaaacggcaactattgcaagagctgcaccagcacttgcaccggaggaaacgccaacgatatcgggagaagccagagggtttttaaatataagctgatatataaaacctgatattgaaagaccaaaaccgcctataacacccataagggcacggggaagcctgagccttttaaagaccataattgacatagtatcaccagacagtaagccctttaatgtgagtgggtactgtccggtaatgacagaccatacaagtactgccagaagaagcagtacctgtatgactgataaaagtataattttgttccgataattatcaatgtgtttgaacatacatcatccttatttagcagctgtgaatccataaaagctttcatagaatttagttacacattcttcatagaaatccttagtaaccttttctggatgaagaacagaggcaatatatatgcttcctaagaagcttgctggtacaggtgaatcccaggcttctatatcaccaggaagctttacaacctttttattcttaacagcattgcagtctgcaagattggcatcatttagaacatcatctactgagtaagttgcatcggcagctattatgatgtaatcagggttccaggcaagaagctgttcatatgaaacatttgcccagtaagtatctgtgagctcagaggctgcattctttccgcctgcattggtaagtaatgtgttctgatacatcttgcttccggctgttgaaagaacagagctgttgcctgcaagatatactaaaggagtgctctcacccgcaagcttggctttattatcagctaaaaatgtatcaatggaattgttaagtgcatcagagcgtccaattgtgttagttattttaccaacaagtgttatacattccttaaggagcgttgcatcctcaggattaacaacaacagccttgataccaagactttcgagtgtatctgcagctttttttaacttcataggaaggaatacaacatcaggtgcggctgcaacacaggcttctgtgttgaattctttggctgttcccatattagggagacttacgatggatggagctgcaagcttatagatgtttcttgtattagccttagcttcaattcctacaagcttatcctttaatccaagtgcaaggagaagacttgtagagatatagtaagatgaagcaatcttttcaggtgctttttcaaaagttactgttcgtccagcctggtcggtaacagtaagagggtagcttgtgcctatctcgttgaattgggacatgacatcaaaggctgatgttgaagcagcctgtgtagtactgtcgtttgcagcagaactgccacatgctacagttgatataagcatgagcactgcaagaactaaagcggttaatcttttaaaattcttcataattatcctcatttctactttgttttaacacactcatttatgttgaacagaatatatcttatagcaacagttaaaagaagtgtgcgaatgaattttatcagattgacaaggcttttacaagtcagtatagttatattataatgtaattaagaaatggtcaggaaaaagtttaaaggttgtttaagctgtacagcgggacttttatttctggcataagtatgatcaaaatgaggagtttttatgcttaatatacagaattataagagagtagaaagtattgaagaggcctacgagcttaaccagaagaaggctaacagaattgtcggcggcatgatgtggatgcgtatgggtgataacagaatcaataccgcgattgacatgtcaggactgggacttgataagattgaagagacagatgaagaatttaagattggatgcatgacatctctaagacagttagaaaaccataagggctttaatgagtataccaatggctgcactaaggaagcactaaggcatattgttggggtgcagtttagaaatcttgcgacagttggcggaagcatatatggaagatatggattttctgatgttcttacattattaataggacttgactcatatgtggagttatataagggtggaatagtttccctaaaggagtatgcggcccagagctatgacagggatattattgtaagcattatagttaagaaaaagccagtcaagatgttttatgaggcagtaagaataacagaaacagaccttccggttcttacctgtgccgctgtaagctttagcggtttgggtgaatataatctgtgtataggtgcaagaccgggaagagctgttgttgtagaagataaggaaggtattcttaagggcggagtaaatgatgaggctatagagagcttcgccagatatgtaagggaaaatgtttctacagagagtaatatgcgtggaagtgctgaatacagaagccatctggcagaagagcttactaagagagcattaagagctgtaaataattaataattagttattgattattaatagctgcggtattatttatatagcaatgttaatgtatagatttgtttatatatcgattgattagtgtatggattggagaatatatgttagtagatattaagttaaatggaaagtcagtcaaggcagatgtggcctgcgatatgactctttatgatttcgtgagggagcatggctgttatagtgtaaaatgtggctgtgagacttctaactgcggactgtgtacggtatttcttaacgataaacctgtactttcatgttcggttcttgctgtaagagcagataaatgcagcgttacaacgcttgaaggtttacaggaggaggccgcagagttcgttacatttatagctgaccagggagcagagcagtgtggcttctgtaacccgggctttgttatgaatgctattgcactctttagggagaatccttatcctgatgaagatgagattaaggaattcctttcgggaaatctgtgcagatgttcaggatatgaaggccagttaagaggaattctggattatctcagggcaaaaaaggcgaaggaagtaaatgtagaaaataaagaaaatatagcagaggaggtgaagtaatgaagtcagttaataaagcggtaagaaaaaaggatgcaatggagctgcttcttggaaagccggtatatacagatgatattgcaccaaaggattgtcttgttgtaaagcttctgcgttcaccatatgccaacgcatatgttaaaagcattaatacagatattgcaatgaaggtacctggtatagaggcaatatatacatataaggatgttgaccagaatatgaagcgtttcacctgtgccggtcagacttatcctgagccaagtccttatgacagacttattcttgataaacacgtaagattcataggtgatccggttgctattgttgctggagtggatgaacgctgtgttgataaggcaatgaagcttattaaggtagagtatgaggtgcttgaaccagtgcttgactttactaaggcaaaggataatgagatacttgttcatccagaggataactgggaagcaatgtgtcctgtcggagctgataataaaagaaatctatgtgcacatgatgagtgcagtaatggtgatatagataaggtgcttgagagttgtgatgttgtaattgacaggacatatcacacaaaggcgtgccagcagagcatgatggagaccttcaggacattctgtacaatcgatacatatggaagacttcatgttgtaagttctacacagatagtatttcactgcagaagaatcatttcacacgcacttggaatctctccatcaaagatacgtgttacaaagcctagaataggtggtggttttggtgcaaagcagacatcggtttcagaaatatatccggcatttgtcacatggaagactaagaagccagctatgattatattctcaagggaagagtcattgtcagcttcatctccaagacatgagatgcagatgcatgtaaggctcggtgcaactaaggatggcattgtaaagggaatagatttatataccctgtcaaacacaggagcatatggtgagcatggaccaacgacagtaggtctttcaggacacaagtcaataccattatatggaaaggcggaggcattccgctttgtaagtgatgttgtatacaccaatgttatgtcagcaggggcatacagaggctatggtgccacacagggactttttgccgttgaatctgctgtaaatgagcttgctgataagcttcatatggatccttttgaaataagatttaaaaacatagttaaggagggcgatgtaatgcctgcttactatggtcaggtaaatacaagctgtgcgcttgacagatgcttagcaaaggttaaagagatgattaaatgggatgagaagtatcctatgagaaagatatctgacactaaagcacgttttgtcggaatgggtatggctatgcagggctctggtatatctggtgtgga

SEQ ID NO: 425 - DNA, 1668 bp, Unknown
  gut microbiota DNA sequence
aatgatgagggcgtgtatacaatgaatatcggtgctgctgacatgggaacaggctgtgatacaatacttgcacagattgctgcggaggtgcttgagtgcagtactgataacataagtgtatttggtgctgatactgatatatcaccttatgattcaggctcatatgcatcaagtacaacatacgttactggaaaggcagttgagaactgtgccttagagctaagaagcagaatcgaaaagcttggagctaagcttataggctgtgataagagtgaggttacatttgacggaagctgtgtaagctgcgaggctggagagcacaatggtgcatcagtaagtctttgcgatatcgcaacagcttcaatgtgtggcaatgatatagcacttacagttactaatacacatacatcacctatttctccaccaccatatatggtaggtgcagctgaggttgaggttgaccttgtcacaggtgagagcagggttgtggaatatgatgcatgtgttgactgtggaacaccagttaatcctaatcttgcaagggttcaggcagaaggcggaatccttcagggaattggtatggcaatgtctgaaaatatcacatattctgataagggaaagctttatgagaactcattcctgcaatataagataccatcaagaatggatattggacatattaatgttgagtttgaaagcagctttgaggatgctggaccatttggtgctaagtcaataggagaggttgtaattaacactccacttccggctgtgacagatgcgctaagccacgcagcaggaaagaggttctatgagctgcctataacaccggagcagattgctatggcgagagcagagaataattaggattataacacagataagatgaaatataagacggcacgatttatttctggataagggaaatagtcgtgctgtttttttgtttataaataaagtaaaatcttgaagaaacggataaattgggcgaaaatagttttgaagaaaaggtcaaattaagcaaaaataatcttgaagaaacggacaaaatgagtaaaaatagttttgaagaaaaggtcaaattaagcaaaaaacactttgaagaaatggacaaaatgaataaaaataatcttgaagaaacggtcataatgagagataagcggaaggaaaacaagaattaataaaactgttttatttaatgccatttctcataaagtagataactattttacactataaaatacaggagtaaaaattatgcctaatatattaattgtagaagatgatataaatattaataaccttctttgtgaggtgcttaggaaggcaggttatacgtgtgaacaggcattttcaggaacagaggcaaagctgcttctgaatataaaagaaaaggcttatacgcttgtactgcttgacttaatgctgcctggggcaagtggtgaggaggttttaaaagagataagaaaacatggaaggctttcggtgattgtgctgactgcaaaggatagtatagatgataaaatcggagtgctgacagatggagcagatgattatataacaaagccctttgagattagagaggtactggcacgtattcaggtgcagcttcgtcatatagaggcagaaacagagtcagaagcaaaaggcgaaacagagtcagaaaca

SEQ ID NO: 426 - DNA, 330 bp, Unknown
  gut microbiota DNA sequence
acaagcatccaattcggatttttatttactacatcctgataatgatttttctgtaattcatatgaggatgtttggcgtggatcatccgtagatacccttgcatatacagctactcgtagttttttttctgttttaaaaatatcctctggtggaagtgccggaattacttccagttcttctggatcaatacctttgtatctttgccggattctggctttctgttcatcaatattactgcttcgttcttcactttctttcatcaatagcgacatcctttatagttgatataactatcatagaatttttggattgaaaaagacataaaccatc

SEQ ID NO: 427 - DNA, 11083 bp, Unknown
  gut microbiota DNA sequence
tacaagtggtaatataacacctatagctgtctgtgcaagtgttgccccaattgttctccagttagaaagtgatgttctgtctgttgggttatctgaaattgcagatgccattgaaccataaggaatattaactcctgtgtaacatacgcttccccagagaagatatgtgaagaacatccagaatatcttaaatcccattggcattcccttaaaatatgttgcatacatcagaaatgaagcaactgcaaccggaccacacatacgtcttatccaaggagcgaacttacctttcttaccaggtctgcttctatcaacaatctgtcccattgttacatctgttatggcatcaacgaatcttgctgccatcatcataagtcctacaagtgctgctgaaactcccataacgtctgtgtagaatttaagtaaaaacattgccgataacaaaaacgtaaaatcattaccaaaatcgccaaacatatagcccagcttatcctttataccgaaaggttttacctttccattagtttctttcattgtatatcctccatttctgtacacattcttatatgcaatatatacaccttatatttttgcgttgaattcttttaaagaccgtctttaaatatttgtttgcacccctttgtgtgcttgttttctatggtcttataataacttttttatacgttttctgttattactatatttagtatttatcgtacaatttttacctgtataatttttatactaaaaattatacccttttatatttaaattatactaacatgtcagttgtgcctatattgacatgttagtatttgcattgtgacatgttagttattaatttataattgttgtagacattaaatttacgtttcatacacatatcataatttaaaaattattttacaaataataattaatagataatattttatacaatttatgttataatatgatatcggggtcaaaatcccccgactttgataatgcaatgcaaatacatagctttgggggatatacatggaatataaaatatatttagattatacaattgagcttttatcacaaataaaaattccatcctacattattgacgctccttacatatgggatagtcagattgatggtggacttagaaataacattttcacccagaatgcttataagaataatgaagaaaacttcagccagttcatcagctcctataacagggataatgctgcattatttatacatgacagcttttcatgtgaatatatacatattaagcttccagacagcacaaaaatattcatagcaggtccattttcatttgaacggttcactaaccagagaatatttgacttatgttcttacaattcagtccctacgcagtataatgagtttatgcagctttactactctgctctgccagtatttgctgatgaacgctgtattacagctattataagctgtctttgcagcaagctttggggtaataattatactattgaaaaaaaacatgtactcaataaaaattcaacccaatatatgtataaagaagaggcacctgagcctacaaaaaaatctgtcgaagctctggaaacccgctataaaaatgaagcatttcttatggaatgtatagcacatggagattacagatcaattgaaaatatggaacgtcttaactctgctgatataaaaccacgcttatctgactctatacgtgacagaaagaactttatgattatactaaatacaatctgccgtaaagctgcacagactgcatatatacatccggtacatctggatgaaatatcgcgcaaatttgcaattaaaattgaagactgcacatcaatcgcacagcttgaagtattagaaaatgaaataacaagaaaatactgtcttcttgtccagtcacactcattacggacatatagcaagcctatacagaatgtaatcaactatatatccttcaatctcacagctgatttaagccttaacgctttatcagaagagtttatgttaaacagcagttatttatcaacgctctttaaaaaagaaaccggagtaactctgacgaacttcgtaaacaataaaagaatcgagcatgcaatatatctgctcaacacaacacagtcagccattcaggatattgccgcacaatgtggcatcaacgatgtgaactactttaccaagctttttaaaaagcttaaaaacatgactcctacgcaataccgcgaaatgatacaacacaaataagctataaatcaaaaaggctgacgtaataataatatactacgtcagtcttttttatcttttttaacataatgatacaaaaatatgcaaatataaaaagaatttctttcatccacttcagtttttctcaaaatattccggatatattcccttaagcttatcaagctcattaaatattctgcttatatgcgcctttataacacgaagatacattctcttatctttattttttattgcttctataagcatttcatgttcatcattggtctttacacttatgcttttattcagttcagcaagataccttatcctgttataatggctcatctgtgtctggattatattcatggcaagcttttcaccggaacattcgtatatcaacttatgaaattcattatctatctctattcttggaatattttccacttcttctttatagttaataagacggttattaagctgtgtcatcttatcaagcatgtcatcgctggcattttcaaatattgcatccaccattccaatctcaagactttttctgacaaaccattcctgctccgaacgcttacagttaatacaggctacatatgttccagactgtggtattatttttaaaagtccctctttttcaagattaactattgcctctcttgcaggtgttcttgatacatcatatcttaaagcaatcttctgggcacttatggaatctcccggaagcagcttaaaattcattatatcgtattttaatttttcatatgtttcttcgtttaatgatttctccatagctgtacaacctttctgtatattgatataactgttcctttttcagaaaataatccttatgatgatatctataaccgcagatatagccgttttttacatcatataacaaaataccgcccagagcttgtataacagataagttccaagctctgaacggcaacgtatttatatattaaagatacttcttaagtgtttctcttactgcaccttttcctgatatttcttctacaaatatctcttcaaccttatcaccgattcctgcttcgtataaatttataccaaatatattaacatttgacaacaaattcttcaactggcctgtgtaagatgatggctcaccccatataatacctttaatctgttcttttaattcaacagccataggatctggtgacaactcaaaagcagcaccatcatcatctactccaagaagatatctgcaccagccggcaatagcaagcggaatagctgtaagtgactttgcacttccatctttagctacatatgccttgattgtttctccatatcttattccgaccttctgtgatgtatctgtcgcaattctttgaggagtatccggcataaatggattaggtatacggacattaataacctcgtccgcaaactttacaggatctataattcccggattagtaacaactggcattccctcaaccagacctatccttcttacaagctctgaaagctctttatctttcatctcatcagctataaggtcatagcctaatacacagccatataccgcaagtgctgtgtgtaatggattaagacatgtagtaaccttcattctttctaccttgttaactgtatccctgtctgtcatataaacccccgctttttcaagctgtggtcttccattagggaatctatcctctataacaagatactgtggtccctctgcattaacaaaaggagctatataagttctcttagatgtaataactggtgccatatcttcaacgccagcatcctccaacgcctttgcaactgaatctgctggtcttggagtaatcttatctatcatagaccatgggaatgatatcgtattctcatcgttgacatatttaacaaaatcttccccaacaaagcctttctttgcccattcacttaccatttctgttactgagtttcttaacttttcaccattgtgtgaacagttatccatagatacaacagctaaaggcgccttgcatgtattaaatctttctaataaaagagcagctacaactgccatagcagatgatgccttatcaggtccattatcaatatcactctttataaatgggaaaaaatctccctttgcatcatgaagcgcatatcccttttctgttattgtaaatgaaaccatctgaagcttaggacttgcaaatattgtctttaatcttgaccagtctgtttctactgctgactgtgccttaacagcctctgtaagcgaaccaagcaccttcttatctgtacttccatcttcctttaatgtaacagccataacaagattgtcaaatggtgtgtatatcttatcaaccacatcataatcaaatgtttcaacacaagtgattcctttatctgataatccctgctcaagcagtgaatctgctatcccgcctataaaaatcctgaaaatattacctattccaaaatgaacccatactggtgcttcctttgttgctgtggcaactttctcaacatcatatgatggaagctttatccctgccttttcccattcttttttatctttaataccttctattgaaagtttcataataatcctccattcctgcgtgtgaaaaatcttatttttcacactaatctccattccagccccgcttatgggcatatattaatcaactgatatataagctgcagacaatattatctttctgacttaacaatagcttcccataagccattaagatatgttgcgcctaatgctctgtcataaagaccatagcctggcatagctacctcatcccatatcattcttccgtgatctggtctgatcacaccatcaaaacctgtatcatgtaaggtcttcatgatcttatacatatccatagagccatctgttgataaatgtgcagcctcttcaaaatctcttggagaattatacttaagatttcttacatgtgcgaaaggtattcttcctctgcaggctttaataatctcacagatgtcgttattctggttagaaccaaatgagcctgtacaaagtgtgatgccattataaggcttatcaactgcatcaagaagctttgtaacagaatccttacctgtcatgattcttggaagtccgaatataggccatgctggatcatccggatggatacccatctttatatcatacttctcacatacaggtccgatagcttcaaggaaatatacaagattattaaaaagcttatcagcatccacatccttatacatctcaaaaagttctttaagatgatcaagtctttctggctcccagcctggcataacgaaaccgttagacatctttgccactgattccttcatgtgttctggatcaatcatatctactgtatcctgattataagcaagaactgttgaaccatcctctcttactcttgcaagctcagaacgtgtccagtcaaatactggcatgaaattataacataccatatgaatatctgcttcaccaagtgcctgtaatgtcttgatgtaattatcaatatgctcatctctcttagctgtaccaatcttaatgtcatctgaaacattaactgactctatacctgctattcctaagccttctgcttcaactaccctcttaagctctgcaatctcttctggcagccataactcccctgcctgcttgccgaaaagtgttgtaataacattcttaacccccggaatctgtcttatctgcttaagtgttacactgtcatatcctggtccataccatcttaatgtcatatccataataaaaaatcctccttaaatataaaatagtcatccaccttttatgttacccattaactgtggcagccataacaattatattattactgttacagcatttctttattggtatcatactaacatgttagttctaacatgtcaatatatttatttgatttattttatattcttatgcgtttttaaaaagcaggagcttttgatgttcttatcaaaagcccctgctttcatgcctgcggattattattttatttatctgtcgttgttcattctccagtctatacatctttgcagatattcaacgtattcaggattcttacacatacccttgccagggttatctgatatcttagcaacatccattccgttacactttgtcgttttcataacgatattaagtgctggaaccttcgtatcattactgatatacgttcctattccaaatgctacctttgccctgccattaaaatatctatacagcttgtcagccctgtcaaaatcaagactgtcactaaataacagagttttatttcttgcatctattccaagactctcataatgcttaagcattttctcaccccatgcataaggatcgccgctgtcatgtcttacgccaccaaaaagtgttgcatatgtgagctggaaatcctttaagaagcagtctgttgttattgcatctgtaagtgctataccattaagtatgccatattcccttacccatgcatcaagtgcataccagttagaatatgccggattgtgcttgtgattgccctgtccagtacacataatccactcatgtgccatagtacctactggtgtgagattatatttctttgcaagataaacattacttgttcctacaaataatgaattgcctttatagtcagcctctgacaaagccttaacggcaagctcctgtgcctcagctgataatcgtcttctaagtccgaactcgctaaagcttcctaatctgtatacagtttcttttccttctgtttcaacagcggcatctgcttcaagtgctgccactttagccgatagtctctccttaaagctgtcaagaagttcattataatcgtaagccattctgaagtacacttcatttacgatagcaagtgttggtatctcgtacattgatgtgttaagccatgtaccaaacgtttcgatactaagtccacattctgcatccgtggttatcttaaaatctgcatatcttgcctgccataatcttaaaaagtccacataactgcccttcatccactttacattttcaaggtaatcaagctcatcctctgtaaatctcaatgtacaaaaatgctttatctgctctcttatctcttcaaccatttcctctgtgaaatgcacgtccttattacggcacttgaatgtccatgttgtcttataatccgaaaactgatgatatatcgcctgtcccatactgaacttatacatatctgtttctaataaacttgttattattggatgtaatctcataattttcctcttttctgcgcacatccctctcttacaatgtatgtggtgcgcctaatccttttcattttagtcaggaacatactcatacaactccgaagccttgttgccagttatggaaacgccttttctgtttagtgattttattttattatcaacatttcttttaaaattcgtcttataaagctttctgccaagtatgatctcatatactctctgaaggtctggaagcgtgaattcctgtggcataagattaaatactatgtcagaatactctgtcttatttcttaatctcataagtccttcaagaacaatctgtgcatggtcgaaagcaagtgcttcctcactgataagctcaggaatataattcttaacctttaatcttccgttattaaatatcttttccttaagtgaataggctatgttaatattcttctcactgttactgaaagtaagcagcttattatcaaatgttatatcaaaccataatgcttcactggcatcatcccctgcctgcggcttcattgtatctacaggtataagtgtcatatacgcaatatctataaccctcattcttggatccctgtcaggctggctcatagtatataactgctccatatatatatccttaagcccggtttcttcctctaactccctgcatgccgctgtatatgctgactcctttataccaacaaaacctcctggaagtgcatagcagccgatatacggatgattgtttctctttatgagaagcagcttaagtcctttaaggtcactgctcatgccaaaaagcagcatatccactgtaacacttggtctttcataatgtcccggattatactgtgccaggaactctttctgtgtaagaccatctttattctttcttaattctcccggaatatacttattatccgacatattttcaccgcctttgtaaaagtagctttttgatacttttatatatactactttttacaatatatgtaaagtatttttcacaaaaaactttcacaaaaaaacaggaagacacatccttaaatccaggacatgtcttcccactttttataatagcaaatataaattaatgcggatgacaggaatcgaacctgcacatcgtacgatactagaacctaaatctagcgcgtctgccagttccgccacatccgcatgtatatatcagtatatcatattatcacagccgcgtcaaaccctaatttataaacattttcatcttttcagaacttttttcgtcaagaacatatttcgtgacatttaatcatctgctttacaatattccctgattcataagactatatgtaacattctcccatgtatgctccaccctgcataactcatatgcattgtctgcaatactctgcagagctgtgtcatccataagcaattccctgacccgttttatcattggttctataaccttataatcatatcctgacatttcataatcttttaacatatttaaatcataaaacaatatatctttgccatctgtaaatatttcatcaagatatgaagatgagtctgtaagacacactgcaccgttaagacaactgttaaacaccctgtcatgtgcccccttcttaaaccaaggcataacatttaatgaaatcttagcctggcttatattatccaggcactgctgggaattcgcacttccatgctgtatgatattttcaggatgctcacatactatatagttatatccttctccatatgtgttgaccttaagtccggaatccaccagtgcccttatggcaagctctctgtagtggaatcgtacattaaggtcagcatacatcatacccggcatacaattgcacagctgctcatctgtcagatcattgaattcttctcttaaatgtttctcggcagcctcatctatcgtcatatctggatgatttataatatctgataacactttctcataaaaatctatataatcctgttcaagattatctatctgctttcttaatatatgctttggtgtataatttcctgtaaatataatatccatcggtctgtctttaacaggtatatatacacccttttcatatgcttttctgtctttattaacctctgttcccgcagatgccataaacagagttttaacatccggatagaacctgttcatatattccatatgaactttatcaatatctatctgcacataattctttggcctgcctgcaagatatttgtggtaatacagcggatgatctacaactatattaacaacctttattcctgaataatcccagaaattccagttaagcttctgatacagtcctgtttctccctcaagtccttcaaaattaaatgtaagtacaacaaactcttcatctttatgtgtattataaatttcaagtaaatggacaaaactgctttcagacataaaaaggtcataccagaacacatcatattcatcctctggcagatatctggatatctctactgaaaaaaattcaagtgtttctactccacctttaaacataatcacatgcttcatattaagcctcatttctgactgcaattttaccaatatctatgctttctacttataattcaggctgttttttaatttttatctaatgcagactgaattacatgatcaacagtttttaatagcttcaaacacactgtcaagtgcagctgtatcaagttcctctgccctgcccgcatcaatgtacttagcaacctctgggtctataggcatctttgcaactgtcttaattccaagctcccttgcagtttcatctatattgctcttaccataaatatagtgtatattgccacagtcagggcacttgaaatatgacatattttctactattccaagtactggaatatccatcatctttgccatattaactgctttttcaactatcatggatacaagatcctgaggcgatgttacaacaacaattccatctacaggaagtgtctggaatactgtaagtggtacatcccctgttcctggaggacagtctataaacatacagtctatatcctcccaatcaacatcttcccagaactgctttacagcacttgctataactggtcctctccatataaccggatctgtttcattatcaagaagataattaagagacatcgtcttgattcctgttttagtttctggtggatagattactgttcctgtttcattgcaggtagccttacctgaaagtccgaacgacttaggtatagaaggtcctgttatatcagcatcaagtactgctgttttaagtccctccctgcgtgacttaaccgcaagcattgaagtgacaagtgacttaccaactccacctttaccgctgacaacagctataaccttctttatatttttattattatcatttcttgtattctgtggcactgctctttctgcgcaatctgaaccacagcttgaacaatcatgtgaacatgcttcgctcatcatatacctccctggtttcttattttattcaatgataaaatgatgtgactatcgttgtatattttaccatatatttattttaagtcaaagttatacgacatattcgtctgactaataattttattttcatcttgacattataaataatatgtaatatattcaatg

SEQ ID NO: 428 - DNA, 3756 bp, Unknown
  gut microbiota DNA sequence
gtactacttaagataatacagttagtacaatcaatgcatttgataaaactacataaggaggattgatagcactatgttcgttatagatgtcatgtcgcgagtgcctgtatatgaacagcttattaatcaggttgaagaacagatcctgactggtattttaaacagcggcgataagatgccatcggtaagaagtctgtcggtaagtctttccatcaacccaaacacaatacagaaagcctatacagagcttgacagaatgaagcttatcataacagtacctggaaaaggatctttcgtatcttctcaagctcttaatattcttggaaccagttcaagggaaaagatgccggaattcaagcaggctatcaaggaactggctcttgccggaataactaaatctgagattatggaagctgttgatgaagtatttaaagacctataattccaaaacaaaatgaaaatataataatcaagaggaggtttttcaatgataaaagcagaaggtattcacaaaacattcgaggattttaccgctctcgataacatcacctgcagcataagcgatggatgcatatatggcatggtcggctccaacggtgctggtaaatcaacatttttaagagtattgtctggcatatataaaccagataaaggatgtgcatacattgataatgcacctatatatgaaaatccaaaagtaaaagaaaacattgtatttgttgcagatgaattattttttctgccaggtgcaactattaacaaaatggctgatctatacagttcaatatacaacagctttgactgggagcgatatctaaagctaactgaactttttgagcttaatccaaagaaaccaatagccaatttttccaaaggtatgaaaaggcaggcagctattattcttgcactttcaacaagagctaaatatatgttttttgatgaaacctttgatggacttgatccagttatgcgtaacctagttaagaagcttatatgcaacgatgtagcagaatataatgccactgttatagtgacctcacactctcttcgtgaacttgaagacatatgtgatcatcttgcacttcttcacaagggcgggcttgtacttgacagcgatgtacttgagcttaaaacatcacaattcaaagtacagattgcatttaagaacatattcggaaagtcaaagtttgaaggacttaacataacaagataccgtcagcagggttcggttgcaaacatgattgttaatggtgaccgtgaagaaactatacattaccttcgtgacatgaatcctgttatattggatgtactaccactcactcttgaagaagtattcacatatgagatggaatctcttggttatgaattcaatgatgctcttgaagtagaaataaacaacaaataaataaaatctatatccaagcttatattaatgtgatttatattacacatagaaatggaggttataatgaataacaaacttaataacagaaatatattcagtgtcaaactattctggcagtcattcctgcagcttaaaataataggtattatatcaacagctattatgatctgcataactgcccttcctataatcatggatggtatcaacataaagaacatgattaaggcaaataaaaatgctgtggcctcaggcgtagctatagcaaatagcagctttgactacacatctatcgtatcacctgtatcatcagcatcctatctgcttaatgtcattgcacttatcacacctgtactctgcctttatgcatggttttttctaaacaaaagaagtacaagtgatttctaccattcattatcatataaaaggcagaatctttttctttcaagattcgctgctataacagcatggcagattataataatgctttcaacatatgtaactggttttatatgttatcacatattcagtaaatattttattgtagattattctacaacctttcacgtatatgcagcagaattcttatgtgcacttttatgctctgctgctattgcacttgcctgctctgtcacaggaaatatattcagtaatatatgtctgtcgggaattattatattcctgccaagattcatacttattcttgtgaattcaacagtcagcaacatatatgcagctgcatcatcaactcattttatgcctttgcttgacaactcatacaacatgctgactggacagttcctgtcaatatttgagcctgcgtatttttcatcagactacttatctaacatgttgctttctggtgtatcaaacacatatactcttatgcttgcaatcatatatgctgtcatagcatgtgcattatttactataagaaaaagtgaaactgctggaaaacctgcccttagctggaagctgcagtttgccatacgatgtgtaataggctttactataagtattttcggaacatttgtgtacgtgcggaagtcaaaagaggattactcatatggcacctcaccttatatgtatacaataatcacatttataatagctgccatagtcgtcatagtatacgaactcatatcaagcaaaaaacttcatcgtgtattaaacgcagtcccatctataatcgttgcctatgtgctcgctattatatgtggatttctattaaatgccggaatcaacaacatgacttcctaccgtgctaacgcagataacatagattacatcacattatctgtcgaaaaccggtattacaggtctgaatatccagattattttgaaaatgttattaaaaacataaaaataaacgacaaaaacactataaagcttatagctgatatatacaacgataacgctgaacagcttgataattttaatgaacttccttattataaacgttcttctgtaaactatgtaacatatgaagtatactttaaagatggaattttaggcagataccgcaaggtatttttaaaggaaagtgatgttaataagcttgccagtgcactcactaaaaacgaggatttctgttcagaatataagaatcttccttcatacgaggatgctaatatcaccttttcagattatatatctgaagataaaacacgtgatatatataatataatgttaaaagaaataaaaaacatgccattttcagactggtaccagctagtaagccagacctctaaccatagcagtggtgacgtatcatatgtcacagcagtattttcacgaaatggaacaacgtattcagcaagcttctgcctgtcaagtctaatgcctgaagctgtaaatgcatactacaacgctgccaataagacatgtgcagacaataatccacaaacctttaaccggatgaaaaatgcactcacaaatataataaatgatagtaatgaagcatcaaatgtatcttcaaaagcacatttaaatacagcttcaaacgcggcttcaagcgcactttcaaatacatcttcaaacgcagcttattcaatgtatgtaagtgtatattctcttgattctacagaatatagttctttaatttataataatttcaataataaagaacttgctaaggctatacttaaagagctagagaatccttttgagaagaatttcgattcaactaaaccagttattgaaataagatattatgatgacgataacagtggaagctattcatactatgtccagccagccggatatgaccatatgtcagactatcctgagtatgaagaaaacctgcaatattgatgtttaattgaatattagttggtgacgaacggacgacaaat

SEQ ID NO: 429 - DNA, 34125 bp, Unknown
  gut microbiota DNA sequence
gctgacgctaccgctcagacgcgccgtccatggcgcggcttcgctgcttcgtacatccgtgtacgaagctagctggtttgctaagggaaagactaagaactatcacaatcaaacttcaagtgcatttcacatagtatgccagactgcctgtagcttatatttgtctgtgttacggcataatgtaatactgaatattcaattaaatcaagtgggacgaaacagggcggaattgtgtgctttacgcacaattccgcccgcatgcctctcccctctgatttaacacacattcatttttcgtaaattaagccaaagtcagacagcatatatgagaaaagcaggtgcgcaaacatcataagatgcacttgaagttcaattgtgatagttcttagacttttccttaactacccagctatccacagacacggatgtctgtggaagtgagatatgggacacggatgtcccgtatcgaacggtagcggaaactaccattacgtatatgaaaagtcttagaaatatccaattgaagcttctggcatcgttgatgtatgcacacctgcttttctcatatatgctgtcgtccgtacgttaagaatgtatgttaaacaacaatatcaccctataagcagcactgccacatcattaacatttgttcctgtaggtcctgttattataagtccgttagtttctttcaatgcattgtaggcatcattttccttcagcacctcaaatatatctatgtctttttccttcagcactttggctgtatcgccatcgcaatagcctcctgcggcatctgttggtccgtctgttccgtcactgcctatactaaatactgctacgtttgacatgccttctattcctgtggctgccgataaagctatctcctggtttcttcctcccttgccatgaccggtaagatttactactgtttctccacctgctatataagcaagcttttttcctgaagcataatgtgttttcgctattgatgcaagaaaacttcctgcctcctttgcctgacaacacaactggtctgtaagcataaccggctcataaccatactttgtacattcattttcaactgcacgacataattcacgcacgcttccattgataagtgtagtaacattgtccaatttttttggtgtttctatatttataagctttttcgcattctcccccagcttaagattatactttgctactatgtgtcctgcattctcacaggttgaggaatcagggcatgcaggtcctgatgctatcatatcaagtgggtcaccaagtatgtctgataacactattgagaacacatgcgctggttcacacagttttgcaaaacgaccaccttttacctctgacaaacgttttcttatcgtattaatctcaactatatctgcaccacaggcaagcagctggtttgttatattctgcagttcttcttctggcatctttggtttttcaaacaaagcacttccaccacctgataaaaggaacaatactgtatcctcacttgaaagtcctgttaccatatctatagctgcctgcgttgccctaaatgaattctcatcaggtactggatgacctgcttcaaaacattcaaccctgtcaataggaccttttacatgtccatattttgttataacaacacctttatctattctatctcccatacaatcacttgcagccattgccatctgccatgcagcttttccaactgacaccagaatgacttttcctttgaattcttttccatccaatgctcttttgactgccgcatctggtagtacagcctttatagccgcatctattatattgtccgctatatttcttaattcactattcatggctaatctcctttctgataaatgttcattgtaatattttgtaaaacctcttttgtatatttttataactttgaactatttactcaatcaaaatatttaaacttgcctatgctctcattccttaaacaacatctaataacaaggcggctatactaacaagtcaagaatgtacttacttatcagcatagccgccataggtcactagaatcgaattataatattaatgaaagtatgaatatttcaaccattgaagcaatacccattatcaatgtacataccgtctgtgttttatatccctgatcaggagtcatgtcaccaaagttagtaactacccagaagtaagaatcgttagcatgtgatactgtcatggcaccagcaccaatagccattacacaaagaactgtctttactggtgaggcaagaccaagtgcaccaagaagtggagctatgatacctgctgttgttgtgatagcaactgtagaagaaccctgtgctgtctttaatatagctgcaagaaggaatgggaagaatattcccactgctgagagcacctctgcatgctgtgtaataaatgtaaccatagatgttgatgatataaccttacctaaaacaccaccagctgcagttacgaaaaggattggtccaactgtctttaatgtttcgttagttatatcgtagaaatcagacatcttgtcagctgttgcaagctgtattatcgcaaatattgtaccaactgctaaggctataataggttttcctaagaactggcatgccacatcaagaacaccggtccagcctgccatagatgaaattgagccaagtgccataagtatgataggaacaaggattggtgcaagagcattgaatccgttaggaagctttccatactctgcgactaactcttcatatgtcttagttacctctgaactatctgttgtctcgtctgcacttttaaccttcttacctatgtactttgcatatataagacctgctataagagggaatatagaacatacaacgccaagtcccataactagtaaaaggttatctccgacaccgagtgtattagctgctgctattggtccaggtgtaggtggaataaatacatgtgaaatataaagtcctgctgaaagagctacagtcattgccacgctcgatactgctgttctcttaacaagcgcttttctgataggattcagaataacgaaaccactatcacagaatacggggattgaaactacccagcccataagctcaatagcaagctcaggtcttttcttacctactaccttaatcaccatatctgcaagcttaagagctgctccagttttttcaagaactgatccgatcaatgcaccaagtatgataactataccaatactactaaaagttcctgagaatccggcacctattactgtaggaataccagatacttttgttccgtccggttttactgtatcaacgaatggaatacctgctatcatggcaagaataagtgatacacccatgattgcaaggaatggatgaaccttaaacttggatatcgcaactatcattacgatgattgccaacacaaacacaattatcaatgctatacctgacataaaaacacctcatttctactaaattattgtacgttttgcacaacctcttgtgctttgtatggtgcaataatagcatagaaatacattttttcatatgttaccgtgtacataattatttttttatttcgttccacgtaacaataatggtaaatcgtatttttcatttataagctcatccgctattatatatgcaataaacaatgctggactttcggtaggttttcttatatcaagtcctgttgtatcttttaaccttgatatcctgtactgcagtgtatttttgtgtatataaagtgcatcagctgctttctgtattgaaccctgtgcatcataataagcctttagaagtgctataacatcaccaatatcatcgccatactcacctttaaatattttctttagatactcaagctttatttctacaggaacattactgattaaaagctccagactcatattctcataacatattatatgttcatgctctgaggctgctgcattccaagccctgtgagcctgtacatatgcatcatgcatatcaacattattctcaccatctataccgatattaagctccactccctctttttcccttatataatcagcaagttctttggcaaatgcagccagcttatccgtcaccatgttatctacaattattatctgtcttgaagcatttctaaaatgcatcttataattatttctgcttaaaaatgtatcaacatcattctcaaacttggcaatcttggactgaccctgctgtgaatccttataattatcaagttcatcaatactaacaataagaatacgccttggaatattgatatccacgcctatagccattcctctatcctcaaggtcagcacttttatagcctccatttataagccattcttcatagaatgcatttctgactcgcttattcataagctgatggtagtttgccctgctctccataagaagaatttctgtcatcttctttaaaagcttgccagatgtaataacctcttcatattcaccagtcataccaataacaccaactatttcaccatcaagctccagtggaagatttattcctttctttattcccttagaagcatcatcttcatctatgtaatattcatcaagattttcagatataattttatacgcaccataatgaaagcttcctatacggcttttatctacacttgctattatataaccggtctcatccatcaggttaatgttctgtttaacaagcctggatatttcatttactatctgtgttgctgaattctttgaaatatgcataattacttcatccctgctttccttttttacacttttccttatttctgcgcatgctttttgcgcatatctcgcatgtaaaaaatcttgaatttatggattttttacattattctcccacatccgttcttacatgtccatctactatgttaaatattctgtcggcatattcagccatctgcttatcatgtgttaccatcactattgtctgcttatacttggctgctgccagtgaaagcatggctgcaacattctctgcgctctcagcatcaagattaccagttggttcgtctgcatacactactgcaggatgcattataagtgcccttgctatagcaactctctgctgctcaccacctgacatctgctctggaaacttatctcggcaatgttctatctgaagtgattctaacagatcattaacatcatcctcatcgatatcctgattatcaaggaccacaggaagtactatattctcatatgccgtatattctggtatcagactataattctgatatacaaaacctatcttttcccttctgagttttgataactgcttatcattcagttcacctatattaatatcatcaatatatacctcaccctcatccggcttatccagggaaccaagtattctaagcagtgtcgattttcctgagccactctttcctataatagctgtaaattcaccttttcttatagttatgtcgcattttttcaatgcatgtacttctaccatacctgtgtgatatgtcttacttataccttctgctcttaatatctcacccatatttttccttccttcttactttcttactgtattataatgcaagagatgcaaactattttttcatgtcttatgtatgaatacacatgcatttctatactatcagtgcagaatcatcatagtactttagtttcatgccttattactagcacatatatcagcagcataagcggcataaggataatacaatataatgactcactaaaacactctttcatatatatcttaaagattacagatttatctgctccactatatcttaagattgtcatagtatttttatatttttcaatcctgctcattaacataagaacggatatcattatgtacacaccgatagctacagctgctgtgaatacatatagtatgatggcctcaaatgtctttctcttgacctcatccttttcccccgaataagaatgatatccccatcctgtctgaagcatatatgaattcactgtattaaccgttccactatatagcgaattcatgctatatcttagtcttatctgattatatgacatatcaagagacaattcatctggaagtacatccatctggaaataatcttttaaaacctgattctggttatcaagctccctctgtaaaagctttgttgaggcaatcatagtatactgcccgaattcaggaatatattcttttaatctgtcttttatctcatcactgagcttcactacagcccaggccttagttgtagctgcctgctcgtatccaagaatatatgaataatcttttcttaacctttgataataatactgttttacaagctcaagctgttcttcctctgatctgcaaaaaaacgtaaaatcagctacatttcgtccgtaattattttccagatactcaatatactcttctcttattttgttaaaatcaggtttgtttttaagatcagacacatagttatcgcatccctttgcctctattttactatctgtcagactcttatatgcgctatatcctttatcttttatatatattgacaaagccttattatagcttcctgaattctgccatgctctgtcatacataaacgaaccatttatattgcagtaatatttcataagattaatatccattccctcagataatgtatcatcataatctccatcaatattctcgtcaacaaatacaacagatatatctccattattaaatgcctcctcatcaaatgaaggcttacctgttatatcctttaatatgtcatataatttattatcattttccacatattctgttgcaaaaagatatttatacgttttttgattatcattaagtgcttcaacactgttaaagttatatgaaagataccatggcacaccaagcttgttgtaatccatattattccatgcccatgttcttgctgtttcaaaatatccataacttatatcttcaacaccatctatactgttaatataatcaatcatgttcttatcaatatccttatacacaggtgtatccgctttttttatattacacataagtgtatagctgctgaatctgttaaagtaacgccttgtttctcctttagcatctacctcagtaaacatttcattactgttatcatacatttccttgttataatcacttaaatatgttttacttcgtattttggctttaagactatctctcgtatatatatttccattttcaccagagtattgtgtataatagtactcatcccttgactctttatctgcataattaagtacataatttgtactgggatcgatgcggttaaatgctataatatctgacatatcagatatatccagatactgtttatacgcttttattgaattaatcacacagcccgctataataaccagaatcgcaagcgcaaacactctgactgcaatagctgacaacgccccatgtgacttatttaatcttttttgtgtctgtgaaatataattattccggttaattattaccagcttattttttcttgtctttaaaataagtgatttatttcttccaataccgcggatatttccaacaccagatgccggatgtctgaaattttcaataatacaagctatcatgcttatacaaacagatactaaaagcataatgaatacatatacatatatactgttttttatgttaaagaactgtatacctttaacataaccacttatagtacatactatcttcccggtaaatattgaaaggaacagacctgctatggcagcaagtgtaactatgactatattttccactaaagaaaatgccattagctgtattcttttagcgccaagattcgtaagtatactccttacatgcttccgctttctgtcatgcataagtatctgatatacaactgctgatacacctatgagcataagaagaacgtacatataatcatatatatatccacctccccatggttcatagtcgtatacgctgctattatatataagctctttttgtgactttttctttaatccatcatatatatcattataattcccatctatataactgtcagatgaatatatatatgcagcttttcctatgcggttaatattctctccctcaccttgtgtaacaataatacccggtatataatttccaccacaccagaggttcgtatagttattaagaattcccgtaagcttgtatgttttttcaatactttctgttgtctgattgcttcccttccggactgatatatgaatctcctgacctatctgtgttccctgattaagcttaagaagtgtatcccactctatggcagcttcatcatcgttgtgcggcatgctcccactctgtaatgatatgctgcctatccttatgaagtcatcatccatataaccaactttaatatctgtctggttatcattttcaaacacataattatctaccgtggctttacctgactcgttcagatacggatgattcttaagttctttattctcttctaagttactgtcataaagcatcacaatccagctgccaaacttgtgctttgcagactgtatctgatattcatacatattagtcttaaacaacataatccctgcaacaaacgaaaacgcaagaaataccgaaagtgctgttttaaatatacttttccatcgtctttttacactttttatacaataactgataaattctgtattcaatcaaacacattcctccatttccagccagataccatgtgccagtactcaccgctaaacttcatattatctgtcataggttacgtatatacctttttatgcatattatatccagtataatcatcaacggcatgagcatgatacaccacagcatttcccgtatactctgcttcatatacatgtcaaatattatatccttgctggcacctgtatttcttaatatctttattctgtcactaaactgaaaaaacctgttttttaatataatcaggcttactatcatatatactaaaaatgctgttatgcctgtaaagccatatagaatataagcttctatagtattgctctttataagatccttatcatgcgaataactgttatatgcatatccagcctgtccaagataagaagctacagcattagccgttccgttatatattgaatcaagaccataggttatattgatctggttatacttcatcgaaagattaatctcctcaggtagttcatcaagcataagatagtcttttaatatattattctgtgtatccagtgccttctttcccaattcatctgatgcaagcatcgtgtactgcccgaattccggtatatattccttaagcttatcttttacctcatcatcgacgtatattacctttgcaacctcagctgcagccgctggtacataatcggagctgtaatcatatactctaagtttttcatctgcaatgtttatatcaagatatgaatcaacatactgataaaactgttcttcgcctttatctgcccagtacgcataaaaatcatccgaatgctttacattatttttctcaaataattctgtcatctgttttaacttatcctgcttattatcagatattaatgaatggaaatattcactgttaattttattaaaatcgtctgtaactatgcctttatcatgcatatagctgtatatagccatataataactgctggcataatccttatctatatagctatagttttccggataggctttatagcacataagacctatatcagttccctttgttattgtatcatcatatacaccctcaggattcttatctaaaaatataaccacctgtctgccgtctttaaatgcctgtatgtcaatctcatctttgcctgtaatatccgctaacacatcatatactctgctatcagcttctacatactctgttgcaaacagatactttggattaatctgttcactgctatatgaagcattattggaattaatattcttagaattaatattcttattatcatcaatatctacataatacggaatacccatcttgttgtaatccatagtattccaggtccatactctcgctgtctcgaaataaccataactgatatcatctacaccagttatcccacgcacatactcaatagtactttcatcaatatctttatacataagtgcatctgcattctttatgttgtatttaagattacgcttactaaacgaaatttcaccttcatcagatgttcttgatttataagcatctgaatacatttcccatgacacattattaattgcattactatagcaatcctttatgtacttaaacaaatccagagttttccctgcctcatattctaactgcacatcattctctgcattacatatgatatattctgcattattatcctgcttataaaatgcaataacatctgatttttgtgagcttatcttataatcagcatatgtccttacagaattcactatacatataatcatgattatcatcatagctagtgaaaataatcttatgcatatactctgcactatcccctgtcctagcatgaaacgtttatatgtttcttttacataattgtttttgtttaatatatatgtatgtctcgtatgcctgtcttttttatatagccttttcagcttataacgacttgtatatctatgcagtctgtcagagctctgtccacatatatttacaatacttcccacaacaacagccatgataagcataatcagaagacttatatatatccctctatctattgtaaaaaaacttattcctgttcttaactcgacaatgaagcatataagccttgctgcaattattgaaagaatcagacctataacagatgagcttataactataacagcattttcaacacatataaaagctatcatctgcagctttgtggcacccatattctttattatgccatatgcatattttcttgttttattatatacagataactgataagctataccagctactccaagtacaacaagaacaacatacatatactcgtatatagaacctccactccatggttcgtaatcatacagactgctgttatatattagtgaaccacttacttttttattcagtccttcatatatatctttataatctcctgatatataattgcctgctgaatatatatatactgctgaattacttctttttatattctgagcttcatttttagtagttataatacctggaacattgcttccgccaacccatacattagtgtagcttttaagtattcctgacagcttgtatgtctttgttatcctgtcccagcctgaacctgcctttggattatttacaattatattcagagtaatatcctgtcctatgtctgtaccctgattgagtaaaagcagagtattccattcaactgctatttcatcatcgttctttggaaattctcctttatcaggtgttatattagaaagacggacaaaatcattatccatatatccgattttaatatctgtctgattccagttattattgtattggtagtttgatatacttacttttcctgaatcattaagatatggatgtgacttaagctgtgcattttccctgctgtcatttccattcatcataacaaaccagtcgccaaaccggtgttttgctgactgtatctgccattcatacatattatccctaaaaagaagcacacctgctacaaatgtaaatgacaaaaatatagccgttactgctttaagcacctgtttttttcgtcttttaagactttttatacaataatcaaaaaaagctgtattcatgccatcacccctgtttcatattataaataaatatcagtacccgtcccctcatctcacaatacgggtactgattatacaggctaccctgcttacagttattatcatataacagactgcttacatataacttacgttttatatactttaatgataagatgtctgggtcaaaagtccctactttgataccttcggattgctttcttagttatgcccaaccttccccttaagcttatataaaggaagaaggatccgaaactctgctccaccatacttctcactgttagctgcctttatgctgccatgatgtgcttctattataagctttgacagattcaggcctatgccagcatgaaactcgttctggctgcttttcccttcgaatctgtcaaatacaccagcaaggtgtgctttgtctataccttcaccattatccgatatttttattatacacacctcattgttactgcttatatctatgtacacgcgtccgtcttctctgtcacatatgtattcatagctgttacttataatgtttataaatgcttctgctaaccagccctcatctgcatacatagctctcttttcctctgtaccataatcaactatcaccctggatttatctgcagctgcactttctacactttcttctactatataatcaataataactttgtctgtggcaagtactacttttcctgactcgattctgcttatatcaagcagcttttttataaatgtctttatcttaaatgcactctttgtacactcggaaattattgtagatgccatctgcatatgctgttttgtttctgatacatattcatccggttcttttttcattttttccacgtgtttatcattatcatattcatgtgtattttctgtctttatatcatttaacatatcctgaagcatctcaagcttcatagtcataaccgaaagtggcgtttttatctgatgcgctatattctctacaaactcctgcatttttttatactggcatatattgtattcatgttccttttcaagctgttctttgagtgcctcattttcccttgcatatgccttaagacttccaaggcagtccttttttcctatcctgtagcaatgtataagtccatacaccaacaataccgcaataaccatacctatgatagtatacatcattgtctcaccattaatgtgtgacagatatgcatatccatttctggtatatccggcctgcaccatagcctcttctcctgcataatatgtgttcttacttatattcatatgcatcattctgtctatgagattcgttgccgaattgttgtcatacagataaagggctcctacaagagccctttgcctgatactataatatatggttagaaatgcagcaataagtgcattggtaacggctgttcctataacgaataacgtctgttttcttctataatctcttataatattatctatattctttcttgaactgccagactgaattttcttcttattatccataccctatctccccataactgctatgtattattcctttacgctatccagcggtagcctacatttcttattgtttctatataaggaactctttcatccccaaaggtgccaagcttggctttaagacggctcatattaacagtaagtgtgttatattctacatagttgccatgtatatcccacagtctgtcaaaaaaaacatcccgtcttacaactcttcccttattttcaacaagtatcttaagcatatcccattcattgttcgaaagcttaagttcattaccagccctgtacagcttgtatttatcaaaatatattgcaagttctccctttttatatacatctccatcattcatgccacttcttcttaagttggcacttatccttgataaaagtaccgcattatgaaaaggcttcgttacataatcatctccacctatatcaagtcctttaactatggattcctcatcatcgcatgatgttataaatatgattggagcatcaagattatgtctgattttttcacatatctggaagccatctccatcagggagctttacatcaagcagatacatatcatacacttctgtatgcttattatattcctttacactccctatgagtgtcacatcatatccttttaaagtaagaagactctttatagtttctcccagctctctgtcatcctcgaccaacataattctgtacatgtatcctgctcaccccacccgtgtatatgtatgtttttatagcttattctgtatcgttattccttaacatacattgataataacattaacaccttgcaatcaccttacaagactgcaatatcattattataatactaaaagcgggattttaccaatattatcactctttcgatggagtaaatattttattgtagattattctacaacctttagcatatatacagcagaattcctatgtgcattattatgctctgcctctattgcacttgcctgctgtgttacaggaaatataataagcaatatatgtctttcaggaataatcatatttcttccaagatttatccttattcttgtgcattcaacagtaactaacatatatgcggctgcttcgtcaacacactttatacctttattggataagatgtgcgattggctttactataagtgttttcggaacatttatgtatatccagcttgtaaatgaagactacacatatggcactccaccttacatgtatacaattattgcttttataattgctgcctacgtgcttgctatactgtgtggcttcctgttaaacgccggaatcaataatatgacttcctaccgtgccaatactgataatatagattacataagattatctgcacaaaacaactattatatgactgaatatgagaatttaaatgcaataatatctgagcatgcatctatatcctgataccgtctgtatgcctttatggaattagctgcacaccctattataattacacacattaacaatgcaaatactcttattgcaatattaacagccgctccctgcgattttctaagccttctgctggtctgtccgatatagttgtttttattaattaactttaattgagttatttttactaatctctttttttcttttttcttttataaccataattaacactattgcatgtattaactattccctccgccagcatatctgtaacgagggcaattccaagcattattaatacatatacatatttacttaatatttctatgtaaatataacatctccaatataacaataaccggcataagtattacacaccatattgcttctcttatacattgatacatatgtatatttctgactattgtgttatcagccccatgatttcttaaaatattcatacggttattaaatctgctgactctgttattaagtacaagcaggattatacttatatacataagtaccgccgcaactgcggtaaatatatacaataccagagcctctattgtgtctttctttacctgttctttatccgcagaatagtcattatatgaaaagtcagcctgtctaagatatgctgctactgcattagctgttccattatataccgaattcaatccatatcttatattaagctggttgtacttcatggcaagtgtaatttctggtggcagctcatcaattccaatatattcctttagcacttcattctgtgtattaacagccttctctccaagcttatctgatgcaaccattgtatacaatccaaactctggtatatattcctttagtcttgactttatctcatcatcaacatatataaccttagctgccttagttactgctgccggtgcatatcttacattatatgtatactttcttttcctatccttaaactctttcttctcccttacacttattattccttcctgccttaatatgtcactctggctctgtatatcattttctttcatatagttatatacagctttataatagctgctatacaccatattaagattagatgcgccatcttcatatggataagtctgataacacatcagaccaatattggttccacttgtgatggtatcatcatattctccctcaggattcttatccagaaatataattgcttcatctccttcaagaaatgcagcataattccaatcatcgcctgcataatcctctaagatgtcatatattccactattttcccccacatattcagttgcaaacagatacttgtcctcttcatcagagtatttcttcatagaaaacgatttattatttccagccttctcataccaggaaactcccagattattgtaatccatatcatcccacgtccacatacgtgctgtttcataatacccatatctgatattactaacaccatttatactgcttatataattaataacacttttatctatccctttatacatactggcatctgctctcttcaggttataatccagaaggtaattgttgcaatccagattgagcattgttccattcggattagaactcatataatcacgatactggtcatatgtcatattattatataccagcgaatatttaagctttacattctttcttacctcattgatatctggtgaattcagcacactttggtcatgctcatcccaatatctcctgaaattatatgcaatattaaccacatatggagtattcttatcctgcttatagaatgcaagtgtatctgttttttctgaaactgtcctatatttgccataaacagttattccattaaccacacacgtaatcactataaccataattgcaagtgaaaatactcttatagatatattctgtataattccctgggaacgcattaatctgctgcctgtctgacgtatataattatgtctgtttattatatgctttacatctgtattatgtgcagatctgcccggcttagcgcatatattggctgctttgctgcgctttgccacccgactggttccctgacttactatacttacagctaagcagactgctattgatataacaagcataacagccaatccaatatatacacttttatctattgtaaagaagactattcccgtaattccttcaataataaaggttactacccgccctgttattattgaaaaaatcagacctgcaagtgacgaacatataattataactacactttccataaaggcaaaagatataagctttaatctgtcagcccccagtcctcttaatatttcatacactcttttcctgcctgtactatataccgatagctgataggttattccagcaattcctacaagtacaataatcatatacatataatcatatatattgccaccactccatggctcatattcatacacgctgctattatatataagtgaactgcttgtcttttttttcaacccatcatatatagcttcataatcattaacgtaatcatcaactgtatatatgtatatagcattattattacgcttaatatcctttgcagcctgctctgtaactataactcccggaacgcggtctcccccagcccatgaattcgtataacttttcaatattcctgccagcttgtaggttcttgttatatcttctgtctgtccattttcatctgatataacagtcctgattactatatcctgacctaaggatgaaccctgattaagctctaacagcgtattccagtcaactgcagcctcatcatccttctgtggaaaatgtccttcctccgtagatatattaccaagcctgataaattcctctgtcatataacctataccggtttccgtcatctcgccgccattatcatatacattattaacctttacagcttttcctgactccttaagataaggatgtcctttaagttcactattctctttgctatcagaaccacacatcataacaaaccagcttccaaacctgtcctttactgactgaagctgccattggtatacattagttcttatcagtatcagcaatgttacagcagcgaatacaataaatatagtaaatgaggtctttattatattctttttccttcgctttatactcttaaagcaatagtccatatattctgtattcatacaccatcccccattcacttaataatataactatataacaatctgcttacatataacttacgtttactgattatgttctaccttccccttaagcttatacaatggcagtaatattctgaattctgctcctttgtacttttcactgttggatgccctgatgcttccatgatgagcctctattataagctttgacaggttgaggcctatgccggcatggaactcgctctggctgttcttaccttcgaatctgtcaaatatgcctgatatttttgttttatctataccatccccattatcagcaatctttatgatacatacctcattattgctgcttatatctatgtatacacgtccattttctttatcacatatacattcatagctattgcttataatatttatcaaagcctctgcaagccagccctcatcagcatacataacccttttaacgtctgtaccataatcaactatgacctttgacttatctgcaactgcactttcaacactttcttctactatataatcaattacaactttttctgttgcaagtatcaccttgccagattctatccggcttatatcaagcagcttttttataaatactttaatcttaaatgcactcttagtacattcagagattatcgttattccgcctgtgatattattatacggctgctgcagacagcctgcatcttcttatactggcatatattgtactcatgctctttgtttagctattcctttaatattccattttcccttacatagcctttaagacttccaagacaatcctttcttcctattctgtagcagtgcacaagcccatatataagcaacagcaacagaataagccctataactatatttattacattctcataattaatgtgtataagatacatatatccgtttcttgtatagccagcttcaatcatagcctctagtcctgcctcataggttttcctgcttatattcatatgcatcattctgtcaatcagatccatggctgaggctttatcatacaaataaagggctcctacaagagccctttgcctgatactataatatatggttaaaaatgcaatgatgagtgcattagtaacaacccattgaaataacaaataatgtctggttttttctataatttcttatagttttatctatattcctgtactggctgccagactgtatgcttttattattatccatctattatctccccattagtattgttatgctatccaacgataacctacattcctgatagtttctatatatggaactctttcttccccgaacgttccaagctttgctttaaggcggctcatattgacagtaagtgtattgtattccacatagtttccatgtatatcccacaatctttcaaaaaacacatctcttcttacaactctccccttattctccacaagtatctttaacatatcccactcattgttggataacttaagctcattacctgccctgtacagcttgtacttatcaaaatatattgctaattcacccttcttatacacatccccgtcattcatgctgcttcgtcttaggttagcgcttatccttgatagaagcaccgcattatggaatggcttcgttacgtaatcatcaccgcccatatttatatgcctatttatccagcactatatacattacaagcaggcttaccacctgtttatgatgctcttttatattactttcttataatatcattaacagcttgcaattaacttacaatttattattttcctgttaaatattcttgttaaatacataatgcaaggagcaaaatgtattctgccccttgcatcctattataatatagactatgtaatattcctactatttttacattttaaataaataccataaataaacacgtcattacattgtgattgctatgaccactaccataatcggtatcataagtgctgttgataacggattgagagctgccgctatatcagtcgaaactcccagcttttctgaatatattatggatactgctgcacttgacgagaacactgccgctgccaatatctgtctcataacaagcggtgcagataatacacagaatatcaatattgctgatattattccaattccatatcttaataacaacagatgaagcacctcaccggccgtttccctgctcatattaagttcaaacgatattccaatcatcatcatagcaagaaatccattaccatgtccacagaaatccgccgcctgtataactatatccggtaatctgtaattaagaaaggataatactgtcataatgaaatacacatcaaagggaacagacgtaaaaagacttttaactatttcaagtacgcctatgtctgatttattcaattttatttcagatgtattctgtttcttatttttctggtttattctcattttcgcaatagcatatgtcgtgcctaacgtataaaatgaatctcccacatcaaacatacatagatatggaacacctgccggatagaaattagaaaggaagggaatggctatgcaggccatattaaagcctgaagcatttaccgcatatatagcctgcatatctctttccttatgagctgctgcgagctgtccggctattaccataactgtattcacgccaaagcctataagtatagacacaacataatatatgttaacctgggctccactaaaaccgctaataagcgatgccggtaatgtgacataaaatataaggtttgacaataccctcttatcttccttatggaaaagtcccatcttttttaatacatatgcaagaagcatagtaagaagatatatcgctgctgttgctattattttaatcattcacttcacctcttatatgtatgctattatgttaacatctgtattattttatattattacaatcccattacgcctgtttccggaatcatattacattcatatgctcctgttattacagacaccttagtattagtttcaagccactctcttgcaaggtctacggtcaccttaagatactcaggctctactgtcttagctgtatcactatcggcatgtccagacagccacgcaagtcttgtaattcttcttataagaacaaacataggtatcagtcttttatcttcatcagaaagccttcttaccttctcatagcctcttatccatgcctcctcaagttcgcaaagattcttggaatatgtgacaagcgcacagcccatatcatacatataaaatccatatccgcaatcatcaaaatcaattatctggtcattgccttcataactgattacgttgtaaaaatgcaagtctgcatgaataagtccatacctgtcattacttctcccataatgattaagctcttttttgatattttcggtacatttttcaagaatacggtaatcatgacctgtgattccttcataatcccgccagctcccccatattccatcgccattatcaccaaaaaggttattaatatcccagcagaatctttttattttaactgatttatccctgtttattgactgtatatgaagtcttgctgtaatctctccaagcttttcaagaccgtccagcaaagcctcacccttaagctctccaagtggacttccatataaaaaggagataacagagcagtatacagtttccccgcctgatgtccgcattttttgaagaaatccgccatcacgtccacgatacacaactggaagtctgacctgtgtatccttatgtatttcatccatccatcttatttcgccctcaagctcttctatatcgtgatatccaggtctatgtatacgaaacacaacagggctgcttttgctaaactcaaccttgtatataatattttccgagtactttaaaagacttaccttgtaatcctcttcaacatcatataataatggcagattatttttaacatcctctaataatgattgtggtgtatccttcatagctgtttcctcgtattattccatactgcttactttacatattagttttgttatgtttatttctatatatttatttctatgtttatttctatatttattttttcatatttacagcctgtgcaagccctttatctatcttttcaaacaactcatccataaatgcatcgtcacataaaagtcccaacttcatctggagtgtattaggatgaagtcttgaattatgcgaccatacaccattatcaaataatggcttgcatatagtcttacttgcatcctcacatgcaaagtttattcccataataacgcctctctgggtatatccggtaaggaatccatcatatttatccataagggcattaacacgctctgtaagaagctttgtattcttattaatattatcaactgtttccttacgagtagttatctcaagcaccttcatcgctacaacacaaccaagctctgaattaccacaggttgaaccatgcattcttcctatatcaaacatccagctggctgcctttctattcataacagtcgctgatataggatatatgcctccgccaaagcctttagccgttgtaatcatatccggaacaaaaccctcgtgttcaaagcaccacatttttccagttctcataaggcctgtctgtgtttcatctgctatgtaaagtgttccatacttctcacacagcttcttgactcctgcaagatatcccttatcaggaatcggaaaaccatatgttgcaagaagggattctataataacacacgcaacatcctcttttttaagctctgcctccatagcatccaagtcattaagtggaacctgtacgaattctcccggagctccctgacataagaatggatccttgaatcttgcatcacctgttgatacagacaagcctgtatgtccgtggtaacatccttgaatagatacaacacgcttccgttgtgtggcatatctggcactctttatagcaagatcaactgcctctccaccacaggttgaaaagcacgcataatcaagtccatcaggacaaagctctgtaagctgttttgcaagcatagcctttgttatacctgtaaaatgatgattacctatatcaagttctgtcatggcatctgtaagtgcgcttataatctctgggtttctgtgtcccagattataagttcctccattaatatgtatatcaaggaactttcttccatcaagatcccagaagcaatagccttctctttttcccattacaatagccatatcacggtctatccattcctgtgtttttcctacattccagtgagcaaggctctcctttagtacttcttcctttgttatatctggattattaataaaactcatagctatatcctcctgcgttttatacaatattcagttcactattaacctttccaaacttgttcggtgtaagtgaagtattttttttaaaatccttaataaagtgtgcctgatcgtagtatccaagtctttcatatatctcatatgtgagattattctgaagataatatatcgctttctggattcttatgattccagcgtacttcttcatggatactccaagtgattccttaaatacacggtcaaggtagcgctggttatatcctgtctgtacagctatatctgatattgtcacgcacccttttttattgtgtatgatacctgctatctggacgattatattttttctttctttaaagtaatcagcatatatgaaatgagaagtaaatatatctgccatgtcttcaaatgacatatccttcccgaattgcactgctatgttacttaatgcttccatatctgacacatttcttcttgtacacacaagctcaccagcatagcttttcataaaatcaggcacaactcccggttcgaatttgactccaaatatttttttactgccaccaatgaaggcaaggcttacctctgtatgtgttccgcatacatatggcacaaaacgccccttctcatatacaaactgcagatcaaggcaggcatcaggtatggcgtatatttcctggtctggattatcaatcatatatatcttattaatatatccatcctctaatataagctcatgatagcttacagccttagatataagatatgttttaacctgcatatacaccaccaccttccgcaattcgtacacatcccagacattatttatttcatagatataaccttattatcatcaacagttctgccacaggcatctatcttaaaatcaggatactttatcttaatatagtcctttacaagcttaactgcaccttcaaaaccaactctctctgtattgatagtaaggtcgtagttaacaggattcgtccagtaattaccacctgtataatgttcataatactctgcacggtatttatctgtctgcgtgattgatcttgctgctgtagcctcattaacgcccattctgtccatgatttctttaagtgtaaagcttcttggagcttctatatacagacttattacgtttggtctgtcctttaatatccagtcagcacatttacctacgatgacacagctttctgtatcagcaagctgttctataatctgtttctggtattcaaacagcttctcatctgatacgaactttctgtcctcaaccttaggtgaacgctgcataggaagtcccttaagaaatgctgaaaaaacattctggtttctcagtttttcattaacctctgcaaacacttcctcatcaagaccactcatctgtgatgccagcatcagaattctgttttcataacaatgtattccaagatcatctgctatctgttttgctattctttttccacagctgccaaagcctctggcaactgtaataaccaaattatccatattagtcctcatttctgcgcacctttttacgcataacggattagtaccaggtgtgcacagctgctaatccatcatatgaatttttttactaagcacctttcttaactccgctttccatatatcttgttaagaattcctttgttctttcattcttagggttcgtgaataagatgtctggactttcatcctcaacaacatatccgttatccataaatattgttcttgttgatacatttttagcgaattccatctcatgggtaactataatcattgtaagtccctcatctgcaagttccttcataacattaagaacctcgcctaccatctcaggatcaagtgctgatgttggttcatcaaacagaagcacctccggattcatacataatcctcttgcgatagcaactctctgcttctgtccacctgataactgtgccggatgagcattgatataagctgccattccaacctctcttaagtgctttatagctcttagctttgcctcttccttactaagatgtaatattttctgtactccgaacatgcagttttttaatactgtcatattgttaaacagattaaatgactggaataccattccaacctgtgatctgtattttgtgagtgatgactgtgtgtttttaacctcatcaccatgaaaaagtatcttaccgcttgtaggtgtttcaagatgattaatacatcttaaaagtgttgacttaccagaaccggaagaaccgataatacatacaacctcgccctttgatatttcaaaatctattttctttaaaacctcatggtcaccgaatgactttacaaggttttctacctttataattgaatctgccataacctgcctcctgttcttaagttatacgtttatatctcataaccatctgctcacacacaatcattcattttccagatactctgtagccagctcataatcacttcttccctgaagtttcttttcaatcactgagaatactctgttgaatacgaagcagagaataaagtaaataattgaaataactatatatgattcaaagtacttataataagcaccacctgctgtctttgccataaggaaaagctctgatacacctataacattaagtactgatgtcatctttaagttgttaacaaatgtgttacacatttcaggtattacattttttaaagcctgtggaactattatgtataacatggctttaaaatgtgacatacccatggcaagagcgccttcctcctggcctgcatctactgacttgatacctgctcttactgtttcacccatataagctcctgtattaagtgttgttacaagaatacctgctatgattgatgtaatcataatgtcattctgtcttaatccatagtagataaccatgccctggacaatcattggtgtatccctgaatatttcaacatacacaactactattgcctttaatatatgaagcatgactttctttactatgttatcctctttatgaatctttactgtattgattatgcctacggcaaaaccaagtacaaagcctaacaacgttcctataagtgctacataaagtgttacccacgtagctttaagaaataatgttgaatatttattaaaaatgaaccaggcccattcaaacaaagagccctcggctcctggcgtattcgctgccagtgcaatcattgtattcatatacatatagcaaaacctcctttatagtgcacatatatgctgacatgcacttttaagattagtatttatcccaaaaccattttatttattattacccagtacttattattcagttaaaataaaaaaccgcagcttcccccttaaagacccaacatctttgtcagagaaaaccacggcttatatgttataattgcaagctataatgcaattattttatttattctagttagatgctggctgtaactttaccatttcatccataagcttatcgaattcagccttatcattccagccaagcttatcaagtgcaccctgaactgtatctctcatagggtctccttcacgaaatactatacagcagtcattagaagcaccctctggttctgtgaagtcaaggttaagcatctttaagttattcatagtagcaagtgctgaaacagatgttgtgtaatcaagaataaccatatcagctgtcttgttctgtactgcaaggaaacactctgaagatgtttcataatctgttgctataacgcctcctggaacctcatccttatatggaacatagttagtagcaatctgtgttgtaaccttagctccctttccagcaaagtctgataacttagtaaagtttgcaaactggctgtctgatcttacaacaccaacaatctgtctcttataatatggtgaagagaaatcatatgtttcatctctttcagcgctgtaacatacacctgtcataacagcatcatatgaaccatcctgaagtcccataaggattgaactccattcaatcttgtatacttcaagttcgtatccaagctcatctgcaattctctgggcaagttctacttcgtatccataggcatatccatccgcattcttaatcttaactgctttcttgccgtttccaacatcaggtgattcctgtgtccagttgtatggtgcatacgcacactcaaatgctacctttaatacctttttgtctgaatctgcactcttgctgctgccacaacctgtaagtccaagtgtaagtgacatagtaagtgtcataacaagtaacaacgataaaaacttcttcataataatctctcctttcagcttttccctttaattcctgtttctttttctgtatatatttttcatataagttttgctgccctatgtctatttattagtttacgcaacccctatatccgttttcttcaacttttatagaaagaacttttgtaaaaaatacatacagaaaaggcgccagattccttgaatctgacgcctttgtcaacttgttgttctgttgatgtaaattaaaatagcagataatctgttatatgaattgtaaaaatttcacctcttatatccagttgtttaaaattccactttttttccatagaatatacaatcaaggaattttttcatatcatcctctgatacctttatcggattaactactgttgagccctgcatagagaattcaagcagcttatcaaagtccttcttaaattcttcttcactaactccggcatctatcatccttgctggtattcctacagccttagatgtttctttaaccttttcaataatatcacaaccgattatttttgaaagcttctcatacttcttagccacctctggatcctttttgttataatccatagaataaggcagtataactgcattagcaagaccgtgggctacgttatacatacctccaaaggcatgtgatacaccatgtaccatgcctagtccgctattagcaaatgccatgccagccatgcattggaaattatgcaccttctcccttgcctctaatgttccttcattaactgatacaggcagccattctatgataccctctatagcctctttagccatggcatctgtgaagtcattgccattcttgttaatatatgcttcaagagcgtgtgtaagtgcatccattcctgtttctgccgctatatgtgcaggaagcgttgctggcagtgatggatcaagaatggctacatctggaaagatattaacggatctgatagcccttttaaacttctcatcctcaaatgttattacgctgacctttgtaacctcagatgctgttcctgatgtagatggaactgcaacgaatttcgtcttgaattcaagttcatcaagattagtactgaagacgttatcaaaattcacctctggatgttcatagaatataagcataacctttgcagcatctatagatgaaccaccacctacggctaacagacagtccggctgttcttttcttacgaactcaagtccatcaagaaccatatgtgttgtcggattctttccgattccactatatattgctacatctgctcccgcctgattcagtatattagtcaccttatccagaacgcctgtctttttcatagactgtccaccagttattataactgcttttttacactttaatgttttaagatattcaagtgcattttctcctgttacaagagcatcctttgtaaatgttattgttttcatctctgtgttatacctcccactttttatttttcataaaataatgatgctttattaaacataacataagttttatatgaaattatattatagcaaaggcgccacctaccatatggtaaatgacgcctttgtccttatatgtgtgtactatagcactgtatattaaaaagtgcaagcattttatgtgcttatttctacaactatatttctacgatatatcactacagcagatacttcccagttacacataatcatctttcagacatattctcctgcctataaacaatgctgctatatatataatcatacttattacaattccagctgctacagatattccatctgcacgatatgcatctgttcttattatcatcgatatatttcctaacatgccaacgctgacaaaatataccgataatatatctatcagcataactacagctatccctagtataggaaaaatgcactctgatataaccatctggacaagcgatatcataactgaatatataagtggaagaactatcataaccagtaacatcttacatgaatatccgtaatcaggtttataccttggaataataaacatattataatcaatctcatttttaaagccccctccaggcacggctattattgcagacaatacccatattattatatacacagcaagcacagaaagcatattccatatacatttactaaaccaccataaattcttgtcaccactcataaccagataatatatgccaacattctttttgtcttttgatatataatcaaaagtcacaaaacaacacataaactggattgtaatccagacataaggaaataaaaacaaatcattttcagaatcacccaatacctggaatcctcttagaatataaaaaacattatctagaaatcctggaaatacgttagttttattatgcatttccacattaaataatgcaatgaatgtaaatatcagaaaaatacatataacgtatctatatctgttataattaaaccctcttatgatatcacatttaataacattccatttgttatttttataatcatattgcttttctttccacgtaccatccattctatccttcctcaccctttccatacagctgtcttgcttctacctgtatgtaccctgcaagaaacagacatgtgtcagctattatcaaaaataatatctttcttacacaaacacctgtattaacccagtcttccatatgtataagaacatgtcggtaaaataatcttattgaaagttcttcacctgtaactataaccagaattaatgttgctattatcctgctttctgaaacattttcaaccagaagaataaacatgcacataaaaaagcttaaaagtgatattgatatccaacaaaataaaataattgatatactattaaaatgtatctgtcctattccttttgtatatctgaatgtcaacatataataaaaactgccctctttattccagttcataaaagaaaagccccttaagtaaatcatgagcattacagctgcaataacatatgccatatttgtaaagctatataaaaagcttaacccacaatgcattccccatatatatcttttagacttatatttcaccatatacataggcgtattatcaatttccaacagcttaagattactaaaaactaatacaaacaatataagaggaaatacaagtccctgaataacaagtcccgatacatccataacacaaaacccgtctggaaatgtatctgaattaatcataatcattgcctgcgttaaagcaactgctgttaacataatgattattttccatgttattccatttttattaatatacatatatttatatctgtgcattaacatctgatgcctcttttctgacctggatatatatactgaatctattactttagttatttctaatttaaaatataatacactattggattctggcttactactaactgatattttatttttttcaccttatcaacactataattattcattaatttcccagttataatatatggatatactatatcgtaccactcaccttgtacacagctgtttctatcaaaagaagtgttaattgtcttgtacatttccagacaaatcccctgtgataatgcacctgactgaattctgaaattagactggctctttcgtatttctgaatcggtatcatatcttaccctgctatgaattaatatcatactatattcattttccatgctatccaatagctcatcaatatcacctaaatatgaatactcttcttttagttcctcagagcttaatatttcaaccttttccgggacaaccgtatacccacctgttgaatactctgtatttaactttaattctaaaatatttcttccataatcaaaatgtatgttaactgccgctatacacactacaacaatgattacaataattatgccaatatacttactatacttcttcataatgtccaccatttctgcactttttgactcttggatttactttcgtttgtgcgaaactccagattttatgttatcccctatactatacttttagattttgtttttatattatatgtaatcatggtcagaacaactataattccaagttttattataacgttctctatatctccaacctggaaatttggaataatgtaacatactctcatacttatttttccaataaatacgctaaaaacatattcaaaaaaatatataataaatggtgatataacaaccatcaggctgttatctaacacataagctgcgatatatcctatacatcctagtactccatacataatcgaatcaagcaatactactattatacaatatataaatggactgctgtaaaacaattctccaaatatactactgtttcgtacactatatgatcccgctgcctttaatggatgttctacaggcagtatcatagctgttataacaaatgataataccagtggtattgctactacgagaaatgaacttataaactgaaccatcatttttgtaagaaaatagtattttttttcaattcttgtaacaacattattaatataatttctttttatatctgtataaatacttatagtgtatggtaatgatatcaatattggaaatataaaattaagcaccatatgatatcttgaagttgatattcctatccatctgttatataaacccggtgtctgatattcatatgttttttggtattccgacatatgcagacggacaccaatggcattttgatatatatccaataaaattattgccatagaaacacataacgctattatcattcctttattttttaatgcccgctccatttcgttcttaaacagatttttcattttaatatttctccattaataaaattcattcatttttcttttttaaataaatgtatttatattcattgtagcttattccattattataaatattcagatatatatctgatgccgcaagctcatcactaattacgtatactaaccttacctgaccactttcaccttgtttcagagtcatattacccctgatattatctacattatctcctgtataatatctttttcttgcttcttcatttgcttgtaagacatctccttcactttttacctttattcttgaatccaatgccagatttcttatcccatctttagattctgaatattctatattagttattttaacgtcgactataagataataataatctgatataaactcattctcatttaaaagctttgccttttcttcttctttataccaggctggttttattcctgtatcgtttattcttgacattgtaactccaagacactcaactaatgatttatctgagctgctcatttttccattcttgtcatatgtaattactgacacctgaaattcttcaccaatatttacaaaattagattcatcactaatattcagtttagtagaaacaggcttgagacttttatcttcattttttgaatcattcctactctcaattttattatcagcatttgaatttcctattatttctttataatatcctttatataaaaatataaacaatgccgctaaaaataaaacaacaagaataataccagcttttcttttcattttctctctccattaattcaattctactcttatagttttttagttatatttgaaagtactttctagtgttatattactatattattaacgaattacaatatctattgccccaatggttaatattcgctactgaatggttatttaatatatttgaacttaatatattcagatgttataatttacttgtttttaaaactatggagaatgattatgaatataatattatgtgatgacgacaaccttataattaatgaactaaaatcttttataaaacaatattttacagagcataattatcctgaaccctgtatatattcatattcaaatggggcagaattattagcatcagataaatcagcggatattatattccttgatattgaaatgcctggaattaatggaattattactggaaaagaattaaaaagacgtaacaataatgttataattctaatactatcttcatatatgaaatatcttgatgatgcaatggatttcggaattatacgatatctttccaaacctattgataaaatcagactttttgatggtttatcaagagctataactcttgcaaattcctattcttcaaaaatattactagaaacacataacgaaacattatctatacaagctaatgatattatatatgttgaagttcttaataaaataaccattgtacatactatttatggagcatatgaatcgttgcataattttgattattggctaaaaacactaaagtcaactcattttttccaatgccacagatgttttcttgttaatatgtattttataagttcatatgatgataccagtatttacctttataacaatacttatactgctctaatagcaaggcgtaaaaaaaatgattttcaaaaagcttactctatgtttattgaaaataatatgtaaaaacgaggacaatttatgttatttaaaataatctattatcttatagcatattttatagttgcatatgctgtatggacctattgtaatttcacattaacaagtaaatattctttgaatcggaacttttttcactattgtatattttttttatttatttttttatcctctttttttgacaatacatatttattcatttgtatattttttatacttacaag

SEQ ID NO: 430 - DNA, 1571 bp, Unknown
  gut microbiota DNA sequence
acttcactcttgatgatatgagcgctgatgcacttggtgtaggtgctggtaaggttgatttaagtacacaggataaggctaagacagctactacaactatcgatgcagctatcaagaaggtatctaaggcaagaggtcagatgggtgccgttcagaacagacttgagcatacaatcaacaaccttgatacagcttctgagaaccttcagacagcagaatcacgtatccgtgatacagatatggctgaagaaatggttaactacagcaagaacagcatcttagctcaggctggacagtctatgcttgcacaggctaaccaggctaaccagggtgttcttacactccttcagtaatttaggcaatatgtagctaatacataagaacagcttatttataaaagtttgtcgatacatgttaagtatatttaagatgtaatcgttataatccccccattcatacaacccatgtgagtatgaatgggggatttatttttatttaattgtaattattttgctaattattttattgaaaagagaggatgtatttataattctgaatatattaaatgcggtctgttaatagtgtgttgaaacacaaatattaccaattacaacatttatcctgcaacatacaacaaatgtataaaaaacatattgtaaatatacagcaaatgtgtttatataataccaatactattattactagtatgacaataaaaaacgtaattaaattagtaataaaattagtaatgaaattaaaagtacggagggtaaatacctctgctcctgcaaaggcagtcgcattttacttcgtaaaactaggaggtatgaatttgaagctaaacagaaagttcaaggatacattgttcaggaaggttttcaataataagagggatttgttaagtttatacaacgcattgaataatacagagcatacggatgagagcctgattacaattaacacgatagaggatgcaatatatatagggtataagaatgatatttcatttattataaacagcgaattgaatctctatgagcatcagagcagcgttaatcccaatatgccggtaagaggtcttatatattttgccgagctgtataagggatatatcgatcaaaataatctgcttatatataatgagcgtcttgttaagctgccatttccaagatatgttgttttctataatggaacagaagagcagccggaagagcaggaacttagattatcagattcatttgtgcaggtgccagaaggggaaagcttaaaagacacagcaggtacagaggctgataaaacagataaaccaagtgtagaagtagttgtacaattactgaatatcaactatgggtgtaatcaggaactgatggaaaagtgtcagaagctgatggagtattccaaatttgttgcacttgtaagagtgaaaagcgatatgttgacggagaaatataagaaagaaatgaagtcagttaataagaaagaaatatttgcagaggcagtagcacttgcaattgatgaagcaatacgcgataatgtactaaaggatatccttagtaaaaatatggcggagg

SEQ ID NO: 431 - DNA, 563 bp, Unknown
  gut microbiota DNA sequence
taattattcataatgcttggtatgtgtcatatttccattggactataccttcctttctcactcaattccttacatctatattaacattcttaatgaatggtttcgatatataatctatctattaatatattgtcttatgaacttgtctcttttaatatagttaatatatatcttttatatcgattattaatatgtttaaggtcttgtttgtttgtaactgtatattaacatgcacttgttgatttgtcaactcttttttagattattttttattattttaaaatttgtcattcagttgtttgatagtaatgcgaattgtttgaattgtgtcaatattgcagtatattgtatacgctattatgatgattgtacaatattaaaccctcatatattgaactccctatacagcctttctctttcactttcatctgtcacctttgctatatcttccactctgcctcttttctttagttccactactagccttgctaatttctcctctccttttatctctcctcttgcttccccttcctcatagctctgctttttcacgccatctatat

SEQ ID NO: 432 - DNA, 728 bp, Unknown
  gut microbiota DNA sequence
gagagggggagtagccttggctccagtaagaagttatacgaattggaatagcagaactacagatgaagaagaacagattgagccttatcgtaagtactttttcatatgtgagggtgcaaatactgaaacatggtatttcaaaaagttaattgatatccgaaaagagttaaatattcatccattgattgatatccggttacttgaaaaaacagagggagacagggacatttcatttccaagacgtttgattgaatttgcagaaaatcagaaagaaaatccggaaatagcgtttgataaagaacgtgataagatgattgttgtatttgatggagatatttttgaagaaaaagtacttgattatgatgaactagtagcagaaggtgaaaagaataatatattagcggttagcaatccagcatttgaattgttcttgctgttacattatgaaaattcatatgaagatgatattgagccgaatgctgaacagattatccagaatgaaaaagatggacatcagacatttatctataagttgttacttgccagaacaggaatcaatcccaaaaagaattctgcaattggagaactggcgaagaatatagagattgctatcgagcaggaaaagaaaatcaatgaggatattcatcagtgtaagggacagattacatgtaatattggtcggattattgatgatattcggaatgatgatggaaaataagttgttagat

SEQ ID NO: 433 - DNA, 201 bp, Unknown
  gut microbiota DNA sequence
gaccaagaaaaattctgttaacagatatcacgtatattataaatggaaaagcaccccggtgctatatgtcaacaattatagatgcctgtaccaaggaactactgtcatgggttctcagcgaatcattagaaattgattttgtattagaaacagtaaaacagttaatagaaaaacatggaactgatttaagcacagaaacat

SEQ ID NO: 434 - DNA, 223 bp, Unknown
  gut microbiota DNA sequence
ctgtcatgggttctcagcgaatcattagaaattgattttgtattagaaacagtaaaacagttaatagaaaaacatggaactgatttaagcacagaaacattaatacatagcgatcagggttcccactataccagcattaaatttatccaattgttaaaggataacgaactgagacagtctatgtcacgtagagcaaactgttgggacaatgctcctcaggaat

SEQ ID NO: 435 - DNA, 970 bp, Unknown
  gut microbiota DNA sequence
ctgctcttaaaaacttctctgggaattaccaaagatgcattgattgttccaacactgaccagattcatattgattacctgtccattatttttcatattcaagatgcaaaatacctctctgtcatattgagataactccttcgccatcaattctacaacagcctgtggactgtccaatatctgctcactataaagagatggttcttttaccaaacggatattcacaacttccaattcattctccattgttctgatctccttttggaaattctacaactagaagaacattactttctgaagattccacatatgctttcaattgtgataatgtcatttccaaatatttaggttgttccaccataatctgctcctttcgtttcttcccttgcttctgttttctctgacaaatagcttatcactttgtttgccttaatgcttttctgtaactcactgataatgcacaggtctgctacatttactcctggcaaagcaagcatttcatccatcgtcatattgacaatctctttctccgttccgtatccggcatcaaataaacgctgtaatacttttattgctttctgattctttcccatttcaatatcaaagggcagcttatcgccgccctctgttttactccttctcttctttcttttcttcaattcctaatctcttaacctgcttctttttattccagatacgaactcccgtgattccggctgccgataataacagaatggctatccataaaactgcattcgcagtatcgcccgtttttggaggattacttgtctttgtaatagtacccggtgtctctggagttgatgtttccggtacttctttgatagttacggtctgaccttcattgtcaatatccttatgctctgttacctttttcggttcttccggatttgtcatatcatacagttcttcaaaggttacaagctgctttcctccaagcgtgctgccgtcga

SEQ ID NO: 436 - DNA, 417 bp, Unknown
  gut microbiota DNA sequence
catcagaacttggcggacagaatctggttacatttgaagaattatacgatctgaagaatccggaagaacctgtaaaagttgcagagcataaggacattgacgatgaaggtcagaccgtcctgattacggagcgaaagatttcgattcataccacagcaacggataagaacggtaagaaagaggtggaagccggaaaagatctgacgattgtggatacggttactttagagggattggaaattggtacgaactataagttgtccggttggcagatggttaaggcagaaaatgccaagttgctcattgatggcaaagaggttaccaatgattatgaatttacagcggataaggaaaacatggaagtgcagattgagtttactttcgacggcagcacgcttggaggaaagcagcttgtaa

SEQ ID NO: 437 - DNA, 2800 bp, Unknown
  gut microbiota DNA sequence
gaggatttttgcctccttataattttttctattacaaatccgcctacttcttagccgatttataagcatagtaaaatgccttcttgatggcattgcttgatttggttgcaccagatactgcatcaacacctgatgtactctggtttgcaagaagctgtgcaggaacctttgcatttgccatattaaaatactgcacatcctgcgcacccgcttctgattcagcagtaaccgatgtaatcgtatctcccgatatgactattgtaaccgttacattgtagttataagtctcacacacagcggaacctgtataagttccatctgctttaaatgttgtattagccgatgcgtcactgcctgaaccgccgctcagctctccactattgtcagaactattatccggctgagctgactgattaccactgtcagaaccattatccggctgagctgactgattaccactgtcagaactattacctgatgaattaccagaagcattatccgaaccggaattattactatttcccgacatttcatttcctgcaccgccagcctgtgagtctgactgtccatctgatgaagctgattcttccagactctcttgtgttgttccttcagcatctgtcttagccgtactgctctcaatctctttgaccattgctgcaactgtctcttcgttaaagaaatcgttccattcctcattgtcttccgatgccgacactgtctgtcttcctgcaaagcacgacaccatcatcactgcacatataaccaatgccagtccatacagaaccgtctctggtttcttaccgtatgtctttcctgctcttgctgcctttactgatatagcctttgatattctcatagctgcatatcctaagaaaactatgctgtagataactacatttgcaacatacatgccaagtccaagtctcgcataaggtatgttaatgagcataatgtgaacatacataagaccataaaacacatatgctgtgcgctgtaactgcttccacttcttagcctgcatcttctttcttacagatggaaaagatgtaactgtaagcacaatcattatagctataagcacaagacttattaccgcagctgcaagctgtgtggctgataacaggcttgtcttagtaaataacattctgaaatatgtcattccatatgtgaaattatgacacaggacgagtattgccgctgtaattgacaactcgccttttatcttcataagtggtgcaatcagcttgttgcccttaggcagtgcgccagtgtacattaccacaacaaacattgccgttccaagagagccttttgcaaatattcctaatatattattctttacaaacaaatgcattggcaggaactcaagcaggaataccgcaatagagattactgccgcacctatataaaatatattggcatatttcttaagcgaatccttgagaaaatatataaataaagctacgattataagtgatattataaataacatgtctgctccttctggtctgtatatcttggttagctacctttaacaagagtttattaatctatctgaaattagttattgctaactgctctatagaatatatttttctcaccacatttgtcaatacagacagttaataataattctcattaaggctgtctggtaattatttccttattcatatctgttgaaaaaccgctggcaatgccctccgatacatacactctgcttccatcgaaaagtatcatatcaaaatctatatcaccgcttctgtaaagttcttttgcaccgtccagccccattgcaaaaagtgccgttgacaatgcatctgctgtagttccatctgaatacacaattgtaacagaagtcaggtcgctgtctgaaggataacctgtctgcgtgtctataatatgatggtatacttgtccatcctgctcaaaataccgctcgtacccacctgatgttatgacagccttatccgtcgtgcttaatattccaagataactattctcactagcaggattctgtatggcaactctccagtcagaaccgtccgtcttagttccaagcacctgcacattgcccccaagattgacaatcgcatgctcaatgccgcaatccttcataatctggataacccgcgaagatgtgtagcctttggctataccaccaaggtcaatgctggaaccacctgtcagcgccacctgctgcccgtttactgatacatttgtataagaaacacccttaagtgcctctgcaatctcactgctttctggcactctgtaattctttgtcgtaaatccccacagctccataagaggatatatcgtaatatcgaaagccccattggtcttttctgatacctgcattgccctgttcattataaatgccgtttcttccgatacttctccgcttccattttcatttatcttagtaacatcactgtccgcatttcctaccgaaaacattgcatcaagccggttaatctcctgcaccgccttgtttactgcctcctctgaattacttccatatgctgttagtgacatatatgtatccattgcaaatatttcctgtgtgctctggtctggctgtccttttacagcattttctttattagcgcatgatgagagcactgtcatagcagtgattcctatcataactgttaaaatgtattttctaagtttcataattatctccgtcttacataagttagttctttgaaactttaaactatattggggaaaatgtcaatttatttcgttatcacaggaattttatttgcggagtatttataatccatacaatatc

SEQ ID NO: 438 - DNA, 2533 bp, Unknown
  gut microbiota DNA sequence
atataaaaaattgctttgaaaaaagagaacctttggaaagaagtatgcataatcaggcaatgcttctgtttcatcagtatatgcttgttggtgggatgcctatgcctgtagtagcatttattgaaagtaaaaaagattttacagaagcggataaagaaaaaagggacattcttaaattgtatcgggaagatattatgaagatagatatgagatatagaagcaaagttcttgcaatctatgaccagattcctggattcctgtcacagcatgaaaaaagagttgtattcaaaaagctacaggatggtagttacgcagaccagtacgaagaaacatttttctggctgtcggattctatgatatctaatgagtgttttttgtgtaatgatcctaatgtggggttatcattaaatgagacaagaagctatgtaaagtgttatatgggagataccggtcttttggtaagccatgcgtttgatgagaatgaattacttgaagatgaagtgtataaacagatattggcaggcaaattgcagattaatgaagggatgctttatgaaaatgcaatagcccagatgctggtatcaaatggacataagttatatttttatacacactataatgaaaataagcatcgaaatgatatggaaattgattttattatttcaaataacagcagattaaaatataagatgtttccgattgaagtaaagtctggaaagcaatataaaacgacctcattaaataatttcagagaaaaatacaaggagcgcataggggaaagttatattattcatccaagaaatttaattgtaaaagatggaattatatgcattccaccatatatgacgatgaatatataaaaatctgacatcaagtattaatttatctaccaaagaaccggagcggaagtgaatccctaaaaggattcaccccgccccggttctttggcttgtttatagttttattgtgatataagcgtatttaattatcttacattcttaatcttgcatctgcctgttactgcaacacctgctgttaaagcaagaactgctgctgcaatgtaagccatcatattatttgcatcaccagtcttaacatctgatacagatgtatctgacgtacctgcttctgttgtgttatcagcctcttctgaacctgatggcgtgccagcctcaacctttactaatgcattgattgctgctgtaagatgctctattgcctcatcgacatctgctttatattcagcaactgcaagtgcatcaactgcttcttcatactcaagcttcatagctgcccaagactgggctgtgtaatctgcttcattaaggccatctgctgctgcaataactgctgagagctttgctttatcttcttcacttgcaggttctttaaccttaactatattggcatctgttgcttcaaaattaattgtagtatcagaatatcctaatgcatatactgtaagtgaccagtatcctgttccgtcataacctgctggtaactggcagcgtgctgaatcagtaagtccaagctgaattcccattactttgtgcatccagttatctgcagcaaatttagttccatatgtagcaacagcatttgttcttgttgcatcatttccataatatgtccacttaacagcctgcatcatagcacctaatgcgccataaccatcaccattaatatcaactcttaagaattcaccgtatgaacctgtagcatcttttactgtagatgtaatgttagcagccacacttatatcctgctctgcaaatgactttccacttccagtctgtcttgcagagaatgaatatgttccatctgcattcttaactgctgtcttaagtccgttagtatctgcgttaactgctgctgtatactcatatgagctaagcttgttctcactgaatccaccgtataacttttctccattcttgacaactctgtaatgctgctcaaaatcagcaagatcagatgtcttaaccttaaccggaacatacttaataccagttacttcatatgatactaactttgttgttgtaccatcagctttagtaattgtacctttgttgtatgaaagctgtgtaccatctgtaagtatcatctgctttccatcactactccagccggcaagctcatacttcttaccatcttctgtatcaattgttgccatgcactggtagcttcctctgtgaagaccatgattggttgtagctcttgatactgtatcaaaaccgcctttatcgtactcaccatgtgtatccttctcattagatgatgttacatcccctgcgttatatacgccttcgtttgcccagtattcctgccatgtaagaccagcatatacatatgtatactcgtcatctgctgcatatgtatcagacacaagggctggaagtgctgtaacagcaagaacagtagcggctgcaacagcagcaatcttagtaaaaatgttctttctcataaatcctccttgttttgcgaagcaaaatccgaacccattggtgaggagaggatttttgcctccttataa

SEQ ID NO: 439 - DNA, 12180 bp, Unknown
  gut microbiota DNA sequence
agagagaaacttcaacaatgccaggttcagcaggttcaagctggtattatatgagatatatcgacccagataatgataaggaactctgtgatccggaacttcttaagcactggctcccagttgacctttatataggtggaccagagcatgcagttggacatcttatgtactcaagaatatggaacagatacctctacgacaagggtatatcaccagttgcagagccattccagaagctggttcaccagggtatgattcttggttcaaacggtatcaagatgggtaagagattcccagaattcgttattaacccaagtgatatcgtaagagagtatggtgctgatactttaagactttacgaaatgttcatgggtcctcttgaggcttctaagccttggagccagcagggtgttgaaggtgcaagaagattcattggtaaggtatggaatttctttacaactgagggtaacgttgttgatgaggatgttaaagagcttgaaaaggtatataaccagacagttaagaaggttacagatgactttgaaaagcttggctttaacacagctatcagccagatgatgatatttatgaatgctgcaactaagcttggcagatgctcaaaggaatatgctgaaggattcataaagatgttctcatgtatatgtccacacgctggtgaagaaatgtggagtgtattaggacatgatgatactatagcatatgaaagctggccagcatacgatgaagaagcctgcaaggaagatactgtagagataggtgtccaggttaatggtaaggttaagggaactatttctattgcagttgatgaagctaaggaatcagttcttgaaaaggctaagaaagcagtagaaggcaagattacaggtaacataattaaggaaatctatgtacctggtaagattgtaaatattgttgcaaaataaaagctatattgcaggttttgcatatattcacataacaaggatttaactataaacatggccctaattgtaaaatgtcaattagggtcatattcacatgtaagctaatcaatcattctggtatatttccacctggaactatctgcttgtatatcatttcacaatcctgctttgtaaattgtataccagcctgttttgccttctggcttaatgcgaatacaagtggaagcagttcttccttactttttcctttggatagtgtcttgaattcatttaatagcagctgctttctaaaatcagtttctgacataactatattcttacctctgtcaatatgtttacacatatagatatgaagtgtatagaacaaatatgtatatttgttagcagtttaacagccagattcatcatctggattcattctggcttacattaaagtcgagagaatcaagttgttttatatattcgttatacagatctttctggttggaattcataatatttccaagcatgtcagaagtatttatggaactgttacttttatagttattgtttccatcgttattatttttatcgttatgaatttcatcgttattgctagaagaattattgctggaagagttattaaatatatccatcatattaaacatatcagacattttgtttaagtttctgtatgtattaatcatatttactatatttccagaacaataagtttttactgtatttataagctgttcgtttccaagtatttcgcttatgggagtgttgaagtttataccactgctgttacagcaggatttaaatatgttacagttgacgggtgaactatagaaacgtatcgtgtttttaagttcactggtacggataagagtggaaatactgcgttgcatattgtattccataaagggaagaatagctttaagaagctggatataatcaggctgggttatcatatcaaattctgtcatgggaatcgacttagacataatatacagtagtcctatattgatttatataaatatattcagaaaaactaagcatatgacatcaatagattaaatataagcagttttaaggcagctgcagacaataaaaagcagccatattgctttacacctgtagataatgtgaataatgcgtgcttataaatcaatggcaaaatatgaagcaggtgtatgcaatatggctgtaataaaatattatatcagtagataagaattattcaggcaaatgcagtctagcagccacagccgttattgcatccgcagccaccattgcagccacatccaccaaagcctaatgcgttgccgcagtcaccgcagcctccacataagagaagaaggcagataagccagatgcagttattgtttccacagccgccacatccaccgcagccgttattgcatccgcagccattgttatcaaaaagaagtaagagaataataagccagatgcagttgtttccaccacaaccacaatctccacatccgttgcatcctccgcagtttgttgctgctaaatcactcataaaaaatcctccgattaaaacatttacaatacaataatatgaatgcaggcttgttagtgttacttattttttttgaaatattgcaatatttataaaattattatatcatcaaggggtatgtgtgttcagactatacagatacatagataggagcgtaaggatatgaaagtatcagttattattccttcactgaatccggatgaaaagctggttacagtagtggattcacttgtaaagaagggattcaaggatataatattagttaatgacggaagtgacaagagccatatgtggccttttgaaaaagtgggtacgtatgatgaatgcacaattcttactcatgaagttaatagaggaaaaggaagagctttaaaaactgcctttgaatattgtataaaaaacagggaaggttatattggagtagttacagtagatggtgataaccagcatcaggctgacgatataatgaactgttgtgaagctatggcctcgcaggataaggttgtacttggagtaagaacatttgatggagatgatgttccttttaaaagccggtttggcaataaccttacaagctttgtgtttaaagctatatgtggactggctatatcggatacacagacaggattaagagccataccttataagtttctacagaccttttgtgatattgaaggggaacgttttgaatatgaaacaagaatgcttctggagtttaagaggtcatcgataccttatatggaggtgcccattaagactgtttacatagaagaaaatgcatctacgcatttcaatccagttaaggattcaataaaaatatataaggtcatattcagatatactttttcggaaacagcgttaaagtatgtgctaagctcacttgcatcgtgggttatagataatttaatatttaatttacttgatatttttcttgttatgtttacaatatcattaaggctgttgttcagcacagttgtggcaagaataatatcatctgtatttaattttacaatgaacagaaaacatgtatttaagtcagataaagatgttaaggcagcagcagtaagatattatatactgtggttctgccagatggcagtatcatatcttttcgtctttttgtttactaaaatgcttatgcttggtactacagcagtaggtataaccaagataattgtagacgttgttttgttcgttgtgagctacaatatacagaaaagatgggtatttaaataaattttattagaatgaggaaaatgatgaaaaagaatgtattaaaatggttaggccgggttagtgccactttgcttacgacaatagtgattcttgttgtcggtctgtatggtgttatggctatgcttgcatggggtccatcaaaggttgcaaagaaacagtttattatgtcactacaggagacaggagagcttggttttatggctaactggttctgctcacaggaagaaatcgacaagataaaagaagagaattcggttaaagatacaacagatataacagattcaagccttgttgtaataggcaattctgaaacaagtgatgaagaggatctttatgtggttgatataaaggcagaagcttacagtggaaagcttatggttataaaggatccatcaagactttttgttggtactgttccagagtttaagcttgaaaagggctggacagtttcagagatagcacaaagatatgatgcagttgcaggtatcaatggtggagagttcgtagattcaacaccacagacagcgatgcctataggacttgttatggttgatggcaatgtcttaaaaggaactgccggtgaaatgtatcatgttactggaataacatttgataacaagcttgttatgggtaatatgacagctgcaaaggcacaggagcttggaataagagattgtgtcaatgtaagcagtgatataggtccatttctgattattaatggagaagctcaggatgttgatggtgttggtggtggactgaatccacgtacagctataggacagagagctgatggtgccattcttcttcttgtagtcgatggaagacaagttacaagtcttggagcttcattctctgatctccaggatataatgcttcaatatggggcggtaaatgcatctgctatggatggaggaacatcaacacagatgtattataatggtgaggttatcaataagccatattcgccaacaggtccaagaacacttccaacagcgtttttgattaagtaaatgtgataatggaatggagaatatatgtcagatatgaataacaacgtaaaagataataagaagaatctttttaaaagactttcttcatttaagaaattcctgataatatatgcatctgcattgatagttataatagctgctgcattagtgattttacatggttttcttaaggattatgagtcaggacgtccggctaatacgatggatacgcttgttgcccatattgaaaagggaaatgtcggagagtggattaagaaaagtggattactcggtgaatttgaaacagaaagtatagtatcagattattttagagatacatttgaaggaaaacagataagctataagaaaaaggctggagagtattcagaaagcacacctgtgtatgttttgtatgcagatgatgataaaatagcaagtgtgagtcttgatgaaagcaggaaaaatgcacataagttcacagaatggaagatttcttccatcaactttaatgttaatgcacaggacaagagccatgcggttaaagttacagtaccaaagggaagtgatgtagaactgaatggtgtaaaggtatcgtcagactatataacaggtgagagcagcgtggatttgtgtaagcatgtatccgactatgtggatacaccagttaatgatatatatgaaattacaggtcttttttcagctccagacgttaaagtgtattcatctggaaaagaactttctacagagcttgataaagagggctatgttgcatattatcctggtgatgattctttgctggaagaggaaaaacagcatatattgcttgttgctgagaactatggaaagtatatgatcaacagaggcagccttacaactttgtctggttatatgattggaactgctaaagaatatatgagtgatattccggctatagatgtttatcttataggaaggacattcacatacaatataactgatgaaaatataagtaatttcagaaaatattctgatgattgttattcatgcaacgtggattacaagcttaatgtaaactggtcatcgggaagtactacatatgatattgcattaacttacatattcgtaaaacaggatggtaagtggatgttagcagactttaagatcagataagaggattgtaacaatgtcatctaaaaataaacgtaattttattctgcagggttccatacttgcaatggctggaatatttgtaagaataataggaatggtatatagaattccagtcctgaatattataggaagtgaaggaaatggaatatacggaacagcatttaatgtatacaatataatgcttgttctttcatcatatggacttcctatggcagtatcaaagcttgtttctgcaagatttacaaagaaaaagtataagagtgctgctaaagtactcagatgctcagtaatcataggagttatcatgggtggagcagctgcgcttcttgtattttttggagctggctttatagaaaatgtcgtatatggtggtggtatacctggacttgcgattccactaagagtactggcaccaactatatttcttgttgcaatattaggggtgcttagagggttcttccagggacagggaactatgataccaacagctgtttcacagattatagaacagcttgtgaatgctgtggttagtattgtggctggatatatgcttatgaaagcatatgcatcagcaagtaataccgcagcatatggagcagcaggaagtacattgggaactgctatgggagcattgacggctcttgttttttttgtatttctgtatatgttgtaccgtactaagtttatgaggatggtcgcaagggataatagtcctgattggagagatactaatcaatatatatataagactattattgtaactatgctgcctattattcttagtcagacattttatcagataagtgctcttttagatgatgttttgtttagtaatataatggttgtaagaggtgcatcagctaatattacaagggatcttggtaatttcagctcaagttatacacttcttataagtataccgcagggtatagcttcggcactttcagcatcgatgcttccaagtattgtggcctcttatacaacaggggataaggagagtatatattcaaagctgacaaagacattaaagactaatatgtttgttgctgtaccttcatttataggattatttacgattggtgagccgattatcaggcttttgtttgcaagatatgatagcgtgcagggtggcatgatgttaaagcttggagctgttgctatagttttttatacactttccacagtcacaagctcagcacttcaggcagttgataaagtgaaatctccgatgtatcattcatttatatcacttgttgttcatatagtgcttgtagtagtgttgttattcacaacagatcttggaatatatgctcttgttataggtaatgcttcatttcctgttattatatttatattgaatcttataacattgtaccgggaagagggttacaggctgcctgttatgaagatatttgcaagaccatttatatgttcagcatttatgggagtgttcacaatattatcatataatatgatgtataatgttacatcatcaaatgctatttcagttattgttgcacttgttgttgcacttgtaacatattttggcttatatggaattatactaaagaaatttagaggcgttttatagttatgtgatgtttatggtgaaagaatttctgaccatggcatcggttaaaggaatggaaagagaggaaagacatgcagaataaattcacagaccaggcaagaagagttcttgaacaggctgcatttgctgcagaggttaatggacattgttatataggctcggagcatttgctgcttggacttatacaggtagaggactgcctggcaggtaaggttcttttaaacaatgatgttacagagaataaggtgcttaatcttatatatcagcttatagcccctgattgcgcagtcagcgttaaggagccggcagtatatactccaagagttaaaaaaattcttgtaaatgcaggtaatgaagcggcaagattcaaggcagacagcataggaactgagcatatattgatagctatgttaaaggaaaccgatagtgttgcatcaagacttcttaatactatgggtgtatctgttaagaaaatatatacagagcttcttgaaggcatgggagaggatgtatcacgtttacgtgaggatttccagaatggacgtatcaggcagaaggataaaagggcaactgccatgctggatcagtatagcagggatctgacagagcttgcaagacagaaaaaactggatcctgttataggaagagatgcagaaatccagagagttatccagatattatcaagaaggacaaagaataatccatgccttataggcgaaccgggagttggtaaaacagctgttgtagaggggcttgctttacgtatagtggaaggagaagtccctgaaactatcaaggataaaagacttgttacacttgatttatcaggcatggttgcaggttctaagtacagaggtgaattcgaggaaaggataaagagagttatagctgaggtaagaaatgctggcaatgtgattcttttccttgatgagattcatacaattataggtgcaggcggcgctgaaggtgctatagatgcatctaatatattaaagccttcacttgcaagaggagaacttcagcttataggtgcaacaacacttgaagaatatagaaaacacatagaaaaggatgcagcgcttgaaagacgattccagcccgttaaggtagaagaaccaacagaagaagaggctgttgatattcttatgggacttaagagcaggtatgaggaacatcatagtgttaagataacggatgaggctgttaaggcagcagtcaggttgtctaaaagatacatcaatgacaggttccttccagataaggctattgatcttatagatgaggcatcatcaagaacaaggcttttagcatatgctgtaccagcagatattaaaaaacttgaaaaacagattgaagagctgtcacaggaaaaggaagctgcgataaagaaagaaaaatatgatgaagcctctgatataaagaaacagcagacaagaaaaaagacaaggcttgaaaagcttaagaataagtggagagaacagatggatacatctgagcttgttgttgatgaggatattatcgcaaagacagttgccatgtggacaaagatacctgtcacaaagattgcagaggctgaatcagagaagcttattaatcttgaacagacacttcataacagggttataggacaggatgaggctgtaagtgcagttgccaaagcaataagaagaggaagagtaggacttaaggatcctaacaggccaatagggtcattccttttcttaggacctacaggtgttggtaagacagaactttcaaaggcacttgctgatgcgatgtttggaacagataattcactaataagggttgatatgtctgaatatatggaaaagcatacagtatctaagcttataggttcacctccaggatatgtcggatatgatgaaggtggacagttaagcgaaaaggtaagaagaaatccgtattctgtagtgctttttgatgaagttgagaaagcccatccggatgtgtttaatgtgcttcttcaggtacttgatgatggacacataacagactcaacaggaagagtagtcgattttaagaatacggtgattattatgacatcaaatgcgggtgcggaaaacatagttgcacctaaatctcttggttttgcttcatcgtctacagatgaacagattcacgatgatatgaagaataaggttatggatgaggtcaggagaatgttcagaccagagttcttaaaccgaatagatgacattatagtattccatatgcttaagaaagaacagataggacagatagttgatattatgatgaaaactatcaacgataggattatggaacagatgaagctttctgtagaacttgatgatgatgctaaagcatatattgttgacaaaggatatgatgcaaaatatggagcacgtccattaagaaggactatccagaatgagattgaagatgagcttgcagaaagaattcttgaaggaaagataaaggctggtaacagagtattagttacagttaaagataagaagcttgattttgttttgaaaagaggatataacagataaaagttaacaaataatactagtaaaatactagcatttttatacaatttgatgtataatcagaatatgaataattattatgtttcttaaagtaatctattggttatatttgtgatacataataaaatcgtaaaaaacgcaggaggacaataatatgccagtaattaatgagttgattcgttcagaaaaggatggaactcttagctttggtaattatgagctggatactaagtctaagttatcggatttcgaacattgtggagatacttataaggttaaaacattcaaggaaataactaagttagagcgcaatggttctttcgtatatgagtcagtaccaggaacagctgttatgaactttaaggctacagatacaggcttatcattcaaagtagaaggcagtgaagatgcacagattactgtggagcttgaggaaggtgcttcgtacaatgtaacaatagatggtgcatttgaaggcagtatgactactaatatgggtggtaagatagttctttcagtaagtcttgaggaaggcaaagctgtcggagtagaagtagttaaagcataaagtgtatgattattaatacaatataacaattaaattgctgcaccgcgcataaagtcatagtctgaccaatgctggtgcagcattttatttatgttgcaaggagggaaaagtggcaaaaagtaaaaatacagcttttttttgtagcgaatgtggatatgaatcatctaaatggtatggccagtgtcctgcttgtaaggcctggaatacatttgttgaagaacctgtagcaggtaagacggctgtaaaagggttgtcggtggtaagaaaagatagtttaactaaagtaagccatccagtcagcctgaaagaaataagtacagaagaaaaagagagaacacttacagggattaaagagcttgacagagtacttggtggtggtatagtccagggctcacttgttctggttggaggagatcccgggataggtaaatcaacactgcttcttcagatgtgttataacatttcagatacgaaagataaggttttgtatatatcaggtgaggaatctctgacacagattaagcttagggctgaaagaataggcgaatgcagcgataatctgaaaatactatgcgaaaccaatctggatattatagagcaggtcttaaagaaagagatgcctaaggttgttattatagattccatacagactatgtacagagaagaaatatctgctgcaccaggaagtgtgtcgcaggtaagagaaagtacatctattcttatgcagctggcaaaagggttggatataaccatatttattgtaggacatgtaactaaggaaggtgtagttgcaggaccaagagtgcttgaacatatggttgatacagtgctttattttgaaggtgacagatatgcatcatataggattttaagaagtgtaaaaaacagatttggttcaactaatgagataggggtttttgaaatgcgtcaggatggtcttgttgaagtggctaatccgtctgaatatatgcttaacggaagaccggagggagcctcaggttcagttgttgtgtgtcttgttgaaggaacaaggccgcttatggtagaagtgcaggcacttgtatgtgattctaattttggcatgccaagacgtacagcagcaggcacggattataacagagtgaatcttcttatggctgttcttgaaaaaagagcaggaatgagaatgtcatcaagtgatgcgtatgtaaatgttgcaggtggcataaaggtaacggaaccggctctagatcttggaattgttatagcacttgtgagcagcttcaggaataaagagattgacagtaaaacagttatatttggagaggttggcttgtcgggagaggtaagggctgttacccaggtacagcaaagagtgaatgaagctgtaaaactcggctttacgacatgtatattgccatcagtctgcttgaaaaatattaaaaataatgataaaattaatcttattggtatacataacgtaaatgaagccataaacctgatataatgagcgcaagagagccagaaagctgcttgcagatttctggcgaacggcgaatgacgatcacgatagctgcgatagcagcgacgagtagcaaagctacgaatcgtgatataatgagcgcaaaagaaaatataataatatatatggaggaataccatgga

SEQ ID NO: 440 - DNA, 3666 bp, Unknown
  gut microbiota DNA sequence
gttaatgatttatctggaatacttgatggacttgattcatcacaggaacagcttgaaaaggatgcgtttgatgttatcaattcatctgatacatcgcttaatcttgtaaaggaaagtatatcgagtgttgaagaaatccttaaaatgatagatgaacttaatgaaatagcagaggaatcagcaacaagaataaaagaacttgaaaagctttctaaagacattgaacagtttgctggtgttatatcatctatatcaaacagaaccaatatactatcgctcaatgcttctattgaggcagcaagagcaggtgaacatggaaggggctttgcagtagttgcaagtgaagtgcgtaatcttgcagcgcagtcagctaagtcatcaaaggaaataactgataccataactatggttcagcagtctgtaggaaaaacagtagattctatgaaaaatatatatgagaattcaaaccagcagaaagaaaaagcggatgagataggaaatgttctcaataaagttgtagaggcagcatatactgctaatgaagttgctagaaatatagaaaacgagatcgcatatcaaagagaaattactgataaggcgaagaatgtactgatgtagtatataattatattagtgatattgattgaatataagtaaataaggcttttatatgatgtgtgaagggggataaccatatgtatcaatgtccttgttgcggaggaagactgatatttgatataccatcgcagcagctgaaatgtgatcactgtagtaatagcttcaatccatatgaaataagcaaagaacatgatgcacaggaaagcgttgagtatgatgttactgtattcaggtgtccgcagtgcggaggagaaatacttagtactgataatacagcagcgaatttctgtagtttctgcggcgcatctacgatacttaccagcagggtcacaaaagaactaaagccagggtatatcataccattttcaaaaacaaagcaggactgcaagcgtgcatataaaagcatgatgcgttatgcattatttgcacctggggagttgaaagacgagaagtttatagatggattcagagggatatatatgccgtactggacatattatattgcacaaaagggtccagtgtgccttaaaggttcaaaaagccaccgcagaggcgattatatatatacagatcattatgatattactggtgatgtggattgctattataagggactttcatatgatgcctcatcatcttttgacgatggtataagtgaaattatagcaccatatgatgttaagaatatgaaagaatttacaccatcttttttaagtggtttttatgcagatacagctgatgttgcggcggatgtatacaggatggatgcagaagctatagcagttgatgaaacgtataagcatattaaaaaaactgcccatctgggttctgtaagccttgacagttatcagggaaatatggaaagaaggcttggaacagaggtagtatctgaagacagagcactattcccagtgtggtttttatcttatcgcaataaagacagagttgcatatgcaattataaatggacagacaggaaaagctgttgcagatctgccagtatcacttgttaaatatttcattggttcggctttgcttgcaattccgatattcatattgcttaatcttatgtttacgataagaccgaaagtaacacttgtagtggcttcttttatagccttgatcacaatcataatgtatgtgagtgaattgaaaaaaatatacataaaagacaagaaactagatgacaggggaagaatgtatgctggttcaggcttggaagaaaatatgtcttccatggataagctaaaagaagatcaaaagcttgctgatagtatagctgatgccgtggaagaaggcagaaacagaaaagataagaaaaaaagtttatataaagagaaaagagaaatttcatggactatgaggattgccataattgctgttatattcagcggagttgttccgatgttatacacgttacagtttgcagcaatattatatggcggcagtactgtatctttgggtatgggatttcctatatgtgttacatgttttgcagcaggcgttatacttactgttaccaatcataagatatttaagaatgtatcgggaaagaatatatctggtaatataggctcgcttgcggctatgcttattgcggcggtggtactctggtttaatccagtatctgatatatattactatgcagctgttattgtagaattaatagctataatatatactgttacggatcttataagatactataatatgcttgcaacaaggaagcttccacagtttgataattatcgtggaggtgatgataatgcgtgataagatatataagcataacaaaataagcagtatagctgtattttctgccacatttatgattattgctgcgatatttttgcttctctcagtgaaaaatgtaagagcagaggacgaaaaagactataagaatgtatatattaatccagatacaggatatgaagctattattgaagatgatgcagcacttatggcagagaatgcttatgaagcactgcttggacctatgaagcagattacattatatggaaatgtgatgctgaaaacgatagaaactaacaatatgtcaacagaaggatatataagagctctgtataatgaaagattcaaatctgatagtggaactatacttgtaatagatatggataatagaaatatatggatacatagtaatggtaagatatataatactgtgacaagctcatatgcagatacaataactgataatgtatacaggtatgcgtcatcaggtgattattatacatgcgcatataaagtttttgagcaggagctcgcgctgcttaaagggagtaaaatatctcagccaatgaagtatataagtaacgcactgcttgcgatagttgcggctttacttattaactatggtattgtaagaatgtatgtcagaaaaaaagtgccatctataaagaagattatgaatgttatattggtaaataaagcatttgataattgtaaagtagtccatacataccagagcaagacatattctcctgttgaatcagattcagacagtggttcatcaggtggaagttcatcaggtggctcgtcaggaggttcatcaggtggaggcggtggtggtggacacagcttttaaaaataagtttccaatacgtttgtgtgtacacaaatgtattgggaacttttatttttttatacatgcataaaatggtttatcagataaaaattaggtgaaaatcagatggaaatcagatgaaaaatccaaaaaattgtaaaaaatccagaaatgttaaaatgaataaaaacccagtgtttatgcggctttaataggatattttacggctgcaaaataaaaaaagtcaaaaaaatcgaaaaaagttgaaaaaagttgttgacatatgtgaggggtggtgctattataatcaagtcgccgcgatacggcagcgacaaaaacttaaagaaacactgatgaatacaggattctttaagaactgaactttgataactgaacagaaagacaaccttgaaaattctttttagaatttcgagatgacaagatgtttatgatataaacatctac

SEQ ID NO: 441 - DNA, 1084 bp, Unknown
  gut microbiota DNA sequence
ttcgcatttgtctttgaaaaatcacttaaccgataagatcggactcttgtctttacaatgattggaattaacaaaccattatttaccagctttgcacatcgattaataatcgttttgttggttacacctagcattttgctgacttcaattggtgtaaactcatataatcgcttttttaacagaaatgctaagaattctttttcttttgcatttaaataagatagacttccatctaactcgtcgttttcggatgtttttgataattcatatacctttttagaatacaattccatcatccgcaaaaaataattgatccaaatttccggatgaggagggttttctcttcctgaataatataacgccggtaaccccatttgcagtgatgcataatactcatctggatcataggcaaaatattcttccagagaacctattccattaaaaccatatccataataatcaagaatatagcctgacattaatctggcggttcttccatttccatcttcaaaaggatgaatggtaaccaattgataatgaactacagcagcaataatcagcggatgatcatctgtagtatttacatattcaacaagttcatccaacaagtctggaatatcaatatactctggtggaatatattccgctgcgcctgtttcggaatcatatactgcgaataacattccaggcggcatagggcctcttaagcctatcttttcttttgacgcacctttttcaaccattgcctgcacttctaaaatcatttcttttgaaaaagcttctttctttttcagtttttcttctaaaaaatttaaagccaaaaagtaattacgaacttcctgttctggctttaaaaaatgtttgtgaggatcactatcaatagcctcatttgcctgtttttcagttaatggatttccttcaatcttattagaagcataggaactttttttcttagagttttttctaagtctgttttttataacaggtggcatttctatcgtactaagagaaaaacgcttttcgtctatttccgatattttttttaaaatttcatttgttaacgttaccttaatcacatgatcca

SEQ ID NO: 442 - DNA, 7081 bp, Unknown
  gut microbiota DNA sequence
tattcaattaaacaaccatttacctatagaaatcatcccctggcatttttccaccaactgatgctgaattcgcatcatataacaccttaaggtaactgcttatctttgttttggcttcattaccagtgataaatgttatattacacttaggtatagcctgtttagcaacagctgcctttgtaatatcatatttttcaacaagctctgaggcttcgtctacattagcgtttacatagtcaacggaatttctgtattcttcaaggaacttatcaacagctgccttgttattattataatattctgtgttaacaactataacgcctgtcacaacactgctgccatctttagctgtcttttcccactcctgtgtcacatcaagagctattcttacatcctgattcttcataagaactgttgttgcgaatggctgtggaagcatggttatagtttcttctttggctgatgccataattgctgccacctcagctgcttctgatttgaattctattgtaacatctttatcaggatctattccgtttgaagatagaagatatcttaatgtatattctggagttgtaccttttccagttgtatatatagtctttcccttaaggtcagatactgactttacttcccctttgttatcaagtatatataatacaccaagtgtattgattcctactacagagatttttccctggctcttattataaagtgttgctgctgcattacaaggcattgccgctatctgcacctcaccctttataagacctgctgtaaaagcatctgcggcagcttctatctgaaatgtatagttattggctgttttcttttcttcattatcattcatgagtttaaccatacctatggctgttggtcccttaagtgccgcaactttaatatccctgctttcataagcactgcctgcatcctgtgacgtggcagcgctgttttcgtgtgtcgatgtatttttgtcacatcctgtaaacacactggccatcaaaaccatcacaagcagggttgctactaatctactgattttctttttcataaacttattccttccattcttttactattatctgaagcgatgctattcctctgtatacattaatatccggatagtacacaacaagaatactgcttccagcttcaggtattttatcaccttcgttcacattaaactggacagcattcataaggcatccatcctttgtttcaagctgcattcttaatacatttttattagcaccgataatatctgctttctttacatataaatccctatctgcaaaaaccggcttttcatttccttttccaaaaggttcaagaagctttaactgctcaacaagccccatacttatatatgatacaggcataggaacatctatccatgttttgggaattagatcgctgtcagtaagtgtggcattttcattaagcatattccttaatgtgtcaatgtcagctgtatttaatgataaaccagcagccataggatgtccaccatatttagtgagaagatttttacatttattaagctcttctgccatattatagccttctatagaacgacctgagcctttagctccatcctcagcattagttataacaaatgtaggcctgtaatatctttcttttattcttcctgcaataatgccagctatactttcatgacagtcaggaagatatacaacaagcactttatcctctgtcataccagtgctttctacaagctctatagccttagccgtttcttcctctgtcatctgcttacgttcattattaagcagaatcagttcctttgccatattatgtgcttcatccctatcctgacacaacataagctcaatagctttctttgctgtatcaagacgtccacttgcattgagacacggaccaatcacaaagcctatatgatatgagcttatgttagaaatatctatgccacattcttctataagtgctctaagaccaatattagctgtatgcgctatatgcttcaatccatatttaactacaactctgttttcatccacaagatcaactatatcacctactgtagctattgccataaattctctgtattcttctaaggctttgtcacttattcccattctttcataaagaaggcatataagcttatatgcaacacctgctccacataacagcttaaaaggatatttacatgacgtctgtttgggattaacaacagcatctgctggtggtatacaatactttttttctccatcaatcatatcaaaaggtacatcatgatgatctgtaactataactgtcatgccattgtctttggcatatttaacctgactatatgctgatattccattatcgcatgttattattgtatctataccatcagataatgcattatcaataagatgttcattaataccatacccatcatttatcctgtgtggcacaacataatcgacatctgctcctgctgcaagaagtcctttgtataaaatgtatatagagcatataccatcaatatcataatcccctattatacggattctgcacttttcctttatttttttttcaataatatcaacagaaactacagcatccttcatgtctttaggatcatgcatatctttaatatctccattaagatacatatctatatcactatcaccacatatatctctgtttcttattattcttgctataacctggtctatactatacttatctgcaagccttttaaaatcagcctttttcccatatactctccagtcgcttttcatgacatatctccctgtgtaatatgatgatgtaagtgtgaaaacattcggccccttacatcatattatttaatgattgttattaaaaaacatccacatcccgatacactgactaatgatgattaatcattatatgtatcagaatatggatgcattattgttatcgcactttattaatatttatacctgtgcgccatctggacctatcttagctgcctttgctttcttgttaacagcttcttctataactcctctcttcttaccaccaagtatataccagaatgaacttgtaaggaatactgatgagtagaatccacatataatacctacaataagtggaagtgagaactcttttactgatgtaacacccatgatataaagcataacaagcataataagagttgttacagttgtattgatatttcttgttattgtacttgttactgcagagttaacaagttctgttatattagtcttagagttagcactctttaacatttccctgattctgtcaaagataatgatagtaccgttgatagagtaacctacaatagtaagcatacaagcgataaatgtgttacctactggtactctgaatacagcatagaatgtaataactactaatacatcctgtaaaagagccataactgcagcaagtgcaaacttaatatctctgaatcttgcaaagatgtatataagcatagctattgtagcaagtacaactgaaagaatcgcattcttcttcatagtgctgctgactgatgaactgattgtatcagattcaactattgaaccatcctgaagtggatacttttcagtaactgctgtttctatcgcttctctttgttcaagcgaaagatccgttgtcttaaatgttacctttgtagagttctgtaccttctgctgctgtacctctgttataccagctgcttccctgataattggaataataccattttctatctctgactgtgaatattccttgtcaaatgtaaagcttgttgttgaaccaccaacgaactcaaggctgaaattaagtgctctgttgcctgctgcactctgtactcccatagctacaaaaccaacaactataagaacaactgatactgtaatagtccattttcttatagacagaatattatatgttcttctatgaactgtcttaccatacatacttggctttgtaagaccaaagttgtataacagcttcattataacctttgtaataacaagtgctgtaaatatagatacaatattaccaactgcaagagttgtagcaaagcccttaacaggacctgtaccaaatatataaagaacaatagcagctataagagttgttacgttaccatctacgatagctgatgtagccttgttgtaacctgcaagaatagcactttctacactctttccagcagcaatctcttctctgatacgtgtatatataataacatttgcatcaactgccataccgataccaaggatgatacctgcaatacctggaagtgtcaatgtaaggtcatatacacttacaaggaaaagaacaagtgttgtgtatattataagtgaaagtgttgctacaacacccggcactctgtatatagcaatcataaatatacataaaagtataaaacctatacctgctgcaataagacttgaatggatagcatcctgtcctaactgtgcacctactatattagaacttgcttccttaagtgtaagtggaatagaaccaattcttatatatgtagcaagattatctgctgcttcatatgtttccatacctgtgatagatgcactaccacctgttattgctgtgttaactgtaggatagctgacaactgcaccatcatatatgatgtatattctgcttcctatattcttagatgtagcatcagcgaacttatttgaaccttcatctgtaaatgtaagtgatacaccataaggtgtgctctcattagatgatgtatctgaatatgcctgtgctgctttgacatctgaaccggtaaggagtggtgtgtaatcctgtccctgcgaccatgctgtatatcctgtataatcaaggaattcgagtgaaccaggtgttcctaactctgtaagaatctcgttggcatctgttacaccaggaatctcaactgtgattctcttatcgccttccttatatacctgtgattctgtacttcttccctcgatacgtttttcaagcttataaatagtatcttctatatcctgggaagttggattatcctcctggatttcatatgttatactgacaccgcctgcaaggtcaagaccgagattgatgtccttagcactgccatagcctttgccattcattccaaaaaatgttgtaagtgtaagacctacaagcaaaacaagaatgatgatgctatagctaatcttcttagttaaattgtacttcatgttacttttttaatactcccttcaatacatatgctttaattttcttctgccatcgcagcccttatcataattgcacattcaattctctttttctgcatctcacatcctacatcataagcatcattgatgtttccgtggaagttataagagttagcagcacacccaccactacaatagaacttagcaaaacagttcttacatttttcctttgaatatacattacaattcttaaaactatctcttatatcgttacgggtaataccttcatcaacattacccataaggaaatcttcattacctacaaactgatgacatggatagaaatcaccccaaggagtaactgctaaatactcacatcctgaaccacatcctgacagtctctttgctacacaaggaccgccgcttaaatctatcataaagtggaagaagttaaatccgttaccagccttttttctctttatgatttcctttgcaagcttatcgtactgctcaaatataactggaaggtcttcttctcttattgcatatgaatctgttggctgtgcaacaactggctcaactgatatctgttcaaagccttcatctgccagatgtaaaacatcctctgagaagtcaagattattatgtgtaaatgtgcctcttacatagtagttcatctggttacggctcttggcaaccttcttgaacttaggcataataatatcatatgagcttccatgattatttcttgttggacgcataagatcattaatctccttacgtccatctatactgagtacgatattgcccatctctttgtttgcaaagtcgagtatgtcatcattaagaagaattccattagttgtaagtgtaaatctgaagttcttgttatgttccttctcaagacttcttccatattcaacaagctgctttacaacctcaaaattcatagtaggctcaccgccaaagaaatcaacctcaagattctttcttgagccagaattagcaacaaggaaatcaagtgcctttttaccaacttcaaagctcataagagctcttctaccatgatattcaccctcctctgcaaagcaatacttgcaggcaaggttacaatcatgtgctatatgaagacaaagtgcctttacaactgtaggtctgtccttaaaagaatcaatatatggctcgtatatatcctctgtaaaaagctgtccggcctctttaagttcagatatttccaaacaggcttccttaatatcttcaaccgcatacttatcttttaattcttcaataattttatcttcactgttattttcataaagtgcgataatatcatatactatatcatctacaacatgtactgaaccactattaacatccaggactatgttatatccattattcttatactggtgtatcataaataaacaatcctcaattctaatcttaactgacaacttatttctatcgtgtaccagacaggcttgtagttttatattcattaacagtccattatcttaaataatagataatcatggattttatattctgcccggtctcaccctatgtacataaggaaaataagagagtgttaaaatgcattcacactctcttactttacttacatattatctttaatgataataattagttgttcttattctcacagctctggttaccaactgtgcaagatgtcttacaagctgactggcaagatgtctgacattcaccacatccaccatgcttcattgtatcctttaatacgcgattgctgatagtcttaatatgcttcacaacaatacctcctttttgttcataactaatatgagtataacatatagcaagaggtttttcaactgatttatcataattcattctgtcagtgattgaatataccattgtttaatagaatatta

SEQ ID NO: 443 - DNA, 36490 bp, Unknown
  gut microbiota DNA sequence
ataagtgagggtggaagccagctttcaggtggtcagaggcagcgtattgctatagcaagagcaatattaaaaaacacgccaattctgttgttagatgagcctacatctgctattgatgagggaacagagcaacttatacaggatgctcttgacaggttgtgcaaagggaaaactagcataacgatcgcacacagattgtctacaataaaagatgccgacaggataattgtacttcagcatggaaggatagttgaggctggaactcataaacagttgcttgatatgggaggggtatatgcagaaatgtacgcagaaggataataataagaagaattccggaatatggcagttattcttacggactatgagaactatgggaaaaagacgctttatgtattatggttcaatattagggatgagtataacatttgcaatgttctcagttatggaagcatttcttatgaagatagttgttgacatagcacagaaaggcgagtgggacaggcttataagttctgttgtaataatagtcataacaggcgtgatagtgttgttaggatatagatttgcctgcataagatataacgtggaagcaaagcgaatatatggaaagctgtacgaacaggtgttaagtcacgaaatgaagctgccttgtgaatattatgaaaatcaccatagtggggaaatgttatcaaaagtatcattcgaccttggaagaatgggtgatatatttggttcaagattcagaagagttgttatgccatttataatggtagttgtattcttagtgcctatgtttgcactcagctggcagcttacactttgtcttgtggctgtaaatacagtgctgataggagttacgatggttctgactggaccgcttaaaagcttaagtaagaaaatgtctgagtcaaacagcataatgacaaagcatataacagatcttattcagggaattatacaggtaaggatgtttgaggcaggcaggaagacggttgacagatacaatgaagaagcagatgtatatgctgtaaagtctgataaaagaaatatgttttcatctttgcttgaatgtgctaatacaggttttgaccttatatgtaatcttgtttttctggcgttaggcatattgtttgtgcagaagggttacacaacacttggtgctattgcagctatatatacaatgtatggacgtttttcaaggcaatttttgcagatgggaaagtatattcctgagcttattgcatatctgacatatgcacagaatatatttgattttcttgatgaggaaacagaggataaaagtgaaaaattgaataaatcggacattctaaatcataaagatataaatgagaatgttgtaattaatgaaataaacaacttttgcggtcataataatatttttaataatgctgattattcagttaagataagtgatttaacattttcatatataaaagatgaaaataatacccctgtcgttgttcttgataattataatgaaagaataaaggcaggtgaattcgtggcagttacaggtgcttctggttctggaaagacaacactttctaagcttcttatgggattttataagccggacagtggaatgattgaagtgtgtggcaataatcttgatgatataagtctgtcggctggcagaagcttttttgcacttgttccacaggatgcaatactttttaatatgagtataatggataatataagaatgggaaggcttgatgccacggaagctgagataattaaggctgcaaagatggctaatgctcaccagtttataacagaatttacagatggttatgacacagttgttggtgaaaaggggatgtctgtatcaggtggccaaagacagcggatagccatagcaagggcaatccttaaaaatgctccgataatgcttatggatgaggcaacctctgcacttgataatgagtcggagcgtgctgtaaacgaaacattacagaacttaaagggtagaatgacaattataatgattgcgcacaggacatcaacaatacagatggcagacagggttattggcttgtagataccttaatttaaattatagattatttgctttatagaaatgctttgatataataatacattattagtaatatagcatattattgttattgatatattttgcgataattagaatatattgatgagatatatttaatttataggaaaggggcaggatatgttaaatatatattatggagatatggaagaagctgtatataatacagcagtatattttaaaaatacatatgagggtaactggataactgaacctatagtcagggatataataaaagatgttgataaatcggaagttattgacagcaatcttatagagagtccagtgttgggtaagatatcaccacttgcgttatctggtggaacaaaaaccttaatattaataataaatgataaagagaaaatatttaatgcctcaacctgtggtaataactgtgcaaagtggcttctaaaaatatctgaaaatgaagatgtaactattaatctgaggcatttgatggattttggagctggaaggtttaacataaaagtacttaatacagataagatagttcacaatatgagcgaattattagatgaggctatggcatatgtctagggggatatatgaaaggaaagtatagaataatagtagaaaataagaaaataagatatgatttcgaggtaaaacgtaatattacaataataaaaggtgatagtgcaaccggtaagacaacactggcagatatgatagcagagtatgaggaaaatggagctgatagcggaataagattagcatgcgacagggaatgtcatattttgcaggggcgatattggaaagctttattggcagagatgaagaatagcataatttttatagatgagggaaataagttcgtatcaagtgtagagtttgcagaagaagtaaaaaagtcagacaattatttcgttataataacaagagagacacttgaaacacttccatatagtgtagatgagatatatggcataagaaattccggtaaatatggaacattaaaaaatgtatataatgaaatgtataagatatatacaaatgttaatgtaaaagaaagcgttaaagtagattatattataacagaagactccaaggcaggataccagtttttcaaaaaagtatattcatcagaacatttacagtgtatatcagcagatggaaagtcaaatatatataagcatttgaaaaaagataaaaatgtacttgtagttgcagatggagctgcatttggttcagaagtagaaaagattgaactatatgccagacagggttataagcttataattgacaataacaacgaatagtgttatattactccaccctatcatcattaaaaatataaaaagaagatgattattgagtacaaatcatatgtaatgtaactcaataaatatatggggatgaaaggatcagagtggttttatgacattttatcaggaattacagttaagttctgcaggctctaaacagcttattaagaacacaaaagatgctaaagagaaaagaaaacatatattaatatataatttcaaggtttaccttgttatggtattctgtgttgcagttgttacaatattcagtaagcttctagaaagtgctaacagtgtggtaggtgttacagtactgcttgcagtgcttgtgttaagacaggcggattttggaataaagacatcacatggacttttgtcaattatgggaatatatgctatattgatagcaggaccaaggcttagtaatatggtgccacctgttgttgcatttcttattaatatagtatgtataatgcttcttatgataatgggctgtcataatgtaattatgtataatcattcgacatttgtgcttggttatctgttattacaggggtatgacgttacaggacaggactatgtgttaagggttatcggacttctttgtggtatggtaatctgtatgattatcttttataagaatcagaagaacagaccatatcgaagaacattccaggatttattctatgaattcaatattaattcggcaagaaacagatggtatatcaagcttacatttatagtatcaagtgcaatgcttgtgatgaacctgcttaatattccaagagcgatgtggataggtatagcgtgcatgtcagtgtgcctgccattttcaaaggatatagaaggacgggcaggcaagagaggtgcgtttaatgttgttggatgtctgattttttcaatattatacacagtacttccacagtcaatgtatccatatattggtatgataggtggaataggtgtcggatattcagctggttattcttggcagacagtgtttaatacatttggtgcactttcaatagcggcggaattgttcggacttaaatatgctgttttacttagaataggtgtaaatgtagtaggagcggcatatacattgttatgtgacaggttgatagataagatatataactggtacacacagcgaaaagtagaaactgcgtgatgtacaggaattcggcggtattgtaagattatcagcattttaagatgtcggtttgggagtaaacgtataagtatagaaatggtatgtgaaactggttaagttattatgatgataacatatatttctataaaaatatttttataaaaagtaagtctggtgtaagttaatatgtatattatcatgtgatattataaatgagcagatagaaaatgtagatatgaatataatacggagaatgagcatatgtatcatattattcttgttgaagatgacgagcagataagaaaaagccttacggagctgctcacatataagggatatacagtaacagcggtggaaggtgtgcagaagttttatgagagtattaagaaaacaacatacgatgcatatcttttagatgttattcttcctgatggaagtggttatgatatatgtgagaatataagagataagacagaagcacctataatatttataacctcaagtgatgatgaagagtcagtagtaaaaggacttgatataggcggagatgattatataacaaagccttttcacaatgcagagcttctgtcgcgtataagctcgaacctaagacgaagtgcaagattcaaggagaattcatatagtgttggtgacattaaagtactttttgataagtataagatattaaaaaatggtgtagaattaggtataaccccgacagagtttaatataataaaaatacttatacagaataaaggctgtgttgttaaacgtgaggttatatatgacagaatatgggacatgcatggcaattatgttgagtataatacactcacagttgctgtaagcagaattaaagaaaagcttggaacatatggagaaaagcatcagtcttatatagaaacaataagaaatgtaggatacaggtggatagataaaatatagaggtaaagagtgtttatgggtaatcaggacgatatcgaacagaaatttatggatttcagaaaaaaacagacattatttattgcagcttcatttatagtaaatgcagctgtagtaatgcttttatgcctgtattataatcttaagcaaagagctcttacaggggctctttatttgtatgataaaacagcagcagagaattatcttgatgtgctttctaagatgaaaatcacgcaggctgtaggcagatatgttaatgagggaaatgcagctattgaaaaaatcggatatggaagtaaagggtatagctatatatttcttttatcaggggaaatatggatatatataattgcattacttatattatcagttatattcatatgtggcatggtaagcatcagaagcatgaccggtcacagtgttataactgatgctttagcagttaaagaacggaatgtaatattagaaaacaggcttaaacaggaaaacgaatataacaaaaaacagcagagaaaaatgcaggattttatagaaaatatagcacatcagataaaaactccgcttgcagcgataatcttaaatcttgaatttatgcaggaattgcacatggatgagcgtatgggaagacttgttgatgaaagtgcgggaagtgccttcagaatacgggactttataagaacacttcttaacataagcagatttgaaaataagaaagtaataatagcggctgatgaagtaatcataggttcaattataacagatagcataaataattgtatgaattgtatgatacatgaaaatcagaatgatatttttatagtacaatatgatgataaatgcgaaagtgcggttatatatgcagatgaaatgtggctggttgaggcaatagctaatgttataggaaacagtgcagactatattaaaaatattcctgatggtaaagtgtatataactgcaggttgtgatgaaagaaaggttgttataagaatagaagataatgggaaaggattaactgttaaagatcaggatgatatatttgacaggttctctacaacaagaaacagtgcttcagatatgcatgtaggattaggacttaatctgtcaagacttataatagaggcacattatggcataataaaagcaggtaacagtgaagaatatggaggagcagaattcacgataatacttccaagatatagacttaaggataagagataataagatgtaagaaacaaaatgtcaaaaacttgtgaatgtaagtctgaggtaagttaacaacaatataatccgcatatcagatacgaaagtaactaaagtcaggaataaagtattaaagatatctgaaataatatacagactttattaaaggaggatatgctatggatatattaagagcagaaggaataagtaaaacttaccggacaggaagcgttgaagtgaaggcacttaaacagtgtagtattaacattcagaaaggcgattttacagctgtgataggaaaaagcggttctggaaagtccactcttttaagaatattggggactatagataagcctgattcaggaaaagtgtacatagatgatacagatataagcacgcttaataataaatcacttgccaggttcaggcgcacaaagataggctttatatatcaggattatagtcttgtgccagaatatacagcttatgaaaatatcatacttcccattatacttgatggtaagaaaccagatagagatgaggttagtcgtcttatggatatattatccatcggacactgtttaagaaagcttccagcgcagatgtccggaggtgagcagcagagagctgccatagcaagggcaatgatagcacatccggcagttatactcgcagatgaacctacaggcaaccttgatgtggctagtgcacagacagttgtacagatgttggcagaagcctccaatgaatacaatcagaccataataatggttacgcatgataagcagatggcagaatatgcagataagctgcttacgatagttgatggacatgtgagcatgggagtagatgatacgatagctgaaggtaatgacagggggtgagctttttatgaatggcagactcatattactttgtttaaaaagtatgcttagaagatggaagagagtattaagaacaatagtaacagtttttatcgcatttctttttgtggcaggtatgcttctttttcaggaaaatatgtatcaatatcagacagcagtggcaaagaaacattttggtgactggtttataatgaatccatattacaatgcaaagaaagataatgtattaggtgaacacatttatcttgaaaaacctaagctcgcttatgtggtaaatagtatatatgattatgataaggaaacagatgaaaagataggtttctttacacaggattttatacatgcaggaaatattaagcttgataagggagaatggccaaaggaagacactgatgttgcaattgactggaatacactgttaaagctaaaccagggatatgaaataggggatataatcaccatccatacatatacaggaccttcaacagatgaggaaaatgaagttacaaaaacctacagactgtcggggataatagatagttacacaaacatatggcagggaggcgggaatcttccaggtataatactgacagaaaatgaatgtggaaacattaagcatagcaatgatattaaacaaaaaaatattgcaatatatgggatgaaaaatataatacaagaatctgattatgaagcaatgtttaacaaaatgcagaaggacactgacaaagagatggtgtttaacagtagtgtctatgcatataaaccatgggggaatgagcttgtatacaattatatatttattcttgtaatgcttgttggtatcgcagctataacttatcagatgatggcatataatatgaccaggaaatatacgatggatatacatatcagggaaggagcagcaagaggccagataacaggaatgtatatgtgcgagaattttattatactgcttctgtcatcatttcttggactttttacagcatgccagcttgcaaggcttatatgcagcgctataggaaaaaatatgggtgtaagcttcttttatataggaagcagtacatatattaaaatgcttattacacttatattgtctgttgtaataagcatcatatttaatatatatatgaatatatcacatgtgattaataaatctgttaatattaagataggcaaaaatcataatgataatgaagaaagatatgtgccatccaataataaaaaaattaatggaaaagagattaataacaggaatttcatatatcagacacacataaggttaatgcgtacaaatggttttatacctaatatgtttataagactttttacacttgtcatgacagctgtgatggtgctatgtgccattaatatgcacactgcatacaaagcatatgaaaaaaatgcaggtaaagatgatatagtcgcatataagaaggaaaacaatacatcagcatatgtatattactataatgaagatattaatgaatacaaagaagaaataaaaaagaaaaatgaaagtgccgctaagtatgcagcatcagagtataaagaaccaacagagcttgaaatatataataaatccaggataaatataagctcttaccaggattatcttgataattcagatgttgattatattttgggaatagacagaaaacttacattaaataacaatcttaaatgtgcagatacatacatttataaaggaatagatgagaatacgttaaaagctattaaagatatagatggagttgaagaagtacgccttggatatttcgaaactggaagaagctggtactgggatggaatggactataataagataggcgcaaaggattatatatcagatagtgatggaaagcttgatgaaaagaattataaatacctgtatgcatcagagtatgtagaaccagatagcagtatatatgatattatatgtaaatatgcaggcgataatgcaccagactatgaaaaatgggcggctggcgagctttcggtagtttttaaggataccaatataagaggacagtatgatgatacattacagcctggtatgacactgaacttatatggatatgctgataatatgagaaacgaccagcttgtatatcatcagtgggatggaagtgaaagtgaatattcggatgcactcataagatattatatggataatgtatgggaaaaatatgttaacgtaaaagatgatcctgacacagcagatgtaatagctaatcataaaacatggagctggaaccgtgcacacaaatatgttagtaataagctttcacttgatagacttgaagagcttaatcttatatcaagaacatgtctttctggctcaaatgttgaatcacagactaagactacacaggaaagacgtgaaaaatatgatgagggagtcatatcagaggaggcttatcggggatttcttggaaaatatgtcaacacagagcttgaaagaagatatcgttataaaacaagatatacaccagcagctgatacaaatgtggcagcagtcatatacattactgatgaaaacagggatgagattaatgctgcatttaaagaatatatacctgaatttggacagtttaccatgatttctacaacggctcttttacaggaggcattggataatcagaatgaaaatattaaacaatattttcttcttgatgagcttcctgatgaacttacattaaaacttaaatataatcaggtaaatatacgctatggcatagattcagctttagtgtcaactggtaacatagtatcctcatatcttggacagagtggtttctcctataaaagttattcagaagaaaaggatcttttaaaacagaaaactattgaaacaatgatgctatatggaatatccctgttagcagctgtgtttgttgttattgcagtatctgttcttatagtaaaaaacagatgtgagaaatatgaaagcagattaagaatcataaaaaggacaggggctaaagatacagtacttgtaagaatatgtatgcttgagtgtgtaagagaagcaatatggtgtccatttgtcgctattattgtaatactgcttgactggataacgataacactgcatataagagatgtaaagtgaaaatgtaaaaactatagtaagatattttcactgacaataatgctgatgaattaataaattagagaattaaatatagaattaataggacaggctatttatacatacataaataagtgttattatgtatatatattgagcggtgtctgtgaacataaatactgctggtttttaatgaccagcagtttttatgcaatatatggggaatagtatatagcataattcttactatagcggaggatattatatgacaggaacgattaattcagaggccagactgtctacttttgaggcaatatgtatgatagttggcaacagcataggaacaggtattatagcagtgccatatcttgcaacaaaaaacagtatgcttgatgttatatggatggttgctattgcttatatagtcaatgtaatattgcatttaataatagctgagctttcatacaataatggaggtgtacagcttgtaaaaagctttgaaggagaactttttactggcaggatgaaaaaggtgttcagctggataatgtttatagtatatggattggctattatgataggcgtgagtggcaatatcaatggtggggcgcagatatttgtgaactggtttaatattccgttgtgggcagcacagcttatttattatgtgatagctggaatagtagtatttatagggatgaaggctgtaggaatagcacagaagtatgcagttgcggtacttatggttatagttgcagttatgacgattggtacatttatgcatcctgttaatgctttgtatacagcaccatttcatttgaacaatctgcttgcactttatagtatggtggtttttgcaacctctgctaatcaggcagttatacaggttgttaagggacttgatggagatgcgggaaagattagaaagacaatatttgcaggttttggattatcttctcttttcgtgcttattgtaacacttacagtgcttcttggaactaagggaacactcgataaggagcttgcctatatgcagctgggtaaaagcataggaagctgggctatgattcttgcaggtgtattttctttgtttgctctgcttactaccttctggtctaatacacttgcattaagagatgtagttcatgagcagataggaacaggaaacaggataagctggcttatagctaccattccatgtatactttttgctatatttggtgtaagcagttttatagtccttacaaggataatgagcggtgtagttgtgctagtcagtattatgcttgtgctgacttatggaaagtcaaggaaaaaggctggaaacagtcctatatgtggtgtgtttggcacagtatatttccaggtgcttatggttatatctacgataatatctgcaatcggggcacttataccactcagctgataaaagcaagatttgtgcctcgcacaaacttgagatgcgcaaagaagaagcgcaagaatggagattactatgtatggatcagacgaatttaaacaactggataatgaaacatttgcacttaagataaatacaaatagagcttataagatacttcagcttacagacatgcatcttggatttggtatattttcaaagaaaaaagacaggcttgcacttaaggctgtaagtcagattataaaaaggactaagcctgatcttattgtgatcacaggtgattcggtatttccattctttccgaaagccggaactatgaacaataaacgccaggcagaaatatttataagatttatggacagctttggtataccatatgcacttgtttatggtaatcatgactgtgaaatgtttgcaagatacaacaaggataaactgtcagatgtatacagctcaggtaaatacagtatatttacaaagggcagaaaagacatatatggaatgggtaactatttcattaatcttacagacagcgatggaaaagttatacttccgcttgttttccttgactctaatatgtatggagatggtggctggttctacagtggttttgactgtatacatgaagaccaggtagactggtgtatggacaagctaagtaagttaaaaaaagagaatagtgatgtcagggcgatggcatttttccacattcctgtaaacgagttcaaagaggcctatgaaaaaatgaaaatgggagataaagcagttgtatataagcatggcaatataggtgaagctgatgaccatttcgggattccaaaatttgagggcactttttttaacagagcagtggataatggtattataaaatggatgttttgtggacatgaccatcttaatacgctgtctcttgtgtataaaggtatccagctgacatatggaatgtcgatagattatcttggctataaagggataatgaataggcatacgcaaagaggtggaacactgataacaaggcatacagatggaagtgtttctataaaaatggttccgcttaaagaaacattgtgacataaataagtgttaaatcgttgtgaatcattgtggtgtgaaacattgcagcataaataagattgataaataagagtcattctgataaaatgttaatattcgggcttctgtaatattttcaggattggctttgaatagtaacgacattaaagcgtttcaaggattggagaacaagttaggatgagaataggttttgataatgataagtatcttaagattcagtcagagcatataaaagagagaataggaaagtttggagataagttatatcttgagtttggcggaaagctttttgatgattttcatgcttcaagagtacttccaggatttcacccagacagcaagctgcagatgcttatgcagttatcagatgtggctgagatagttatagttataagtgcagcagacatcgaaaagaataaggtaagaggtgatcttggaatcacatatgatgttgatgttttacgccttataggagagtttgaaaagaaaggtctgtttgttggaagtgtagtcataactaagtttacaggacagaatgcagctatccagtttaaagaaaagcttgaaaagaagggaatcaaggtataccagcattatgtaatagaaggttatccatctaatattcctaacatagtaagtgataatggttttggaaaaaatgattatatagaaacaacaagaccacttgttgtcataacagcaccaggtccaggaagtggaaaaatggcaacatgtctttcacagctttaccatgagaataaaagaggtgttaaagcaggatatgccaagtttgagacatttcctatatggaatataccgcttaagcatccggtcaacctcgcgtatgaggctgcaacagcagatcttaatgatgtgaatatgatagatccttttcatctggaagcatatggaaagactgcagttaattataaccgtgatatagagatatatcctgtacttaatgctatattagaagaaatatatggtgagaacacttactataagtcaccaactgacatgggtgtcaatatggctggtaactgcatagtagatgatgaggcatgctgtgaggcatccaagatggaaataataagaagatactatgatgcagttaacagggtagctaaagagaaagcatctgaaagtgaagtatacaagatagagcttcttatgaagcaggcaaagataacaactgatgacagaaaagtaacagtagcggcaaagaagagagctgaggaaactggcgttgcatgtgctgccatagagtttgaagatggtacaataatcacttcaaaaacaaccgatttcttaggagcatcatcagcactcatacttaacgcgcttaagtatcttgctggaatagagcatgatgagaagcttataaagccagagtttatcgagccgatacagaatctgaaagtggaacatcttggtggaaggaatccaagacttcatagtgatgaggttcttatagcacttgcacttacatcagtaactaatgagaatgcgaaaaaagcgatggagcagcttcctaagcttaagggctgccaggttcatacaacagttatgttatctgaggtagacactaagacatttgcaagattaggagtgaatcttacatcagaaccggtaagaggaagtaagaaattttattaatatatggattttataatatagaatcatagataaagaacagaaaagactgttatactataaagtgatattcaactcttatagtataacagtctttttgatgttaattattattgttttgtaagcattttacgatagctgcttggtgacataccaacagcctttttaaatacatcaccaaaaaagttgctgttattatatccacatttgtatgctatttctgtaatacttttttcggaggatataagcagcgatttggctgcctctatccttgttttagtaaggtattccttgaaagtcatattagtaaatattttgatttttttggtaaggctggattcgcttataccaaactgggcagcagtttctggcagtgtaagctgtctgccatagttgttttctatgaaattcacaatttcacctattgtaatgttagataaattagtcttttgatttatattatgtgtataacgctgacaccgtataaggtatataatcagttcaaaaaaataagctttagtaagtgactcagacatattgtcgagactatatttttcaaattgtattttctcaaatatattagatagatttgaaaaactttttcttgataattgcaaatgtttatttatgaaaagattatttatttcatccttgaaatccttgttaaaataccagtttagctgttcagtagatatatacaggacagttcttttgacatcctgagtaaaggggtatataaaagtatgttctttaaaagcaggtataaaaagaacacttccatcttcaagacaatatgtttcattatctatatatacattacattttccagattgaagaaaatatatttcgttgtattgatgggaatgtgtaagtggtacatttttattaacatgacggattctatggtctattacaaagtctttgcttacgtttgataacatatggattcctcgcttagtatgtatatattgtataaggtaattgctttttgaatgatattttataaaagtagttattttatgtaaattataagatactttaccgataattggtagtctgtttttaatattgattttataatacaatcatcaaattatataatgttaaggaggcagtggaatgcgaaaagttacaaaatcactggttacgcttgggttgtgtacaacaatgctgtctggaatggtggctggtgttccgacagttagtcttttaaaggcaggtaatgtagagaatgtatatgcggcagataatgaacaggtagaattgggagatcttgtgcttagatttcttgctataggtgaatatgagcctaaccgttatacaaaaaaggatggtggcaaatgggcaccggaagagattgaaaaaggacttcttattaaagcagatatggttcttggagaaggcaatgttgaaggtatgatggcacctatgaaatattcattacaggatattacaggacatgttgatgcggatgttaatacaggaaatattgtcattacttataacgggcttacacttactatgaaagcaggcagtacaacagctgaacttgataatggaaaagaaaaaactacacttactatgagaagtgagatagcaccatattttaaaaaagtagatgaagaaaaaaatgttgatggaagtgattattatgcatgttatcttccagttaagtttacagcggaagcacttggtggaaatgtaatatggaatgatgcaatgcacagaatagagatggcgtttgcattctatgcatcggatgcggcagcttcaccggttgttaactcgaagtctgattatacaacaaagaaaatggagtccaattctaatacatacagcaaaatgaaaggaagaattgatgttactaagcttgacgaagcagcggtaaaagctaatgttgctgatatgataaaagctggacttaatgtagtaaatcctgtttaccagaatgaagatggtggatgggctaagacaaatacagagtatgatctgcttgaggattcttttgcaagattatatacaaagggatattcaacagtagataatggagcaactcacggacacatgaagttcttatcaaggattataagactttcaaaagaaaatcctgagctttttgcaggatatgaaacacagctttctgcgatagaaaagggcttctggaaagcagcaaagtatatgtgcgattcgcagaataacaatggtggatggccacagtattatccatatggtgttggctatttcagaaatataacatttaacgataatgccatgcctgaccttatggaatcaatatacgcactttcaaacgataaagggcttactgataatgaactttgtgaggactatgcgtgggcaagagatgaaataaaggcacagactaatccgtatgtgcttgagcttggaataaaacatgatactttaaaggaagtatgggataatggtcttgattttgtaataagggcacaggtggtaatcgatggaataaaaacaggctgggcacagcagtatgatccagatgaaaaaaatcctgttccagcaggtggaagagcatttgagcttccttctgtatctccggatgaaagtcttacaatggtaaaggtacttgctaacatagtcaatccaagtgcagaggtaaaggatgctattacaagttatgtgaactggattaattcagttggtataacaggatatggtgtatataatatagctgatagaacaagagagcttggaactgacagattaatattaaaggatggaagtacgacaaagcagtttggacgtttctatggacttgatacaacaggtgaatattatggattcacaaaagcacagatggcaaataagatgacagacagtaagttctatgaaatatttgcaggaagagattcagtggcacagcttagcatgaactatggtatgggtgaaagaagaataggatattcatatgtaagaactaaggcagatgttaatgctacagcggtatataatacatggaaaaaggcgcttggtgaataaatagtcctagagtaaagcagtgtaagaatggagataaatatgagacgagatataaaaaaaggtatgaaaaaagcggctataggtattgtggctgctacaatgcttacagttatggcagcacctgtatctgttttaccagtaagtgcagcaactgtaacaagaggaagttatgatttttctaatatggttgtaagaagagtatggtttaatacaaatgatccagtatttttaatagatgattatgaaagagtatggcttgataataatgttaatgtattagctacaggcaatgcaactgatgctaagacaacaagtaatcttatggcacctatgaaaaatatgtttgcttatataggtgctgattacaaggaaaatggtgataacataactatcactatgaatgacacaacagttaagcttaagattggttcttcagatgttgagattaatggcaaagttacatcaggtgcattaacggatgagcagataccagcaaaggtcaatgttaaagaaaagtatgcagattataacacatttttaacagaagattataatgttgtgtatcttccagttgcatatgtacttaatatatttggtgcagatatgtacaaggatggcaaaatgtcagacagcttttatgcagcggttccagttatgaagacagagtctgttccttcatatgaaacatcttcaaaaggatatggcatgcgttatgatgcattgcttgagggaacacttgatgttactacatcagtagcagatcttattgtagcattacagaacgaagatggtggattccaggtacttcctgataattatgaaatgtcacagaaggaaacaggacttggaagcatgaaagatgtttcaagtgtttacaatggtgcaacaacagcagaattaaagtatcttgcaaagtatataacagctaataagccagaagattcaaagtatcaggatgcatttgtaaaaggtattaagtaccttcttacaacacagcatgataatggtggatggagtatgaatccaggtagtggaagtggctttaatgctaatatagaagtgggtaacaaggctatgactgaggtacttacacttcttagtgatattgcaatacttaacaatcaggattatgtgtttgcaaggaaagcgatgaatgttgatgaaataaagtcagcagtagaaaaaggaaatgattttattgtaaaatcgcagatcagcaacaacaataaaaagtccggctgggcaacacagtatgacaagtctggaaatgtaactatgggacatacatatgaaagagagtctgtcagttcttatacaacaaaggatgttatcgactatcttatgactatacataatccttcacaggatattaaggatgctgttgaaagtgcatacagctggcttaaggatgttaaaatagctgataaagagcagaaagttgtaaaagatacatctatgaataatggctttgatgtatatcttgttgatggaagcggaacatgggcttctaattatgtatatgataaagccactgattcttacagacctttgtattcagatgtggatccaacaagggcagaccagaagtatgtaaatgtatatgagctttacaatcttgatggtaacagtgttggaaataataagattaacaataaggatttgattctttattcaacaagaacaacagtttcttactatgataataatcttgcagatgagcttattgcaacaggatatgatgagtggaagagttatcttgctaatggtttccctgaaatacctaaggatccagcagattcacctgataataatggtggttcagataatggaaataatgcagataattcacagaataaggatacaccacagactccatcagaatcaggaaatgcagaagtatcagataacaatacaaagacaggtgataaggcaccagttggcttattagcagctgtacttgcagtatctggcggattagcatgtataagtgtatacgcagtaagagagtctaaaaaaagaagcttaataaaaaaataaaatgatgtcagtctgaactttcagaggatagtaaagaaacttattaatccataggcattgtaaaaaaagagtttgtattaatgggaaactgttatatacaaactctttttcagttatttgtgattaataagagatactttcggcatcttttgtctatgaaatagtggtataattttataaatgtacataatatatctaattatttgttaagttagctgagaaaaaattctaatatcaaatgtgaggaatatgaagatgaacaaaagtaataataaaaatatgaataatgatgatgtgattaatagactaaatgtagtaaaaaaatataatccacatttaagtaatgcggatgcaaagtcaccactgacagttggtaatggcaggttttgtttcacggcagatgttacaggaatgcagacactttatgatgaatatatggaagaaacaccgctgtgtactatggcagagtgggcgtggcacacttatcctggacatcgctatactatggatgatgtgtgtatgactgaatatgattttcttgggagaaaagtgtcatatccacgtgtaaaatatgaaggaaatgaggcagcctacgactgggtacgaatgaatccacacaagtttaatcttgcaaggattgcattgtcagttgatggtacatatctgacttctgatatgttatcagatataaaccagacccttgatataacaacaggcgtgttaaaaagtgattttatagtaagctatgcttcgcatgagtataaggtaagcgttgaaacagtatgtgataataagtcagatactgttgcttttagggtggagtctgaactcttggagaaagggctttgtgtggatacacattttccgtatgcttcatgtgatataacgggttctgactggttggatgataaagtacactatgataaagttacagtgataaattataatgaattggttaatatatcaagtgaaaaatataatagtgagacttgtaagatatcagataaaattcctgctgatggtagtgcagagataaagaataaaaagatatataagataaaaagacagatagatgatactcattattcagtttatataaagactaacggacaattggaaaaggcagacaaacatagatatcgtataaataaggcagatagtgacaatgttctttatctatgcgttgggtttgaggatgaagatggaatatatgccagtatatataataatgttcaaagtaatatgtgtgtagataataacaaggctaatgcagataatgagtgtgctgcagatacatttgcagcaataaaagaaaatgcatatacattctggcataattactggagcagcggaaagtttctctaccatgaaaatgaagagcttatgagaagagttatattatcgcaatatcttcttatagttaatgacagtggttatataccaccagcggaaactggtcttacatgtaacagctggtatggaaaagcacatcttgagatgcattactggcatatggcgtgggccgctttgtggggacatccagagcttcttgaaaaaagctttgactggtatataagcatacttccagaagctaaaaaaaatgcagcaaaaaatggttataggggtgcaaggtggacgaagatggtatcatatacaggaaaggattgtccgtcaaagattgcaccactgcttatatggcagcagcctcatataataaatatgctgcaaatggtgctggattgttataataacgacgtgcattttgagaaaaaaacagacaaatatatacataagtactggattctggtgcaagagactgctgaattcatggaagattatcttgtatatgatattgcttcagatacatttaacatagaagcacctgtcataccagtacaggaaagacatctcccagaggatacaagaaatcctgtgtttgagcttgcatactttagatacggcttaaagatagcggcagagtgggctgataagctgggatatgtaacattttcagataaatggaacaatatagcagacagaatagcaccgcttccggtttatgatggcttatacatatcacaagagaattgtccggatacatatgttaacaaggctattgatcatccgcttatgctgcaggtatatggtatgttagatggttatggtgctaaagatattgttgatatggatatatacagggcaactctcgataaggtaatgaaagtatgggattattctacactttggggatgggattttgcagttatagctatggcagcagacaagcttggtcttaagagtgaggcactttcgcagctccttatagagtcgcctaaaaatgaatatgtagcaagtggaaataacaggcagaattcacgaaaggatctgccactatatcttccaggtaacggaagtctgcttatagctgtagcgaagatgttttttgaatgataaagcttcttatgagtaattttcaaaattgcagaattgtgttacacttaatactaaatataaaaatagaaatggagatataatatggatgccagtcaggtattgaagcagtattttggatatgacagcttcagaaaaggacagtcagatataatagaagccatattgcagggatatgatgcacttgcgattatgccgaccggagcaggaaagtcggtgtgttatcaggttcctgcattactgttaccgggtataaccatagttatatctccgcttatatcacttatgcaggatcaggtcaagtcacttaatgaagcagggataaatgcagcttatattaattcaaccctgtcagaatcacagatgtataaagcacttgattatgcagcaaatggaaagtacaagataatctatgtggcaccagaaagacttgaaaccatgagttttataacatttgcaaaaaaagcagatatatcgatggtgactattgatgaagcacattgtatatcacagtggggacaggatttcagaccaagctacttaaagatagttgattttatagacagcctgccagaaagacctgttgtgagtgcatttacggcaacggcgacaagtgaagtaaagacagatatagagtgcatattaaagttaaaagctccaagggttgttgttactggttttgacaggaaaaacttatactatagtgtagagcatctgtcaggaaagaaaaaagatgcgtacatagccggatatataaaagagcatatggatgagagtggaattatctactgcgctacaagaaaaaatgtggacaagctatatgatgagcttggttcactggggataagtgtcacaaagtatcatgcaggacttgataatgaaacaagaaagcagaatcaggacgactttatatatgaccgggttcaggtcgttatagcgaccaatgcatttggaatgggaatagataagtccaatgtgagatatgttattcattacaatatgccgcagagcatggaaaactactatcaggaggcaggacgagcaggaagagatggtggtgaatcgcagtgtataatgttgttttcagcacaggatgtcattatagataagtttcttcttgacagtaaggagtttgagggtgttgaagatgaggacagaagcataataaaagagcgcgatttacacaggcttcatactatggaaatgtattgtaagaccacagaatgtcttcgtaactacattctttcttactttggtgaaaaaacaggagagccatgtggtaattgtggtaactgcaacaacgaatatgaacagatagatatgactgcggatgcaaagtgggttattaactgtctggcagaaacacatggaagattcggcttgagtatcgtgcttggaacactgcttggcgcaaagcgtgcaagacttaaggaagtaggtgcgttaagctataagtcttatggaaagttgtctgatagaaaagaagcagaactaaggctccttattgaccagatgataaatgctggatatgttatacagacagatggagagtacagtgttttaagaatgggtgatataagtcctttaagggatgaaaatactcatgtatacataaagaaggccaagagaacatatgctggtgagcagctcaatatggcaggacagacaggcagaaaggctgcttcaggaaatacgagtgatgctacagaaggaagcaatgtagcttcaaggacaagaaagaagagtacagattcacttactgctgcaggttatgagctgtttgagcggttaagggcattaagacttgttatagcgagagaagaaggcatgcctccatacattatatttaatgacaagacgttgatagatatgtgtgaaaagctgccggtcgattcagacactatgctatcagtatctggtgtaggacagaataagcttatgaagtatggaagcaggtttacagaggaaatcaataagttcgttagtgagcatccaggtgttgttactacacttgatatatagtggaaaattgtaattaagtgcatacagatattgatatggaggatataaagttggaagataaaacaaagataatagcagtcgcaggcaaaggcggcgttggaaagacatcacttgcaggagttatagtaaagcttcttgttgaaagctttcctgataagaagatattggcaatagatgcagatccggcagtcggtctgtcaacagtgttaaatgtagatgtagataaaactatagatgatataagaaaagaagttataaagaatgttgaggatggtgataccaagtcggcagtagaacttttaggagaagctaaatatgaaatatatgatgcattaaaggagcaggatggctatgcatttatagcaataggaagacctgaaagtgcaggctgttattgcaggattaactcatatcttaaagaagttatcactatgctttcagaccagtttgactatgttgtcatagatggcgaggcaggtattgagcagataaacagaagagttatggagaaggtgacacaccttctgcttgttacagatgcaagtaaaaagggatgtcaggttgttaaaactatcaaggacgtagcggatgaacttgttatgtatgataagataggtgttattgcaaacagacttcctaacagcaaggtaacagagcttatggatataggtgatatgcagcttcttgcggctatagagagtgatgaggagcttgcaagagcagatgttttaggtgaaaatgtattaaaactttctgatgatacaaagatagttaaaggagcaagagaagctcttgctaatatcgggatattataggattgcggaaattgtaaagcaatgtagtaattcgtgtacatcataatataatggtcaaaaggtcgaaggtgaaaaactgattcgttaaagaaaggataacaacttgaaagatttacaacatttatattattttgaaaagcttcttgaagaggtgaataatgaacttgtaagaaaggcacaggaaaagggggatatagccattggagctgtatgctttcagattcctgaaccactgcttaaccttccgggatgcttttcagtgagattgcgtgcaccaaggacaggttctatagagatgggcacatattatatgagcagcatgctatgtgaggggtgcagggcaatacttgaacgtgctatagaaggtggatataactttcttgattgtataatagcacctgatgcatgtgcacagatgaacaggtgtgttgaaaatatagagagacagaagctgattactaaggaaaagttttttgtggaatattcagatgttcctatgaagtcagatgagtcagcactgaaacattatgtaaagcagatgaggctgcatgttcttgagccgcttcacaatacatatggaatagatatatcagatgaagcattgaggaaggctgtagatgaacagaatgagataagcaggcttataacagagattggagattacaggaaagaggataatccaagaataacaggctatgagttcgctgtgctatgtctggcgacatattgctgtcctaaggagtaccttatagataagttaagggatacagctaaagagttaaaggtaagacagccggatattaagaaaaactacagggcaagagtagcacttataggttctgagatagataatccagaacttataaagcttgcagaagaagcaggtgcacttgttgttgctgaccgtttctgttttggttcacttccaggaagaagtgagattattcttaatgatgaagaggatgttctatatcagatatgcagacagtatatgcagtggggcaaatgcccaagatatatgaacacagagaaaataagggaacgtgaggagtatgttgattatatagctaaagaatataaggcagagggtcttatatatgaacagataaagttctgtgattactggggctatgagagagcatcagcatttcatgttatgagggaagagtacgggtatccggttctttctatagacaggccatatgtagtaggttcttcaggacagataagaacaagaatacaggcatttgttgaaagtcttgagataaagaaaatcaacaagagcaggtaacaattcgtaggtatcaaagtcggggggcttttgaccccgacatcaaataattagaccataaattgaatttaatgcaatattaaaagatatactaaaaaaaatagatatacaaaacaggatggagaataatatatgtcaagtaagcttggaagcgagccgcttggaaagttttacacaggtaagaagcctaagaaaaggcgtgaatggcgtggacttaaggatacctggtatgattacacaagatggcttggatattggaaaacattaataacatttataataaagcccaataatatgaaaggatttttcagataccgctggatgatgaattatctggcacttcctgattttatggacaggcatacagagggtatgagagatctgcagcttcggatggcacacaatgcccttggactcatagtaacagatatatgtggtatgttaggacagatatttaaggcagatccagctataggaaacgataaagaacttaataaaaaaatcgtgctatttgatgagaatatgatgagtacccttatgggaggctttccgaatcttgtatggctgtcagtagaggttccagcggtgtatacaagttcaatgatgtcgcagacaggtgtaagctattatgttgatgtgacacatgaatacggggtgccatcagatgtatgtcctatgccagcagctgagcttggtgttgcacttgcagatgatttccctcttattggctgttgtgcagtgcaatgtaacacaacatgtgatggaagtcttatgggtaatggtatagaggcaagatcttttaagatacctacatttcagcttgcagttcctataaggcacagacaggaaagtgttcaggagtatgcagcagaagaggtgcttaatgccatacattttatagaggaacagacaggtgagaagtttgactgggatgcattttttaaaagcatggaaaggtttaacgcagaaactgacgagttccttgagtggatggaaatatcaaagacagattatccacaggttatgggagttacacttgcactttacaggtatggtgtttatcaggctgctggtggaagaaaccaggcatttcttgatatggataagaagcttacacgtatggcgatggagggctatgaaaagaagctgcctgctgctaaggaatatcgtcaccgtgctatgacatggggcgttcaggcagcatattatacagcgcttcctatatggcttcttaactgttggggagttgtgacaataacagatatgcttagtatggtatcaacagaaaaggttaatacaaaagataagcatcaggctatgctggacctggcatatttatatgagaatatgattatgagaaaccgttctaacggtggatatgaaacaggcgttgaggcactctggagattctgtgaaatgttccgtatagatatagttattatgtatgtacatatgggatgtaagtctatgtcaggatatcatggactttttgaagaagaggcaagaaagcatggcgtacatcttatatgggtaactcataatcttatgtgtccagaggatggaagcaggcgtgatatgagaacagagataaacagatatatgagaacagtgtttagagaagaaccgctagaccctacacttgaagatttcgatgataagcagaactggtaggaatctgcgtggattgcgcagcaggtaagcatatgcagagtatggaggacatatgagtaagttttatggtggctgtgatgccggaagtacatatactaagtgtgtaatattaaatgaagatggaaaaatagtagcagatgttacaaaaagaagcagaattaatcctgtattgagtgccaaagatgcacttgatacagcgataagccaggtggatggattaaatagtgcagaggagctttcatatcttattggaacaggttatggacgtaataaggtaccatttgccgatgagaatatatcagagataagctgtcatgccatgggagtacatgtgacagacccttctgttaaagctatcatagatataggtggacaggatgttaagggtatagcgatagatactgatggaacagtccttaactttgccatgaatgataaatgtgcagcaggaacaggacgattctttgagtctatggcaagagcctttgagatgagccttgatgacttttcaaagctttcactatcagctaaaaatgttattccaataacagcacagtgtgcagtgtttgcagagagtgaagtgatatcgcttgtaggtgagggaaagcctatggatgaaatagcggcaggtatagagctttcagttgctaaaagatgctttgttatggcaaaaaaagccggagtagtagattcagtcacacttacaggtggttgtgcaaagaatgaaggtttaaaacaggcaatcgagaaggtacttaaggtaaaggttgtagagctgccagtggatccacagcttatgggtgcacttggtgcagcagagtatgcaagacagaagggaagagttaagcagtgataatattaaaaatagcagcaataacagccatagttctgattatattatttgtactcacgttgatcatatatttctttaatcttgatatgaagtttgccgcatgtcttataaaaccgcttacagcttattataactggtcgggaaacagaagaaaaaagcataaagaaaagcaaaaggaaaagcagcagggatgatgctgcataagaaaggctgaatgtaatatgcaggttctaagtatttatgataaagatatatcagagttaaagaagtgctttaactctgatgcttatggaaatattaaaaagcttccgtcagataaatcatgggaggttacagcacaggaaagtctggttctaaaacgtgatatggcatatgagcttggtggaggtatgaataaagccattagttcaatagcctttactacgtcaagtgaatgtgtcagtgatgacggagtatatcttatgggagaagatcttcaggatataaaggaagatatatcatatgcaagattcacctttatacggctgaatgagtcttatattaaggatatacaggaaaaaaatgcagaagccctgcatgctgccctgcgtgctgttgactatgtgagatatcataattttcctaaaggatatatgatgagaatatcatcagtaaaggaaagagaaccagtaagagtgtcaaaacaggcaatagcagatggcatgacattttcacatataggctctgagatgataaatgcatataggaaacgtaaggaagttgaagcagtgcagatatactttctgacaagtaaaacagcggattatgagcttttatatgataaggcacatagaattgaacagattacagattcgcttaatcatatgtttaacggactggttatggattgttcatcctgtaagagcagagagctgtgtgatgagatagatgggatgaaagagttacataagaacctttcatccatctgacagagtctggttgtctctgctttttttgcttttgattttattcttgtacatgatggaatctacagctttaaagcagttatcaataccactttcgtctatagcaccatatccggttgcaacagaatatggatagtcagttgtagctgcaatatcattaacagcctgatgaaatgttttaagacatctgttgatgatatcaaggcttgtattgttgattatgacacagaattcatcaccgccgattctatagcactgaccgatttccatgaaattctcgtgcataagccttgcagtattcttaatagcttcatcaccgaaacggtgtccgtatgtatcgttgatatgcttaagattattaaggtctgcaatgagtatatatctgtgtgattctacgcttaagcgttctttttccatggcaagctcaaaggcagaacggttgtttatatgtgtcatggcatcagtgaatgccagttccttgtatattttattacgtgtgttttgtataaaattctctttgataacatgaaatatcgaaaaactgaaatatacaagcagcaaagcaataccatatacagaaaatcttattctttcaaaagttgaattgttagaatagtagcgtataatatcaagaataagaaagaatgatattatcataatagatataaatatattaaactctctgattgtgtttgttttccagtttttaatataagttattatgactgccaatgtaatagagagtatctcaatatgaacaatccagaggacattggatacaattatcaatcccataagctgcattgtaaatataacagcgattgagagtatttcacaccagtatactatatacatataagcttcattcttgatatggtcaaaggtaagaagaaaaccagttactgcgattggaaataaaaagtaacagcaatatcctatatatgatgtaaaagttccatggctgaaaaacagctggattacagtagagttgcagattgtccatataccagcaaacatagatgtaagtccaaactagtaaagtcttttagataaatcagtttttattataaaagctgttattaaaagcataatgccacatatgcaggcaagaaaacctattatcagctgaaatgcatgccggcataatatatcaaatataagggcacttttagtaccagttgagatatgaagaagcttcgtaatatcaatctgtgaattcatatctatagtaagagtaaaatcgtgctgtgggactttaacaaaataccagtgagaaggtcttgctaatccggcaaaatcgattatatcattttcgttgtacacctgttcattatcaatatatatattaactgcagagttgtacgcataaaaagaaatataattacctgctaattcatcaccatgaataaaacgtgtcagagttactgactttgttttttcattgagtctggcaggaagattaatggatgaattagtattattgaagcttatattataattatcagttatggtattggttgattcgttgttaagacataatccatttatccttgtattgcaatatatagctatacctaagaatagaaaaacagtaaggataaaacacatacttatattgacagcagatgaatttgtaattatattaaacttattagcgaagcaatgctttttatttgaaaatatattctgcataattagttgctatcctttctgataatattttgatggttatgtaaaatatcactttagtactatataatagtactaattacccacaaaccttgacattatagcataagtttgtaatttaattcaagtaccagaatgtatcaaattaatattttaaggcattggaaatggaggattattgtgtatagagaagattatagtgtagttattccaaagtttaaggaggttaaggtatcaatagatgagcttggtgcagtgagtggaaagcttgatgttaaaacaggacatgataatgcagttattattaataatgcaataagaagcttatctgaaaatggtggtggtactgtaatagtaccagctggaatatgggcatgtgcacctataagaatattgtctggaatcaatcttcaccttgagagccaggctatgcttaagtttataaagtcaaaggaagactatcctttaataataactaattatgaaggtcagcagtgtatacgtgctgtttcaccagttacagcagagaatgcagaaaatatagctattacaggtgaaggaatcatagatggaagcggagatgagtggcgtccagtcaagagattcaaggtaacagacaagcagtgggaagcacttcttaagaagagtgataatgtgtttgcaacaaaagaaacagaagtgtggatgccatcaaagtcaagccttgctggaaacgagaagaatatccagggtgatacagaggatattatagatgaagcttctgaatattatgatttttacagacctgttatgataagcttaagatattgcaggaatattcttttacagggagttacatttatgaattcaccagcatggaatattcatccatttttctgcaggagtcttacagtagatcatgtaaatgtgcgtaatccatactatgcacagaatggtgatggaatagatgttgaatcatgtacagatgtacatatacatcatagtgtgtttgaaactggtgatgatgcaatatgcataaaatcaggaaagaatgcagttgcaagaacaatagaaggtccatgcagcaacatatatgttcatgactgtattgtaaatgaagggcatggcggctttgtaataggaagcgaaatgtcaagagacgttaaagatatacttgttgagaactgtacatttacaggtactgatgttggtgtgagggtgaagagtgcattaggacgaggcggagtagttgagaacataacaatccgtaacattaatatgataaatattaagggtgagggcgtaatacttacaatgtcttatgttcttaatcttcttaaccgtgatgagactaatgctatggacaatgaagaagatattccatattttaagaatatgaatatggaaaacataacatgtctgggttgtaaggaatttgttaagatagagcctttggatggacgtcctgaaacaatatcagatattgtagtgaatggaaagaaatattgttaaaattaataatgatattattattatgatattattattgataatattattattgagcatatgaatgtaatgggggaaggaaaaactgtaatctggcagttgtttctttcccttttatatggataacgaatattgtgatgtgtgtaatgaaaatataaaatatgtttttcggatacatgaatggagataaaaatgaaaaataataagtatgaaatagacatgtgcaacggcacaataatggacaaactcatatcatttgcactgccacttatgatatcaggaatgcttcagcttatgtttaatgctgttgatataatagttgtaggacgttttacaggaagtcaggcgttagcagcagttggttcgacgacagcgcttatatgtacattcactaatctttttataggtgtatcgcttggagctaatgtacttgctgcacggttctatgcttcaggaaagacaaaggaaatgtctgaaacagtacatacagctatattacttgctttaataagtggtatcgccatgagtgttataggaatattgtgtgccagagaatcccttgtgcttattgcaacgccggatgatattatcgggcaggcagcattatatctcaggatatattttttgggcatgccattttttatgttatataactatggagcagcaatattaagggcggttggcgataccaagagaccgcttatgtacttaatagctgctggtacagcgaatgcagtattagatctcatccttgtaattatatttaaaatgggtgtagctggtgtagccataggcacaataacatcgcagtttatttcgtgtgtactcgttataaggtgtctgtgcaagacagatgccatatataagttatacatatcaaagcttagaataaagaagtattatcttatccagatacttaaggtaggacttccagcaggtatacagagtacagttattaacttttcaaatgttttgttacagtcatctgttaattcatttggagaaatagctatggctggttacacggcagccaacaatatacttggatttttatatgtatcagttaattcagttacacaggcatgtatgagttttacaagccagaattatggtgtgcgcaagtttaaaagaatggataaggtgcttgccaactgtgcaatattgtcaataatagtatctgtagttataggtggcggctcatatcttttaggacatcagatactaggaatatataccaggcaggaagatgtaatacaatgtggtatggagattctttccatatcaaccattccatattttctgtgtggtcttatggatatgattccgggttctatgagaggagttggctattcagcagttcctatgatactttctataatcggaacagttggaacaaggcttgtgtggatatatggagtattccctgagcacaggtcattgtatgttttgtttatgtcatatccagtttcgtggggattgacgatagtcatgcaggcaatatgccttgtgtttgtaagaaggaaaataaggaagtgacagaaataacagaacaaaataaagaaagagggataattgataaaatatgaatagcaaaataggtaattataataaacaacagttaaaagatcagcttaagtctatgggacttaaaggtgatgaaactatacttatacattcatcaatgaagtctataggtgaggttgatggtggtgcagatactgtgcttgatgcgtggatggaatattttaaggatggacttttacttctgccaacacatacatggaagactgtaaatgcggataatccggtatataatccacagacaactccatcatgtgtaggacttcttacgaatatgtttatgaaaagggatggggttatacgttcgcttcatccaacacacagtatggcaggttacgggaaaaatgctgcagaatatctggcaggtgaggaatataataatacaccatgtactcctggtggctgttatgacaggcttaaggatgcaggcggcaaagtgctgcttgtaggtgtcggccacgaaagaaacacctatatacatagtgttgaagaggtgttaaatgtgcctaacagactgtcggatattcctatggagcttgttatagaacttcttaaggaagatgaagataataaggataggaagcttccttactataacatggctgacggctggaaaaaatgtattgatagtaatgggggacatgataataaaaacaaattatgcaggaaggtatatgtaagaaagcattacaatgcacagcagcctcatatatctgaggatttcgtcaagctgaaccagatattccttgacagcggagttgttaaaaaggtaaagtttggcgatgccgacagtcttttgtgtgatgctaaagggatatttaatgttgtaagacaagtgattgcaccagacccagagtgtattgtaactaaggatacattatcgatgccagagtattgatttgattataggaaaaaactattactacatatattttattaggattatgcatatgttatgttttattatataataaccatacaaacatacaagaaatataggaatatattaaaagaaagagaaagtggtggaatatatgaaacagatattatgctttggagattctaatacatggggacttatccctaagactaataaaagatatgagtggggcgtaaggtggacaagccttcttaatgaaagtctgaatgataaaaaggaaggtggatatcgtgttatagaggaaggcttgtgtggcaggacaaccgtatttgacgacccgttaagagatggacgaaatggtgtaaagatactgccaactatattggaaacccacaatccagttgatatagtgataattatgcttggaactaacgactgcaagactgtttacaatgcatcagcagaatttattggtcagggcgtaaaaagacttattggacaggtaaagaactacataccagatagtaaaatacttgtaatatcgcctatacatcttggtgagggcgtttgggagtcagactatgaccctgaattctctagtgcttcagtgagcctgtcaaaagagctttcagatgtatacaaaaagattgcagcacaggaaaatgttgggtttatagcagcttcagaggttgcctccccaagcactgctgacagagagcatcttaacgaggaaggtcataagaggcttgcagggaaggtggaagagtgggttaaaaatgtggcgtaattgtggagagataaagcgtaaattacgatataatgagcgcaagagaaaaggaagcggctgcgaagcagacatttacttttcttgcgccattaacgaacgaacagtcatgcgaagcagacatttactttgatgcgtgcc

SEQ ID NO: 444 - DNA, 6992 bp, Unknown
  gut microbiota DNA sequence
cagaatgagtgccatacgccggcagcaccgtatatacggcttagaatgaaggcggcaggtataatgacagcaacatatctgaatatagatataataagtgaaggaattcccttgccaagtccttcaagtgcgccggaggctgtgacagatacagaggatacaataaatccggcgcttataattcttaaggcagcagctcccgcagatatagttgtttcgttggaagtaaataatccaataagtgtttcaggaatacataagcatacagcagttccgatacacataataacaagaactatgcctgttgcagttgcatatattttcttaacacgtttagtttcgccagcaccatagttgtatccgataagaggacgcataccctgtacaactccatttgcaggaagatataggaacgtctgaagcttgtaatatacgccaagcacgaaaacatatacctgtgaatatgcagcaagtatgacattgagcgcagatatgagcagtgaaggaagcgccatattaaggcatgcaggtattccgatagaatacattttcatgcagagtatcttctctggtttcatatattttcttgtgaagcgcacaggaataggtctgaaaatatatattataatgtatacaataagacttacagtctggcctatgccagttgcaagtgcagcgccctcaattcccatacgtggaaatatgccaagtccgcatataagtacagggtcaagtataatattggttatgcagcctgtgagcatggcggtcatagaaacagtcattcgtccgacagcctgaaatgttttttcaaatacgagttcccatgcaagcattagtgaaaatgcaaatgcggtaacagagtactttacaccgaggtcaataacggtctggtcattagtaaacatattaagaaatggtcgtataagaataatgcagccagacataagtacaattccgtggacggtgcttaagaataagccctgacttgcagctttatcggcagtttccttatcagaagctcccatataaaatgcgatgacagcgttgatacctattccaaagccaatcatgacagagttgataaagttctgcatagggaatacaagtgatatggcagtcatagcattttcacttatcttagcgacaaaaaagctgtcgacaatgttgtacagtgaattcacaagcatagatataaccatgggaagagccatagttaataagagctttagtatgttttgttttttcatataagtctggtccataatatttctcgtttctttaatatttttatggtgaaaaattctaaataatcacattatcttatcttaattaatgcttataaaatagcataataacagtattataagcacaaaaaaaccacatagcccgtaagctatgtggcgaaaaatagaaacatctagaaaaatccacatgtgttttataaataaattgtagcaaaacttacattgtgtaaaaacaatgtatgcggattatagcattgatataatcacttgtcaatcaataatctgattataataattgcaggtcatattctttatataaaatctgataaacatatataatcaatcgataacctgcttagatataatctgacacataaggtacagcatggaaaagtatatcatcaagcttttccacagcttctttggtagtttcaatccgttccatactgtaaagctttttggcgcttttatagccaagcagcatagttgtcagggtagctattgacattttcatagtatagtcgggagtaccgcttgttatactacagtgcccatccttgaacatgacaatgaatcttccgttattccaggaaagaagctcatcttcgatatcgaaagcaaagacacatgcaggttcatcagggtcgatggcatattttccaaaaaactgcttgatatcgataattcttcccatagcataaggtctgatagtttcctttatatcactgtcatcaagctcaaaggctatcggttcgctgtaatagttgttaccacgtacttcatcaatcatagaatcgtgggcatgtatatattcccacagtccaagctgggcttcacggtttagatatatcatttccttaacgtgcataatgtcggagcttatcatatacaccatatatccataaggaacaccatcccttgaataatatatagcaaccatagtgtcgtcctcatcccagcgccagtattcttcccatgcaaggttgttgcggtacaggcagccatgggttttttcggcgaatttggaatgaagcttgtgaaattcctcatcatcccatgatactcttcgtacatatccaggttcgtgtaacttttctggaatctgtcggtctttaatagtgtatgtcattttgttagatatgatttcccagccaagattgcggtagagaggtattgaataaggatatagcagtgcaaatgacttgtgtccttcacgcatacgtgtaagacactgtatcataagttttttcataattccgtggccagtgtattcaggatatgtgcatacgcttgttacaaagcctacattataacgtatgccgtatatgttcatatcaagtggatatacggcaaactgagcgataagctcattcttatcaaagcatccaagaacgtcagctctttgaagaaccgggaacttagactgctttatctcatcatctttccagccagtttcggcaagctcagcttctgttacctgaaaggcatatcttaaaagtgcattatattgttcggcatcatctgttgtaagaggccttattatatattcttcatcattaggaaagttcataacaattaatccttcttaattattttagtacacaaacattttagattatcgtcattatttgtcaaggtgtaaataaatgctatcacaaaagctatgacaaatgtcataattaatggaaaattaatataaaacatgctgataaaatgatacaataataaaataatggacaaaattatttattgtttaaaattaaatgagcaaaaaataagaaagaaatgaggtgtttttatgtgtacagcagcaacttataaaaccaaagatttttatatgggaagaactcttgattatgagttttcttatggtgaggagataactataactccaagaaactatgaatttaatttcagacatgcaggacagttaaagtcacactatgcgattataggaatggctttcgtggcaggtggatatcctctttattatgatgctgtcaacgaaaagggtgtaggtatggcaggacttaactttgttggaaatgcagcttatgaggaagttatattagatgatgagtcagatgccatacaggttgcacagtttgaattcataccatggatactaagccagtgctcatcagttattgaggcaaggacaaagctctcgcagatgaggcttacgaaaacacctttcagtaagcagctcccagcagcacagctccactggattatagcagataaggatgattgcatagttgtagaatctatgaaggatggactgcatgtatatgataatcctgtcggagtgcttacaaacaatccaccattccctatgcagatgtttgagcttaataactatgccggagtatcaagaaaacagccagaaagcacatttgcaggagtgcttaagcttaatgcatatagcagaggtatgggtggaatgggaataccaggtgatctttcaagccagtcacgatttgttaaagtagcatttacaaagcttaatgcagtatccggaagtgacgagatggagagtgtaagccagttcttccatatacttggttcagtagaccagcagagaggctgctgcgaggtggcagatggaaagtttgagataactatatatacatcgtgttgtaatgcgaccaaaggaatatattattatacaacctatgataatcaccagataacagcagtagatatgcgaaaagaaaatctggatgcttcacagcttataagatatcctattataactactggtgaggtaagatggcagaataagtaatgtttaactaataggcatatcttgtgatttaaagagtttgtttatatatgggaggattaaggttgaagtacgattttgatacagtagttgacagaagaaacacagggtcacttaagtgggatgtgcgtgaaaatgagcttcctatgtgggttgccgatatggactttaagacagcaccggctattacagaagctattatagaaagggcacagtatggaatatacggatattccatagtaccggatgagtgggggcagtcttacaaggaatggtggaaaaacagacataactgggatatagacacagactggcttgtgtttacaacaggtgttattcctgctatatcaagtgtggtaagaaagctcacaacacctaatgaaaatgtgcttatacagacacctgtttataacattttctttaattcgatagtaaataacggcagacgtgtacttgaaagtccgcttgtatacaaagatggagaatacagcataaactggacagaccttgaaagtaagctgtcagatccacagacatcgcttatgatattgtgcaatccccagaatccgtcaggaaaaatatgggagagggaaactctgcaaagaataggtgagctatgtaagaaatattatgtaacagtcgtttcagatgagatacattgcgacataactgacccagacaaggaatatattccatttgcatctgtgtctgatatatgcagggatataagtattacatgcatagcaccaacaaagacttttaatatggcaggtatccagacagcagcagttgttgttccacagaagaacttaagacataaggtatggcgtgcacttaacacagatgaggttgctgagccgaacacatttgcaatatcagcagcaatatcagcttataagaatggtgcagaatggcttgatgaattaaggcagtatataagtaataataaacaaatcgtgtatgattatgtgaaagctaacataccggatataaatgtggttaagagtgatgcaacatatcttttatggatagactgctcaaaacttacgaaagacagcagaaggcttgcggcagatataagaaagaagacaggactttatctgtcggcaggaagtgtatatggaaaaggtggagagagctttttaaggttgaatatagcgtgcccggagagtgttcttaaggatggacttgaaagacttaaaaatggcttaatggaggttaatgagggcagcaggcttaggtatgagatgtttgagtatatgttggaggagtaagtggattaatatataaaataattcttatatgaactatataaaataagtcttataaccataataataagaaataataagatatatttcatatatacttatgaaaatttaatatatttcttagaaataattgacagaaaaagttaaaaacttaacaatttaaaggttgctttttgctaactgattatgtatactatcaaaagaatgtggttaaatccattttctgtaaattactataatacttataaaaggtattaaggaactacaattaaagaaaagaggtttaatgtaaaatggcaaacgttgatttaagcaagtatggtattacaggcgctacagaaattattcacaatccttcttatgaattattattcgaagaagaaacaaaggcttctaacgaaggttacgaagtaggaaaggaaagcgaacttggtgctgttgatgttatgacaggtatctatacaggtcgttctcctaaggataagtacattgtagtagatgagaattctaaggacacagtatggtggacttcagatgagtacaagaatgataaccacccaatgtcagaagatgtatgggctaaggttaaggatattgctaagaaagaactctgcaacaagagacttttcgtagtagatgcattctgtggtgctaacaaggatacaagaatggctgttcgttttatcgtagaagtagcatggcaggcacatttcgtaactaacatgttcattaagccaacagcagaagaacttgaaaacttcgagccagatttcgtagtatataacgcttctaaggctaaggttgagaattacgcagaattaggtcttaactcagagacatgtgtagcattcaacatcacaagccacgagcaggtaatcatcaacacatggtatggtggagaaatgaagaagggtatgttctctatgatgaactactaccttccacttaagggaatagcttcaatgcactgctcagctaacacagataagaatggtgagaacacagctatcttcttcggtctttcaggaacaggtaagacaacactttctacagatcctaagagacttcttatcggtgatgatgaacacggctgggatgacaatggcgtattcaactttgaaggtggatgctacgctaaggttatcaaccttgataaggaatcagagccagatatctacaatgctattaagagaaatgctcttcttgagaacgttactcttgatgagaatggtaagattgactttgctgataagagcgtaacagagaatactcgtgtatcttatccaattaaccatattaagaatattgtaagacctatatcttcagctccagctgctaagaatgttatcttcctttcagctgatgcatttggtgtacttcctccagtatctattcttactccagagcagacacagtactacttcctttcaggatttactgctaagcttgctggtacagaaagaggtatcacagagcctacacctacattctcagcttgcttcggacaggcattccttgagcttcatcctacaaagtatgctgctgagcttgttaagaagatggaaaagagcggagctaaggcttacttagttaacacaggctggaatggaacaggtaagagaatttctattaaggatactcgtggtatcatcgatgctatcctttcaggtgctattaagacagctccta

SEQ ID NO: 445 - DNA, 10202 bp, Unknown
  gut microbiota DNA sequence
gacacttcctatgttcaactttgaagtacctacagaacttccaggtgttgattcaggtatccttgatcctagagacacatacgctgatgcttctgagtgggaaacaaaggctaaggatcttgcagaaagatttaacaagaactttgttaagtatacaggcaacgaagctggtaaggctttagtagctgctggccctcagttataattaagttacattaataaaaactgatcgctgggatatataccggattgtagtttaatattaataaataaaactccacatactctgtttacatgacagggatgtggagtttttaatatgattttatataggtattcattataagtcctgttatttagcaggaattaagagaaaatcaagatgaaaaattagattagagctgttttcagagctaaatctctggtttaacaatattaagtggcatcataagatggtttattaggattcggtatgcttcatttccatcgccagctttaagcttttcaaaatattcttcatgttcatcaacggttccgatgcttcggccatccacctggagagcagattgcgttgtaagtctgataagatacataagacgctggaacatatggttgatttcttcattctctatatagttaacgagtagaaggtggaattcgtggtcatagttgatgaagctttcataatcatcatcaagattaatagctttcttttgcttatcaagaatttcgccaagcttttctatagtccgctgaccttttggtgtattgtattcgtcagccagacattgtgtgcagaagccttctatggcacatcttatctgtatagtttccttcatatccttctggcttaactgtcttattctgaagcccttgcttggaataactgttatataaccatcctggctgagacactggagagcctcacgcatgggagttcttgatattcctagttctttggataacttagtttctgagtaaagagtattagcatccagcttgtggctgagaataagattcttgatatagttgtaagcctcaagctgtaatgacgacataagctgcatatattcctccgttgtataaattcctgataatagttatgtccataatatattataaaatcttaatgaacagtaactaaaaatgaaaaagtaacaaaaatgaaaaagtaataaaaaaacataaaaaatacaatttacctaacatataatagtcgataattgactataggtcaatgaaattaatataaaatcggtacaccggtatgcaatatttatgataaaattattaaaaacttggatatgttaagtgattgtattaatataattattggaaatatcgtgattattatgtgatttaatagttaaaatattttttgattgccagttttgtaaagttatctttacaaatgcaagaaagatattatatgaaaatagaaaggaaaaacagataaaacaaatgttattgttatattaacatcataatatttaataagcaattcacaactattatatcacttataagcatataaagctgcacaaataatcatgaataaaaaatgtatttttggttaatctgtttttgaatacagtactataatacaaaccgtaaaaagaaatagataaacttaacaccacctctttgttgaaggcctgctaagctaatcagatttttggaggaaaagataaatgaatactttaaaagctgaaaaaagaagcatgagtgacaaagcaaagaaattaagaaaagaaggttatgtaacaggtaatgtgtttggcagaagcattgctgaatcgattccggtacagattgagaaaaaggaagcagaaaggtttctttcagtctgtggcaaaggtagtgaagcacagctttcccttgaaggacagcagtatgatgtccttgtaaaggaagtggattatgatcctatcaagagacagacattagagattgatttccaggttcttacagaaggcgaaaaggttcgttctgtagcagagattgtacttgttaatcatgagcttgtacagggagtacttgagcagcatatggaagagattccttataaggcaggtaagtctgcacttgttgaaaaagtcagtgtagatgttggcaaccttaagcctggtgacagtcttaaggtagaagatcttgatattgctaaggataaggatgtttcaatctcaccagatgtattagagaaggttgttgtcagtgtaacagaacagacatatgctgaagcagatgcagatgacacagaagcagctgaaacaacagaagcttaggtagtgcatggagggatttgcagtataaggacttctgatttttaaagttaaaatatagcatttataaatccggtatgtatcaaggcatgcataccggatttttgtgtgatttttgtataattttttatgcttttaatatgattttatgataccagggtcaaaaggtctaaacccacatgagcttgctcataggtgggtgaaagacctgggaacccgccccgatatgagcataaaagtgggatgataatcccacgatatgcgaatattggggagaattgtgggagtgcgtagcacggaacaattcgtaggtatcaaagtcgggggcttttgaccccgacatcattttatgtgattataaaaatgtgcatttcttaaatactgcttttatgttgaattttgttgattatagatatatactatatttatgtgtcattaagactgtaagaatgtgactaaagtgtagaaggtaggtattgcgtatgagtaaagcgtatgatgcggaagagttcaaagcaagggctaatattaagacaaggaatgtatggtttttgttgaatctgttattgacagcacagtattgttctaatgttacaaaaggaacttatgattccaaatatatagtcccatttttactgctatgctgggtgccatatgtatcaggatctatatatcttaagattaagggaaagaatgcaccattttataagctcgcaataactataggatatggaatattttatggctttatagtatgtacaagccagactatgctttcttttgcatatatatttcctgttgcaagtatgtttattctttttaaggataggaagtttatgatacgatgcggtgtgtttaattgcattatgttaatactggcatcaatataccgctttgctatattaggcatgaataccactgctgatgtagataactatatgttacagatatcatgtataatattaagctatgtttgttatgttatgtctattaatcacctgaatctttcagatggtgcacttacagattcaatcaaggatgatcttgaaagagttgttaagacagttgaacaggttaaggattcaagtaatatgattgttgatggaatcacagttgtacgtgaacttgaagaagaaaacaaacagggtgctaacttcgtagtatcaagtatgaaagaactgtcacagaataacgctatactccgtgacagaacagactcatcaactgacatgacgactaagattaatgaccaggtagagaatgtagcttcacttattaatgatgtagtaaagcttgtaagtgaatcggttgaacatacagatatgagtacaaaggagctttctgatgtagttgaaagtactaataccatggcaagattatctggtgatgtagataatatattacatgaattccagcaggagtttgaaaaagttaagacagaaacaggaactattgaagaaatcaattcacagacgaatcttcttgcacttaatgcatccatagaagcagcaagagccggggaagctggtaagggctttgcagttgtagctgatgagataagaaacttaagtgatgaaacacaggaatcatcagatagaattatgactgcacttaatcatcttggcaacacatcaggtaaaatgcttgattcagtaaagggtatgttatcaatcatacaggagacacagggcaaggttataaaggttaacgaaagtgtttccggaatagcagctgactctaaccagataggacagcatataggagttgtcgattctgccatgcaggaggttgagagttctaaccgcaatatggtcgataatatgaagcagatagaaagtgttatgcaggttatcaatgactgtataactaatgcagatgaaagtactaagattatgcttagtaagtatgaggaatctgcacgtaatgtcaataagattgaaagcgtagtcggagctatgatggaaaagctcggagttggtggtttcatgggaatccaggatataaagcatggtatgagatgtacagtcagacagcttatatcaggaaagccttctgataaagattatagtggcgagataatttcacagaaggatggaactttatatgtaagattcgataaggaagatgttgatgttgataatacagctttaagatatgaaatagagattgtggcaggcaatgttctttatcgctggagtgatgtatcagctaaaagggcatctgaatataaagaagatgtatgcaagcttgttgtatcaacacttccaagcattgttaacagaagaaagtatacaagaatgccgatacataacaaatgtactataattttttcggatgataccggaacaacattcgcaggcgagatggttaatataagcgctaatggttttgcgtttatgtctaaggcagcagaatttgccgaatgtaatggcaaaaatatgatagtaaacattcctgatttcccaatagaacagggaagatatcttgagggtgttgcaataagaagtacagatagtgatggcagctacatagtaggatgccgtatgccagaggatagcatagagataggtaactatgttaacagaaattattcggaataatgtctgttaatataaaaatgtaagccggtggtaacattctttttgtattatggtggtagaacaatagtatggtatagagggttctggatattataattacagtaagatacgaattgatgcctacagaataagatctttagatcatggcatcatcataatatggaaagcagatggttgaatgaaatcggttaaagattataatagctatgtaaagcttataagagctgttgttatggttgttgtatgttttacagttatatatgtagtaacgcttgctgggaaaagcaggataaataattataaaagcagtgaaaaatcaaagcaggatgacagtagtgttattcctgaagaagatgaagaggcatatgagcttccaccaagaacactaaacacagcagttattccttatgatggaaaagaaagggctgtatcatgctggggggattccatgatgtttggtataggagctggggaagcatatgttttcggtgaagataacgtacttgatatatcagactggactacaccatatacgttagaatatctgactggcattaaagtgtataatcttggtgtttcgggggaaacatcgaacgagatagcacttcgacaaggtggaataaaaatgtatgctgataacacatttgaagttggttatgacgacagtgttgaaatcagtataatagatgaatatggcaatcctgtatatatggctgattttagtgcatatggatatgtggaaccacatgaatcagatgtagtatatatcaatgatgatatgtttaagataacaggaacagaagaaaccggactgtatatatgccggtattcagaagaagaagatgtctatgatgcatttacaactgtatatgagggtacgcagattgtaaccaaagcctcccatgaacgtaagaatgatattcttatacttgaaataggaagtaatggaggctgggataattataggcagcttataagccagtatgatgccatgattcagaatgctggctgtgattattttatcatagtgggtgatacagatgatcctggaacgtcaatagcggatactgcgcaggggttcaggaatgatgatggaacatatgtaggagttggtgatactgcatgggaagcaacactaagggaagcatatggagagcatttcattaatatgagaacatatcttatagaaaatggtctgtcagatgtcggtttaagagcgactaaagctgattacagaggattcaggcgggggcgtatatccaaacagctaaggtctgactggacacattttaattcgtatgggtattatgcgaaggggctggcaatctatgcgaagggggtggaactaggatattggaaatgatgtataggggcatcagtttaaggagtagaaatataaatgaacagaaatggtaaaaaaaataaaaattatgcagagcttataaaagagtttataaaaaacaataagaaggcttccatatgtacaatggcaataattcttgtagttttagcaacagtggtaacaacagtaacagcaggtgctgttaaaaagaaaaagcttagcaaaaggcaggaagatacaagtgttgtagtggacataacaactggtacaacgaatgaagaaacagaagctacagaagaagaaacagaggaagaaacagaagcagaggttgtagaagactatgttgttgaagaattctttgagaatgagatatcaacagaagaccaggaagcattagaacttccatcaagaaggctgaatgtagagaatcgtccatatgatggtgccagaagatatatttcatattttggagatagtatggtagctggtgtaggctgcggttcggtcaacgcatcggttaatggaatgaatataacaggatggacgtctccacgtactatatcatatcttacaggcattgaaacttataatttcggtgttccgggtgagacctcttacgagatagcttacagggcaggtggagtaaagctttatacagacagaagtgtgacaataagtgaagatgtttcagcgatagtcagacttatagatgaagatggagatgtattcacatgtgatgattatagtggttatggagttgagagtaactcatatccagatacgatgtatattaatggatatctgtgtaaggttatgaatacaggttataacgaagtcagtatacagcttgtaaaaggttatgcagcatatagtatggatacggctgatacaggtgtaagacatatacaggcccagcagtatgctgacagcaatataaaaccagtaaataacgacatgacggatgaaccagcaggtgtaaaaataacagagaatgcaacaacaggaaagaaaccatcagaaaatataacagaaacatcaacggaaaaatcaacacaggcaccaacagaagtgacaacagaaaaatcaacagaaaaaccaacagaaccaccaacgaatccgtctataggtcttgtagatattccagaaggctcattggctgaaccaaaggcagcaaaagaccatagccagaaggatattctcatactagagataggaagtaatggaggctggggaagcgattatcagacactcatacttcagtatgacaacattattatcaattcaggctgtgactattatataatagttggtgatacagatgatccaggaacatccataggtgatgataaccagggtgaatataatgaagatggttcttatgttggtataggtgatacatcatgggaggcagcattaagagaagcatatggagctcatttctttaacaccagaacatatataatacagtatggactggatgtatgtggattgaagacgacaacagaggatcttgaaaacttcaagcgtggtaatatatcaaagcagttaagatatgactggacgcattttaatgcctatggatattatgcaaaaggcatgggaatatatgaaaaaggaaaagaactcggatattggagttgataagtagtaaaatctgacatataatctgaaataatgtatatgatattatcattatgacagtttatatgtcatttttaatataatacaggcaggagaaatgttatgacaaaaaaacaactggcaatagaggttatagaacggcttaaaaagcaatatcctgatgcaggatgtacactggattatgatgaggcatggaagctgctggtaagcgtaagacttgcagcacagtgtacagatgaaagagtgaatatagttgtacagggcttgttttcccaatatccatcagttagtgcactggcacatgcagatgtggatgatatagagaaaatagtacgtccatgtggtcttggtaaaagtaagtcacgtgatataagtgcatgcatgaagctgcttcatgaaaagtataatgataaggttccagatacaatggaagagcttttaaagcttccaggtgtaggaaggaaaagtgcgaatcttattatgggagacgtatacggaaagccagctatagtcacagatacacattgtataaggctgtgtaacaggatagggctggtaaaggatgaaaaagagcctaagaaggtagagatggcattgtggaagatagtgcctaaagaagaaggaagtgacttatgccacagatttgttatacatggaagagaggtctgtacagcaagaacaaagcctcattgtgataagtgctgtctttgtgatatatgtaaaaaaatgctgtagccgcatcgttttgcaggagtttaacatactgtgaaaagcatgtgcagaaatggagattaatatgggaaataccaaaaactataaaatgataatatcctatgatggaacaagatattatggatgggagcatcagcctaatactgatatgacgattcagggaaagcttgagaatgtgctttcacagatgataggtgcagatgttgaagttataggtgcaggaagaacggatgcaggagtacatgctaagggaatggctgctaatgtacatatggatactgatatgtcagaaaaccagatatgtgattatatgaataagtatctgccagaagatatatgtgtgcaggaggtcaggattgcttctgaacgtttccacagcagatacaatgctatggggaaaacttattgttatacatgctatgttggggataaaaaacccgtgtttaacagaaaatacgtacatataactggtgcgatgcctgatgttgaggctatgaaaaaagcagcggaatatcttgttggagtacatgactttgcaagcttctgtggtaatcctaagatgaagaagtcaacagtcagggagatatattcgatagatatatcactaaaaggtgcatatcttaatatgacatatcatggcacaggatttttacagtatatggtaaggattttgtcgggaacacttctggaggtaggattccataagagaacaccagaaagtatgatagagttaatagaagcaaaaaacagagcccttgctggtgcaacagcaccggcaaagggacttagtctgttaaaggtacattatgccagataataagaagctttaatatcataaatatgatgaattgtaccggttataactattatcgttacatgaatttagaacgccatttcagtgcttcctctctgtattgggaggctacattcataagttcatcgtattgaagtctgatactgttaataacagctgcctgttcgttaatctttgcctgacaggcagctaatttattcttattattatcgttttcttttatttcagagacaagtctcatttctttgatatgtccgatttcttcaataaaaaacatccggttatttacatatagaaaaagagtattaccagccttgaagatatgataatcagatatatctgtcacacaggatggcagtggaacaggaaaagcttctgtgcagttatgtatatcgccaaaagaaagacagtgaagacagaggtgttttaaaagagggttgttcttaaggtaaaaaagaagtagagaatgattacatacacagatagatggattatataactcaggaatattattgccgcttactgtatatatactctggctttccattatgtttttaatgtgaagtgaattgtcggttgagatatatgtatagtataaagtgtcgttataaacacattcattaagtccatggttatagtcagtggcaagtactatgggacgttcaagtcctccaaaatgagcgattcttaagaatatattagaacctgcggcatatataataagctgacggttgtttccaacagaatatacattagacataataatctccattcttgcgctgattctttgc

SEQ ID NO: 446 - DNA, 11359 bp, Unknown
  gut microbiota DNA sequence
agaaaggaatatgatatggcgagatgtaaatgcaaaaagagtgggtgctgtacaaagattgtaagtgatattgtatctaatatgcctaatggctgttttgatgtttgtacgaatccgatatgtggatcaccttccgagcttagtttatttgcaccgcttatatatgatcagataggtattaacctttgtgctgtagctgctgcgggtgtggatatatcagctaattatcccactgttaccaacgcagcagcaagtgttgttgaaatatcatacgagtatggcgcgggcaatgttgtgataaatcagataccaggcagaccaaactgctattcagtcaagctttctaatcttcaagtaacatttgcacttaatctgtatgatgaaaattgcagacttgtggcgactatatatccaacagttgaatatctgccatcagatacaacggcagcaacatatgatgaagatgttaatccttcatcagttgagcttgaaatatttgcaccgtatggcgtatcttacaacagggaaggggaaagcttccagccagctttgaattatacaggtttcttatcaggtgataatggaattacacaggggcttaatctttatgccatacctaaggtattagatatcgacatagcgtcagatgaggtaactataggtctttcagttatattgcagagcctttattatgtgggctacagagttgcaagtgctggaaaaatagttactccaaagggcagtatagtgtcacaggagaattcagatgagatgaagttcgtatgcggtaatctgttaaaccttgctattaaaccacttgatcttagtccaccacattgtgagagcagtcttaaaaatgactgtgataagggatgtcagccagtatgtgaagagaatctgccacagtgtccaacgtgttcgatatagcaggttaaatataatggtttgatatagcaggttaagtataacaggtttgatatagcgggttatagcaggtaattaacagatataatagtaaataacaaaacaggaccaagaatcatatacctgacatgaaatcatgaaaggtgttattctgggtcctgataaagttaaagctgcctaatatacactatatattatatagtgtatattatagtatataatatatacagactactattattaagaatgttcaaatttaacaatctgggttatatcgttgtagccaagagaatgcatcttgctttggaagcgatgcagtgcctcatcgaattcctgatatgaacgatatgtatcatcaaaataagaaatagctttgctatggtctccatcttcgttggcctgccatgacagagtggcatacctgtgaaggtcttcatgtgatttggcaagggatatatattccttgctgtgtataagccgttcatctgatacctgtttaagccactttccaagcttacatctaccaggatcatctacctgttttttctgaagatgctcaaagcctacaatgttgttatatacacgccatgtgagtacgaaatgatccacttcaaatacacgtacccagtcctgctcagttatttttgagcatccacgtacaagatcacttcttgttttatctagatatcgtccaatcttaaatacacgtcgtccagtctgcaggcagtcgttcgataaagtgttatagctttgtgatatgttttcaatctgcttggagaaagaacgggttactttagtctgtgtatctatatcgtttaatacactgtcaacaccttcacgtatgcttatcatctgattattcatctgctgcatggaaacaatagacttttcaacctttgaattcccttctgcaaggctgagagttgtttcatccatggcaagagccagctcatctatattctctttaagttcagtaacatattttactatatcttcagcagattcagatgtattactggataaaagccgtacctggtcggcaacgacagcgaagccttttcctgcttcaccagctcttgcagcctctatagatgcattaagtgcaagaaggttgctctggttggcaactttttttacaaggtccacgatttcttcaatcttaccaatcttgcctttaaaattctgtacacgattgttaataacctctatgcgcttggatgattgattaacggcagtaatactgtcattcatatcgttagttatattttgtgatacctcaatgatattatgtgtgttatccctgatatttcccatggcagaggagatattgtcaatagaatcttcaagattaagactggcattttccatatgctttatagacatggtctgtgattcaacctgttcaaatgtatccttcataagactgttatcacctatgatactcatagtttcattcagtcgcataacaacaggattgtttatctgtttcatggaaaaaagcatagagttaagcttaccgccgataacagaactgtcaaaatctgctggattaacatcgtcaaaacctcctgaaataatattatcaatagaatctaataatagctgcgcatcatggtcagataacacatgctgctccttttttttaacaaacatataatttacatccccttattcatattatgtataataaataatcacgaaaaaaatcatttatataataacatactttaagaaaaaatgcattataattatttaaaaaagttgtgacatgttattaaaagtatgcatattgttgttttggataaagaacatatcggttattttgcaaagtaaatattttaatattcaaatatctaaataaaaaaacagcggtcatatatcgataaaaacaatacatgaccgctgtgtagttaatattaacgtgaaacctcgttgccagctttggcaaatgcgagcttcatcacctcatctactgatacaaggttgaaatctccgcttacagtgtgctttaagcagcttgctgcattagaaaattcaacagccttctgagggtcaaagtcgtttataagactgtaaattatacctgcacagtaggcatcaccagcaccgatgtaatcaagtatattcataaagaattcctggctgtagtaagcctttccttctgtgtatatcattgactgaagcttgaatgtagttatggaggtttctgttctccatacagaagctaccatcttgaagttagggaacatctttgtaagttcttctgcaatatatgcattcttttctttatcagacttagatgcatccatgccaaatataccaactgcatcatcttcgttagctatgcatatatctacatatctgcatacttcactcatgactttattagctttttcacttgaccagagcttacttctgtagttaaggtcgcagcttactgtgatgccacgtttcttagcttctttacaggcttctatagtgatttcagccatattatcacttatagctggagttataccggaaaaatggaaccatgttgcaccatcgaatatagaatcccagtcaaaatctccctttgtagcaagggcgaatgcggaaccatttctattatatataacattggttggtcgctggcttgtctttttctcaagaaaatatatgccaatctggtcgccaccacggacgattctgctgacatcaacaccatactgtcttaaggagttgacagcactctgaccaatagtatgcttaggaagcttggttacataacgtgtatcaacattaaagttagcaagtgatacagcagtattagcttcaccaccgccataaacagcctcataagagtgtgcctgggtaaatctttcattgttatcaggtgaaagtcttaacattaactcaccaaatgttataatcttgtgtttcatcattgtctccaatcattatttatacatttgcatcataatactatacagtaacgtattgtagcatattttgataaaaaagtaatgtctttttaaaataagtttggtattttttgttatattttgtaatagctttagattattaaaatacaaaacagaggtaaagcggtggtaaggcagcaataaagccattttattaagcgtatcgacataattaccaaattaaagtataatacaaatgttaaaagaagttaaaactggtggatttccggcttttgcgaagaagggatttatatagtatgattagaaatacatgtttagaggatatatcagatggcagattatattgtgagaatgatatggtaagagcagatacggataactgcagcaattgtaaaaaaatatgttgtattggcatgggaaagacgatagtgcttgatccgtatgattgctatagattgtcagtaggaactggactgtcctttgaacagatgtctgacagcaatatagagcttaatgtagtggatgggtgtattcttcctaatattaagatgcaggctgatacagatgcctgttcttttctgaacaaggataatatgtgcagtattcacagctacagacctggaatatgcagaatgttcccgttgggaagatattgggaggatgatgaacatttttattacatattgcagacaggagagtgtaataaggaaagacttaccaagataaaagtgaaaaagtggctgggaatatctgatacagagaggtataatgcttatataataaagtggcacaggtatcttaagaagctgcaaaaaaccttgccagggcttacacaggaacagataaggacacttaatatgtataatttgaagacattttatattaagccatacaagtcagaggaaacattctttgatgaggcgtcagaaaggatagaaagctcagaggctatgtttggcttgtaaaagagccggtaaaaagcagcaaagaactggtataaagcagtaaaagagcttaaaaaagataatagaaaagacagcggtgctgtcatatagttgttaattttaggataaacagggaggaataaagagtgaagacagatttatttagtatagggagcctgacagtacatgggtatggcctgatgataggaataggcttcatacttgctatgctgcttgccgaatacagggctaaaaggcttggcctgcgtgaggaagcaattattgatataaccataatagcaggtgtttcaggctttcttggtgccaagcttttatatgttatagttgagtttgacgaatttataaagaatccgaaggcggtgcttggttcagcaggctttgttgtatatggtggaataatagctggtgtgctatgctgtatgctttattgtaaggtaaagaagctaaactttatggaatattttgatcttgtaatgccagagatcgcacttgcacagggttttggaagaataggctgttttcttgcaggctgctgctatggaagggaaaccacaagccactttggagttatatttccagtaggttcgcaggcaccagcgggagttaagcttataccaacacagcttatatcggcaggagcagactttcttcatatgattatacttctcgttattgcttataattatagctttacagcaggaaggaaaaagggaaagagtaagtatctgccagcaggggatataggttatatatatatgatactttatggcatcggacgttttcttatagagtttttaagaaatgattaccgtggtgaagtcggtttcttatctacatcacagtttatatcaatattctttgtaatatgcggtgtgggattactggtgtttaataaactgcattctaaacaggcagaagcaaagtaatagttagaaatattaaaacaatatatattaaagaaatatatattaaagaaatatattgcacaatcaatattagtaaaaatagattctaagtatattgttccagcaggtcggaattaatatatttagaatctattttattaataagggcaatatgcatataaaaagattataacatgtctgaaaaagagccttaaaagctgctgcttttctttgtttcatttataatactaattttatttaactcagatatagcagcatcagaagacataacctctgcaaagccctcagcaaaaaggtcaagctccatatccacccatttttcaccagttgcaccggcgtgttcgtaaccgcttacacaatcagatagaacaacaacattgtagtcattgtggtaggcacttcttacagtactatcaacgcaccagtttacaactgtaccaacaacaataactgttttaatgtgtcttcgtttaagctcgaattcaagagaggtatgtgcaaagcagtcgtagctatacttagagaatacacaatcattatctgatacaagtgaagcgaggctgtcacatagctgtgtttcagcactattcctagagaatttgcaggagccgtctttattgagcagacctctttctttatttcttttccaatagaaatcgtatgcatagcccttatcctgttcgaatcttgataagaatacaggaattccagcctgttcacagtattgcattatattagttatggcaggaagctgtgctcttgccataggtacctcaagaggtgcaccttcatctacaaagcccttctgcatatcgacaattattaaggctgtttcttctttgtttaaatcaaatgtttttgaccattcatagaatcgtttactcatagcatatcctccaatcagaaaaataaaaaagagcacctggatattttccagacgcccttgtcttttaatggtttaaagtataaaatcaggtataaatattttcaatgtacaatatgtacatgatgtattgcatattaatgtataatataatgaatgagtgaattgtagctgaattgaatagcaaaggagcagttcagttcagattagatgttatgaagaattagtaaaaggggaggtatctatggtttgtgttaaagattttatggaaatagaatattttaaaaataataatctgcagttaatcgcaggtgcaaatggactcaacaggagtgttacaagacctaacatagcacagcttaagaacttttatgagtggatggagggtggtgaatttcttgtaataaatggtatcggattaaagctgtatgaggaaaataatcttatagaattaatagacaatgcaaataaagcaggtgccgcctgtatagcctttgaattaaatgccgaatatataccagagatttcaaagaaggttattgacttcgcaaatgagattaagctgccaatatttacacttccctggaatgtttcctttggaaatgtattaaatacaatatatgattatattatcagaaatcagctcagggaggtatcaatttcagagctgatgaagaatatgctgtttactgatatagataagacctatgcgttagagcaggcaaggttttacggttttgatttatcggaagcttattgcgtagtgataattaaaactgatgatgtagagaattaccgcaatgaagtaactaaccggcttagcagggaaatatctggaagtgatatagattgtccatacatgttattacaacattacagtaacataatagtctttattaaggatataggtaaggacagacttgccagattattccataatgtatatgagagtttccatagaagttttcctgaaacaaagcttttaataggagcaggcaattcctataaggatatagaaagctataagaaaagctacagacacgcattaaaggcacttagttccataagaaatcactcctcatatatagcattttatgaggagcttggatttatcaggcttatagcggattcatcaacagatacagaaatacataattatgttatgtctgtccttggaaatattatggacgaggaagaggtcagtaaaataccattgcttgaaactctaaacgagtatcagaaaaataattttaatgtagctaagacagcacagaatctgtatatacacaggaatactcttttacaaaggctggaaaagatagaaaatgcacttggtaagcaacttaaagattataatgtaaggcgggaaataatgaatgctttttatctgaaaaaatatgtggatttttaataagtgtgcatgaggctgtatgattataacgttcgttgatttcaactaatggacaatcaaaatacacactatttatacaatatcaatgtactatttgtacattgatataaaaaatctatgcagatataatcaactcaagatttgacaaagaggtcggatgcagaaggtaatatctctgtatccggcttattttagtttaagtctaatgattaagcgacaaaggcgtcggaagtttattaaagcttctggcgccttttgtacgttatctgggagtatcagccttcagatattcattaaactgatataagctgatagcactttagaaaacaggaggtaaacaattatggaaaagagagaaaatgtaaaagacagcgaatttacccagacaagtgtaccggcttcacagaagaaaagcttctgggaaatatgtgttgtatggattggatatgtgtttgttgtaacaggcatgcaggttggcggaacaatgggaatatctactgactttgcaacattgttaaaggcattggctgtaggaagcatagtattattgatattaggctcatttatgggactaatagccttaaagacaggtaatacctttggtatgttgtgtagatatgcttttggtaagtatggctcacaggttatttcacttatgattgttgtaacccttataggatggttttcagttgatacttatatgattggtcaggcttctaacgcattgtttccagcacttccaataatccctattgcaataattgctggcgttggcatgacggcaacagcactttttggtatgaagtggatgtcaaagcttagtgatatagcagttccacttgtgctgatatttggtattatttctattgtactaagtgttaaaagtaccggaggacttacaggcctgtttgctatccagcctgagaatccagcatcctttaatacattagtttcactttcaataggttcttttgtatgtggtgcagtttcatttacaccagatgtattaaggttcgcaaagaacaaaaaacagactttaattataatgtttcttgcaatgattatagctaatcctcttatgattatacttggtgcggtcggtgctattgccacaggatattcagatataacctttgtgcttgcagcacagggacttcttgcaccagcatttattgtaatgattttaaatatatggtcaacagcacagggttgcgtatattcaggttccctttcacttggcaatacatttaaggttaatagaaagactcttgtaattggctttggacttgctggaacaataggtgctataatcggtttctataactattttggaacatttattaatttcctggcaactacaattccagcacttggtggtgtgtttattgcagattatcttgttaagtatagaaaagggtatccatcacttgagggcaacgagattccagctgtaaactggggtgcctttatagcctggggacttggtattgcaacaaactatgttggctttggtattacacaggttaactgcattattgtggcagcagctatcgaagcagtatttgcagtaataagtgcaaagcgtgctaacactaaaaaggcagcagcagtagaaatacagcatgcttaaaaataaaggtaaaagtagatgtaaagttaaaagcagatgtaaagttaattgcaaatggcaggttggttattgtatcaacctgctattttgttataatagatattaattaaacatggatttataaaaagtgcatagaatggaggattgttatggagaatagggaagaagtacttcaatacggtttatcatttccagatacatatgtagaagcaccatttcatgatactaactggcagcttgtaagagttaaaggaagtaagaaagcgttcttatggacatatgaaaaggatggtttcttaaaccttaatgttaaagcagacaaagaatggcgtgattattggaggagtgcatttaagtcagtaataccgggctggcatcagaataaagaacactggaatacgatcatacttgatggttcagttccagatgatgctataaagactatgattaaggaaagctatgagcttgttacttataatccatctaaaaggatatatgaggcagtaaaaaaaataccaaagggctgtgttgctacttatggacagatagctcagatggcaggaaataaaggtatggcaagggcagtaggtaatgcacttcataagaatccagaccctgataacataccatgctacagggtcgttaactctaagggtgaactgtctggtgcatttgcctttggtggtgcagaaaggcaggaggaacttcttaaggcagatggtatagaagttattaatggaaaagtcagcttaaaagagtatggaatgttttaatgtatcaatcagcttctttgcagctatgcttaatggtctgcctttatcccatacaaggcatacttcacgctcgggaagaggttccacaagtcttataggatatattgaaccgctggtgatagaagcagcacacaggtcttctggataaaatcctattccaaggttgtgttcaaccataggaagaacctggtcagttgttgcagcctccatatcaggtgcaaactgaagatgatggttaagaaagaattctatatacaggtttcttgttgcggtatcatttccaagacatataaaaggaatattatttaagtcgtgcaggcttcgcatttttgatgcgaggtctgcatatttagttccacctataagaagctccctgaatgaatataatgattccttatgatagtttttaggtatagttacaggcgtagtgataacagaaatatcagccagtccgttttcaagggctgctatagcctgtggagatgagtgattagatatttttaatctgacgtgtggataagtttcatggaatgtctcaagcctgtctaataatataagcctgagtgcagtttcacttgcaccgatattaataagtccacgttcaagtcctttatctttggctagttcacattcaccagctgaaaactgctcacatccggcagcaacgtgttcatataatcgttcaccttcgggtgtgagtgttattcccctgttggaacgtacaaacaacttgcatcctatctcactttcaagattattcatgcagcgtgttatattaggctggttattatcaagcatttctgcagccttagtgaagcttttatattgtgcaacataataaaatatcctgtaataatcgtagcttatcatataacctcttttctaaatgtcttattatatatgctttatgtgtattagaaaca

SEQ ID NO: 447 - DNA, 5202 bp, Unknown
  gut microbiota DNA sequence
taccttatttttagttgtcgcttctatagcaatcatattttctgtttttttatcttctttttctttatcctctttcattctctccagccatttgtcaatttctgaatccgtaccagtctctccaaaaatgccacaggttgtcatttcggttccattattcgtaaacttaaactccactgatatcagtttactaccatgacttattgccgccttctgtgcatttcgtataacatctggcataattgctaaattttcctcaagccatttcgcagttttttcatctccacatgcctttcgcattacacttccgtcaatcaatacagaagcatttttgcatggagtcaaacatttatacttgttagtcaaatattttgaatagtctgatacatttttaaacttattggctgaattcatagtgtatcctgcataataattcttttcactattctttgatggctttacattttcattttttacatttccgtatgtgtatgtattggcatacgatgatactccattaattcccatactgcatctctcctttctatttagccttgattttttatttgcaggctattgggttttgttcgatacgcttactgccattgtaaaatttgcctcataagaagctactgcctgacttattgtgacagtcttagcagacgaactactctcagccaccaatcgagttctggcatcctgagcggataaccttttattttgcgcatattcttcataagctgttctttccgcttgttttttctgaatccgctttttttcctgttgtttctttacctgattttctattctctttttattttctattctgcgctcccaaaaactattttttgacttatcattaaaaatcttcccaccattcccattgttataaccggcactccacatctcagcatgacattcttcttttgatgctccataatatattgtagaaaacgctcctccacatataccggaccatttatctggttgtgaccaacccacctgcaaatcatttaatacccatgcttcatactctggatcattcttcattgcttcaaaacccgcctccgaaattgtaacagatattgactcgcctgctcttgtggggtgcattggaatttgagatattttattgtaaatgtactgcttgtattccaccatcgtcatatctttagcagacacagaacctatttttgaattgcccactatacttccactagcttcgctcttttctcttacactatccgcaaaccttgtatcttccttctcctgatctttagccgcatttttctgttggtactgattgtaagcccgtgtcatatagttcacattaattgtattactcatagtaacctcctttgctttctttatcggataaaataacctgttctcctagtcccatatcatcaaacgaccatattacgcatacaaagaccatctctttacaagatgaccactgccttaaattcattttcatcgcaggaaagcaccatatcaccgccatatttatccacaactgcttttacatttaacagcccaatgccgtgatgatcccctcttttgctctttatcgtgtcattttcaatttccaccttttctgtcaccggatttcgcaccgcaaatatcagtttatgatcttcgcactctaatttcagatgaatgaccgcttttccggtatttttcagtactttttcactctcccggattgcattatccagtaaattggagagcaggatcacgatctcttcctcctccagacagatctcctgcagatcccctacttttaggatcactgctatgtgtttctcctgcatgctgcggtacttctggtttaaaacagcattgaccaccggatgatttgtgttgattgccgacatctcgacagctatgctctctgtcagcttctgcgtaaatgaaagtgcctcatctgtgtgtccattctttatcaatgtctggattgtggaaagctgatttttataatcgtgcatttttcttcgctgacgctcatagatttcttcccggtcctgataatttgcaatacgatttttctgattttgttccgtaagtaccgcaatttttattctctcttctttttcaatggtattctgcatgaactccataaggataaggttaatcgcaaccagtcccaccgaaagaaataaaaatacattctgcatatcatcgttttctgaataaaacataagaatgaaaccgaccaccgtaaatacaggaacacagaaaaactgtaaccattcttttcctgtaatcagaccgcagctttttcttgtcttgctaaatcttctgataaacaacatcagaatgataaaaaccgtctttgatatcagtgcctgtaaaaaccatttttcttggattgaacttcctcttcccagcaaaacagtcacataatcaatcaatacaagcattgtatagttgatgattgaaaacaaaaaactctgccggaaggaaacttcataataagccagattcaggaaagacataaccagtataatcgggatacattttaacattccgatccatgcccctgtgactgctaccagataaagcactccgcaataaacaaaaaatctatatctgttcctatatccgccatctcttttttccataaaagtatcaaaaaagtatagcgttccttttacttccagcatttccgcaataaatgtcaatacccagaatgtcatgttattcttctcccttatacagcatatattccctctttacctgtgcatatcgtgccttgggaaccgaaatcttttttcctgtcgtaagtgtcatcacataactgctgattttggtaatgtatttcatatttacaagaaaacttaaatgcgcccgtacaaatcccatattctttaattcgttttccagttcatccagttttttataaatctgaaatgtccctttttctgtataaaatacatttttgtgaagctctgtttctatataaatgatgtcatctgcataaagttttatcgttccttccacaaaacgaaattcgagaatcctacggtttttattaatttctgctatcaaatcatccatacattcttctatagtatctgcaaggttatctttcagcagaaaacggcttgctttcaccttatatccatccagtgcgtaattcatgtatgccgtcacaagtacaaccggaagttttgggtatttttctttgatcctcatagctgttttcagcccatccatcccctgcatattgatatccagaaataatagctgacacgcttccaaagctgattgttcttcgcataactgttctccggattcatattctgtaatagtaaactcataattctttttttcaccatagtctgacagcaaatctgacagattttttctgtcatctatcctgtcatcacaaataataatgttcatatttttcattcctgtctttgattgctctcatacctgtaaaccatacaagtctcacctagcactctttattatatcaaacaaatcttccgctcgatcattctccgcatcaaatgactatttcccgcatagaacgactatctcctatagaaacgcagaagcactgtatctcaaactctttgaaatacaatgcttccctgcattttctatatcgtcatgttgatattattactttactatccagcacctctttggagtgactgtctctatcaaaaaagaagccagcagtttattcacgcactactgacttcctatattattcattttatttacttcgctgcgtctcaaacatgtttttcattttaaacataacctctgttttcccaccagccttttacataccacctgattccaacatataccagttgcacgaataataagaaaaatagcagattgattggcaagactgtctttatccaatctccaaagtagattgctatttccatgcttataagtattaccattatggtaatcatgtcccaacagtatttcttatatagacctacaatctttattccgatgaatgccaaaaatattcccgcaaccgccagacatcccccgcaaatcagtattcttattatccaatacacaactcctgcaatgaccagattgaataatccgttactgatttgtgcagcttcctttccaatctgtattatcaagcctgcaatggtctgtgtgaatgttgcaattgcatcaaagaatgtcctgcaatcggtgagaaactcttttttctgtattatttgaaaaatagtagtcgatgcagaataccatatcagcagaaacatcaatgcttcatacatgactgtttttgttttatatctgcctgccagtttttccatctgcatatcatatttttccttagctttcagataagctgtctggttacaattcccgcacttttgatagagtaccggtttttcaaccggtatctctacttttttctgatgggagagtgcatagtcccgttcctgttctgcctgccttagcttatcttgacattcctctgtcatgattttggcatcgttcgttttctctttctcgctctgcaataattcttttgttttcctcaagttgttctttaaggcttgaatgttctcggttttgttctcgctgtttaacttctcgttcaaggtcagcgattcgtcgagctgcactttcagttcccggatagtccggtctttctggtcgagttcttcctgcatctgctccgtcagcagagtgtattatgaatattatcatctggacggaaccgaagaaatcccggcagattacaaggaaatctcctttgtctgcctgagaccggacggatgtctggaactgccaagcacactcagcattgtctgccggtcagttgcgaaacgattggacggatttgagaatttccattttcaccagttgcgacacacctacacaagcaacctcctctcaaacggagctgccccaaaagatgtgcaggaactgttaggacactctgatgtcagtaccataatgaacgtctatgcccactctacaagaaaagcaaagcggaactctgccagacttcttgataaagtagcaggcaacgactaaataaaaaattcccttattttccttgctgattccgcataagggcaaaaataagggaaaatacatatcatttcactatttaaggggctaaaaagccagtaaaataaggaaagttcaagaaatctctccacaaattccgatttttcaaagtcattatattggtaatac

SEQ ID NO: 448 - DNA, 420 bp, Unknown
  gut microbiota DNA sequence
cataaatttttaataggtatttgctcaaaatgcacttggggaacaaacttttgtaaatcttcggtatttccatccataattatatttcctccaatttttttaaaatattatttgtggttgatattaggcacataagctgatatttaagcttatattttgctgtatcagatgcaattttaaaatctgaaacttttaataccctttcgatagaactgttccacgagggaatcgtcaatgtaagacttgcaatttccgcatctggatcaaattgtggcaggttgcgtattgaaggaatagaaacggaagattctttctttaacatcggtttggcgtaattattccacagtaattcccttttcatatcatgataactgagatgttctatcttttcggcaagaaggtagttatttagacttaaaa

SEQ ID NO: 449 - DNA, 429 bp, Unknown
  gut microbiota DNA sequence
gtaaagaagatgtaatttcatggatatgtactgaccaacttaaacgagaggatttaaccaatatcaataaaaaatacctgattgggaaaaaatatgatgccgaaaaaattttagtttcaagacaactttcatctacaaataaatctcatatttccggtgcaagcatcgcagcaaaaaaaatatccgaagaatgtaatgtagcaatggctactgtttacaaatattctgcttacagtagtgcactagatataattgatgaaaaagttccggatcttgtcaaacgagttcgttctggtcagctctggatttcccaagctaatattattgagctttcaggattatcaaaagagcagcttttaagtctaaataactaccttcttgccgaaaagatagaacatctcagttatcatgatatgaaaagggaattac

SEQ ID NO: 450 - DNA, 355 bp, Unknown
  gut microbiota DNA sequence
actgcttcagaaagtaaaccttataaagaacccgagctacaaaccactcccaaagaaaccattatacaaaatataaagaatattattacagaaattaaaggagacacccaatgagcgagcaacctataaatcaatggaatatgactacagaaccttctgatatgatgaaaatcaacacacctatgccaataacagtcgcacccagcccctcaaatcaaatggaagtcattgacgatgattctttcagctatgacggttatcaagttgtacgtggcgaattcttcgctcatatttacgaaccttcgtttacgtttaataactacaaggtatctgtaaataccgcctgcataaaaaa

SEQ ID NO: 451 - DNA, 692 bp, Unknown
  gut microbiota DNA sequence
agtgattatatttggtaatccatgtacgatgcagattatatctaagcactggaccgatgaaaatctgaaatctccggcaaaaccagtgaatgctcccttgataaaggaatatacaggggtggagaattacaaaggaagagcagaccagattgaagaggttatggaatacgttactgtggcgaattataaagatatgagtcgacgagtgaaagatttggattcggatgattctgttactggtagcagtaattttggaaagtttataaagctgtttgagagtgatgacagtgggtggattgaggagattaatggatatttataaaataatttaattatgatcgatgaaagaaatgaaaatatgagcgaagaaattattagtacgaaagaggtaaatacatcgttatctaatctataaacagatagcttaaaaaggtaatcaatagaaaatttgaggtgatagaatttggaaaattttttgacatatcacaatttgattcatacaaagaagataacagacgagaggtaaagagagcaaatggtggacaccctaatgatatgtgggagacatattctgcatatgctaacacctatggtggcgttatcattcttggagtgaaagaattggatgataaacattggagaacaacagggctaaaactcattcctttagataactataaaacaacgaagcc

SEQ ID NO: 452 - DNA, 5937 bp, Unknown
  gut microbiota DNA sequence
ttgtactataaatttgtcacgtaaatttaacagtataaatttaaataaatatgacttttaagttgactttaaatctgaattcatcatttgaatgcattaattggactatgacttagctgttgttgtctttgtaccactattcttattattctgattattctgattattctgattcttggttatctcaagctggcttatatatacccagctttcacccttatctgatgactggtacttggctgctgtctttccatcattatacgttccatcgcttccctgtgtaacatatactgtaatcacgcctttatcgtcaacaaccggaacaagcgcttccttataaacatcactccactttaattcatctgactgctgcagggaagatgttcctgtttctgaccttgctgtactgtcaagttcctgttcaggaaaaacaaccttggaaaatgtctttccaccatcctttgttatgtacagattgccatccatgccatctatataattaaaacagaaaaagcccacattttcatcaacatatataatacctttaagaagataattggcagggccgctgcctactgttgtccagttttcaccaccattgtctgttttatatatcttgtatgactctttgtcattgtcagtcatggcatatccacatacaaccacacctttactttcgtcaaaaaaatccacataatagtcttctgcattatatatgttatcaagttcgcttgtagtccagttagcacctttatcgcttgaatagcatatcgttacaggcatcttatcattaagcccctgcttccctccatatataaatgccgttttagaggttgttatcatgtaactgccctctttaagtgtacttgaactgttgttttcatacataagattctcaacatctactggaacagttgtataatgttctccaccatcatatgtaacacttaatatattatctctgataacatatcttgaaagagaatccgtagatgtattagcagtattttccttacctgctgatattcccgccttttcattatacttggctatgccatattcctcagggctcatggctgatgatacatatatagtagcagtattatcagcatgtgcatcaatataatattccataacccattcacatttcagccttccatcatcagtaactccatcccatgaaagaaaataatctgatgaagcattttttagaatgagagaaaaactaatcaaagctatatgctcatcttcattaagaacttctatattatctatattcattttttttactgccttgctatatggcagatattcactcatatactgttctacataagcatttatccatgttcttgctattttctctgttttcactaaatacacatctggaaccgcgcttaaaacattagaatcatcatacgattgagtcgttgtctgatactgttctgttatttcatctccatatgcatcaatatcaaccgaaaatgtatatcttgactttatatcaagatcattctgcttgttttttatataatacgagcgaataaaaactaatgccacagctatgcataacaaagctatcattaccctgaatgcaattaattttcttttttctttttctttcttacttatctttctcataactgcactccatttccaatatctgcttaagctcttactcatgtttcatatgaaccgctgcccttactatctttctgtagtacttataccaccataagaaatacatcgctccagcacccgcaataagaaatatgactataacaaaaggatgcacagcatacatccagctatatgatactcttcttgcaaacaaaggaactccatacgcaagcaatacacatgctgccataatagtaccattaaatacgcttctgttctcatatatccatataaaatgatcaaaggacataatcgcaaacatttctcctataggtcttacacttaatgtaagaatacacagcataaacgcatgcagtggagatactccaaatatcattaatatgataaaataaaatatgaattctgttaccattttatatatgagcttgccaaggaaattcatatatggacttataaacataacccttatcataagataatccctgtcaccaaccgtaaacaatatattgtttgcaagacttccgcatacaatagtaagcatggcaaacatatatatgatagtaagttcctggttcgcctttataagaggacattcaaaacttataattctatatggtatataaataagtgcaaatacatataaaaacttctttataaactcccacaaaaccataaacaactgtgcaaatatgcccacagcaagccttgcctttgaattctcagcgaatgtttcttcttttatgtggtttttaacgcctggtatcatgcccatatatctgattcctgcattagtcccctcataaaatcttaataacttttcagcaaacagctttttaaacaatttcattgtctgcctcccctaatatatctaatactgcttttctaatttctggtatagccatcgtctgtttatctatataattaaactcaccattattaagaacaatagtgtcaggcgatattcttaatgatatctctaacagactcgatgaaatgataactatcctgcctgatttaactgaattaatcacctcaataaatttttcaatatattcattatcacagtaatcaagaggctcatcaaaaagaattatatatggatttatgacatatattgaagctaactgcaaaagcttcttttcctcaaatgtataatcaactatcagcttatctctttgtccaatgctaaatccgactttttcaaaaacagcctctggctttatattttcatcacttatatcacacagcatactgataaattcatagcctgttatatatactggcagtatgctctgctttgatgcatagaatatcttagccttaggtggtatttctatagctccttcatctacaggaacatctccacatatacattcaaacaatgttgttcttcctgcacctgcacctccaagaagcgaatatatatttccctcttgaaacgtataatccacatctataaggacatcttttttattatatcctttttttatatgacttaacttaagcatattaatctccacttctaatattctgtacagcattcaatcccggcagactccggttttaaatcactctcaaaattcatatactgatatataattatgtgagtgtcaaaagcaaattttaccactcactgatgtatcaggattgctacattactatataattcacgcaatcattactttatattatattaaagattacctactttgtaaacacataccggctttgcctgatattaatcacttgaatttattttaaaacaatgctataatttccagacattttacatatacttgattttagatttccacacagaaatgaggattattatgaaaacatttaaaaaaatatggtggcgtctgctttttgcttcatacacctttatatatcttccatggttcttcttccttgaaagcaagataactatggactatccaggaatacacatcatcaatggttctattgatgatatgataccgttttgtgaaatatttgtaatcccttatttcctatggtttgtatacatagctgcttcctgtgtattcatgctgcttaaagcaaacaatcaggaattcataagctttgctctttcacttataatcggcatgtcagtatgtatgattatatgcatgatataccctaatggtcttacattaagacctgagtcaacatcagacacaatattaggaaaaatggttgccagcttatataaaactgatacgccaaccaatgtatttccaagtattcatgtatataactccattgccgttcatgttgcacttgtcaaatgtacagctttaaagaatcacaagccagtaaaaaatgcttcacttatactttgcatacttatatgtatgtcaactgtatttttaaagcagcattcattatatgatgtagccggaggcattatccttattggcgtaatatatcatttgctgtatgcacttcctgaaaaaaaggcacaaaagcagcctgcaagtcaaaaatcctgcataagtgttgaagaataaaattattgacttttgtacatgtaatgttatactaaacaaagatatcacctggggagcttaaggcttagtgcctggctgagagggaatctgattccgacccattacctgatatggataatgccatcgtagggagttcttgtgtatctttctatataaatatatatttttatattacgataatacttttataatatattttaatctatcttatatctatttatttatacatgattattcattttccatggcattttacattttcccctgtatatcttttttatatgttcagtgcgcacctgacaaaatctttaaccacacaatagtgcgcaagaatggaggtttattatggaatacacaactcagatggatgccgcaagaaaaggcattatcactaaagaaatggaagctgttgctaaaaaagaatatatggatgttaacgaacttgttaagcttgtagcctgtggaaaaatcatcataccagccaacaagaatcataaatgtcttgaacctaatggtattggttctatgctacgcactaaaatcaatgtaaatcttggtacctcaagagactgtgttgatcttaatatggagcttgacaaggttaacaatgctgtaaaaatgggtgctgaagccattatggatttaagctcttttggcgacacacagaagttcagaagaaaacttacagctgaatgtcctgccattataggtactgttccaatatatgatgcagttgtttactatcacaaggcactcaaggatatcaccgctaaggaatggcttgatattgtaagaatgcatgcagaagacggtgttgactttatgacaatccactgtggaataaacaaggcaactgctaaaaaattcagggcagataaacgtcttatgaatatagtttcaagaggtggatctatcatctatgcatggatggaaatgacaggcaatgaaaacccattctttgaatactatgatgaggttcttgatatatgcagagaatatgatgttactatgagtcttggagatgcatgccgtcctggatgtatcatggatgcttctgatatatcacagattgaagaacttgttacacttggtgaacttacaaaacgcgcatgggaaaaggatgtccaggttatgattgaaggtccaggacacatgcctataaaccagattcaggctaacatggaaatccagaaaacaatatgcaagggtgcacctttttatgtacttggacctttagtaacagatatcgcccctggttatgaccatattacatctgcaatcggaggagctattgccgctacatatggtgcttccttcctctgctatgtaactcctgcagagcatttaagacttcctgatcttaacgacgttaaagaaggtatcatagcaacaagaatagctgcacatgctgcagatatcgccaaaggcatacctcatgccactgactgggatcttaagatggataacgcaagaaaagtacttgactgggatgcacagtttgatgttgccatcgaccctgagaaagccagaagatacagacaggaagcaaaacctgaaaaagaagacacatgctctatgtgtggaaacttctgtgctgttaaaaatatgaataagattatggatggggaaatcgtaagtatctttgacgaataatattattgttgttaacacacattcttaacatacggacgacagcatatatgagaaaagcaggtgtgcatacatcaacgatgccagaagcttcaattggatatttctaagacttttcatatacgtaatggta

SEQ ID NO: 453 - DNA, 4166 bp, Unknown
  gut microbiota DNA sequence
caggaacagttgttatacttgcactttcaacatttatagtaaagcttgcttcaaagataggtaaaaaagaattatcaatgataggatgctttataagtgcagcttccttcatactattattcataattcatacacacaatgtatgggtatgggtaggattaataatcgtagctacaataggaacttcaatgttcaatatggttatatgggctatgattacagatgtaattgatgagtcagaggttcagactggggtccgtcaggatggaacaatttattcagtatattcatttgcaagaaagcttggacaggcttgttcatcaggtttatcaggagcgcttctttcaataataggatatacttcagtaacagcctttgatccaaaggtagtagatggaatatataatattacctgccttgtaccagcaggaggaatgatattacttttacttgctttatgtttcttatatcctcttaataagaagagagttgaagagaatgcagagaagcttagaatcaagcgaaatgaaaaataaaattattatacaaattattatacaaaattttaaaattacaggaggaatcaattatgttatatccaattttaacagaatcaagattattaagtgacttaagtggagtatgggattttaagttagacaatggcaatggctttgatgagaaatggtatgaagcaccattaaaggatgcagatactatgccagttccagcttcatacaacgatttaaaggaaggagctgatttcagggatcattacggatgggtattctatcagagaaacatttcagttccatcatatgtaaagagccagagaattgtattaagatgtgcagcagtaacacattacgcaaagatttatctcaatggtaatttaatatgtgagcataagggcggcttccttccatttgaggttgagttgaatgatgtgttagaggatggtgataatcttcttacaatcgcagttaataatgttattgattatacaactcttccggttggtggtaaggctaacatgatgagcggtcttatgggcggaataggtgcaggagcatctgaaaagcctcagaacaatcctaactttgacttctttaactactgcggcatcacaagaccagttaagatatatacaacacctaagacttatatcaatgatataacggtaacatcagatattgactttggaaaagaaacaccatcagcagtacttaactatgatgttgatattgagggtgttgataaggatagcacagcttgtaagattgaggtgtttgaggctgagggtaacaaggttgcagaggcagcaggaacacagggaaagattgagcttgagaatgtaaagctttggcagccattaaattcttatctttaccagataaaggttacagcaggagaagatgtatatactcttccatatggtgtaagaagtgtaagagtagaaggagttaagttccttataaatgaaaagccattttactttaagggctatggaaagcatgaggatacattccctaacggacgaggaattaatcttcctatgaacacaaaggatatatctattatgaagtggcagcatgctaacagcttcagaacaagccattatccatacagtgaagagatgatgagattatgtgatgaggaaggtatcgttgttattgatgaaacaacagcagtaggtgttaatcttcagtttggcggcggtgctaactttggtggagaaagaatcggtacatttgataaagaacatggcgttcagacacaggagcatcataaggatgttataaaagaccttatttcaagagataagaaccatgcatgtgttgttatgtggagcattgctaatgagcctgactcagcagcagagggagcatatgattactttaaaccattgtttgaccttgcaaaggaaatcgatccacagaaacgtccttgcacattagtaagtgttcagggaacaactgctgatactgattgttcttctaaattaagcgatgttatatgccttaaccgttattatggctggtattttggtggaccagaccttgaaatctctgaaaaaggacttcgcaaggaactttcagactggggcaagcttggaaagccagtaatgtttacagaatatggtgcagatactgtcagcggacttcacgatacaacatctgttatgtatacagaggaatatcaggttgagtattatgagatgaacaataaggtatttgatgaattcgaattcgtagttggtgagcaggcatggaactttgcagattttgctacaagccagagcttactcagagtacagggtaacaagaagggcttattcacaagggatagaaagcctaagatggtagcacactacttccgtaacagatggagtgaaattccagaattcggttacaagaaataagcatgtataggcagaatacatttgtgcctgtataatatgatgtaagtgtgatactcacatcataaaataaaacaagcatactaagtgattagtataaaaactttccaatattatagtaacaacaaacaggagatatgcgggatgactgcatatcttctgtttgtatatataagatgtatataatgagcaatagtaataattgtaattaaggcaattattatgttaaaatgatgtaatcctcccaatatggggcttgtcgctttaacgattgaaaatcgttaaggtaccagcctctttttcctataaaaatacgatttttaagttactatttattaaaatgaatgggatgttccaaaaattggcgtactttaataaacctatacaggttttaaaaatttttattttgatatttctaaattcaggtactttttaaaggaaataaatgtgttcctgtcttcccgttctgaatcttattatgaagtttatttatgtttcttgcaattgctaaaagagtactttcagcgagtacattcgcagtccctttgcttaggtatcttctgaactgcatgtcctgttttaaatctccaaacgagccttcagcctgaatgctccggttcatccgatacaataccccttcatctgatatgattcgttccaaatcctcttttctgtgttttataaatgtttttgcaacttgtaataccttggttctttccccacatatatgtattttttgagtgtattctttaagtttagaaagagcttcttctaatgtttcaatacttttttgtaatggtgtttttcttttgcctgattttttgtaacggattttttccacacgaaagtatatttattggcatttgcctcgatttttgtaccatcaataaagatagtttcaccggatatttcacctaaatcaaaaaggatatttgaaacttctgcgagaatacgcttagaacaaggggcaaaatgaatgctcctgaatcgtgcaagtgttgcatggtcaggtgcagaatgtccttctaaaagaaacatgaaattgatatctcttttgcagtttaattccatagaacgggatgaataatcaccattcatgtaagagtataaaacaatcttcaaaagtgttcttggcgataaagaatttattctatcataagtagaatataaatcagtcaaatccatctcctctacaaactgactgagtaaccgcacagaatcattctcaggaataattgtttctaattcgagtggaagttttagttgatatccactctgatttaaagtataattttttgtaatttattatgtagtagcatactaatattttaccataaatcccagggttttcgaagcctgggatttatttttttagattatataccacattaacataaaaaatggggcatcgcactaatttcttagtgcgacagcccctttgtggtaatagggtaattaataatttatatttcacatgctacatcatatgctgatttaatagcatgctcaatattacttggacgttctccagcacaatcaccaatatagtgaagtggaagaggacaatcagaaagctctggaaggttctttcttgcaccaacagccattacaacaaagtctgaagcaatttcttctgttgatgtattgtcgtctattgttttttcaacaactacagaatcatctttgatttctgataattttgcagatgttactatttgaacattataatgctctaattccctcatta

SEQ ID NO: 454 - DNA, 960 bp, Unknown
  gut microbiota DNA sequence
atcatttaacaccggacgtttacttccttctcgttcaaagagacattttgctgaaccgttctgatataattcatataaccattctccggttacttttcgtctgcttaaaactgcagaaaaaccataggcataaaatttgtcacctacagtaatctgaatttcaaaactactttctcgttccttattctcctgccgattcttacaaaacatctgtgtagcttctatcggaataccattgcagacactatctttaaaaaatttaaagaacaatgccagattcgtctttccagatgcatttgctccataaacgactgcatattttaataactgggtactttttatctttaacctgtgatttgcatttgttcgtattttatttgaggaaatcattgtcagctctgctgctttatcaaaagatttaaaattttcaacacttacttttactaacattcttatacacctccacctttattatatgttttactcttctatcagtcaatgtaaattttcttatttagagattttttcgttatatattgtttctttttctattttcaacaattttattttgagttatgcatataatatcaatgtataagtcagctttttgtagcgacactattttactaatgccgctacatgaaatattacaataaataaaaacttctaattcttttttcttctatctctcccaatccatccttcctgtcacattcaacatcttttcttctcggaaactgagcatctttccattagttccaccgacaatgatatgatccagcaattctatccccagtagctgtccgcacttctgcagctttctcgtaacaatcatatcctcttttgacggtttcacattgccactgggatgattatgaagtccaatgattgcagaagcatttgccagaatactgctcttaaaaacttctctgggaattaccaaagatgcattgattgttc

SEQ ID NO: 455 - DNA, 1031 bp, Unknown
  gut microbiota DNA sequence
acagtgatatatttataaagaggtttagtgtaaaaaataagatttttcacacgcaagatttgtgcttcgcacaaacttgagatgcgctgaaaagcagcgcaagaatggaggtttattatggcagatcagaatcctattgtaacatttacaatggaaaatggcgacactatgaaagctgagctttatccagaagttgcgcctaatacagttaataactttataagtcttgttaaaaaaggcttctatgatggacttatattccacagaatcatctcaggcttcatgattcagggtggagatccagacggtaccggcatgggtggtcctggctactctatcaagggagaattcagctataatggtgttgataataatcttaagcactcaagaggcgttctttctatggcacgtgcccagcatcctgattcagctggctcacagttctttatcatgcatgcaaatgctcctcaccttgatggacagtatgctgcattcggcaaacttattgaaggtgaagatgttttagatagtattgcttctgtagatacagactggaacgacagaccaagaaagccacaggttatgaaaacagtaactgttgagacctttggggttgattacgacgaaccagagacactttaattattgtttagcacacattattaatatacggacgacagcatatatgaggaaagcagctgtgcatacatcaacgatgccagaagcttcaattggatatttctaagacttttcttataggttatgactactgccgctaccgttcgatacgggacatccgtgtcccatatcgaacttccacagacatccatgtctgtggatagctgggtagtcaaggaaaagtctaagaactatcacaattgaacttcaagtgcatcttatgatgtttgcacagctgctttcctcatatatactgtctgactttgacttaatttacgaaaaatgaatgtatgctaaatcaaaggggagaagcatgaggggcggaattgtgcgtaaagcgcacaattccgccc

SEQ ID NO: 456 - DNA, 4831 bp, Unknown
  gut microbiota DNA sequence
gtatgataatatttatagagtttaagaaaaaaaggcatttttgtgtctttttttttgcgcaaaagtcaattgaaactatataaagactattaaaagttgtgatttgtgcgctatataaaatctgaaaaatatataataatgaacttcattttatgattgcattttcggggtttatgatcttaaacaataatcaatttaatatacgaaaggaaataggtggcattcatgaaagcatttttaatacttgaagatggaacagtatttaagggaacaagtattggttccactcgcgaagtcattagcgaaatagtttttaatacttcgatgacaggatatctggaggtgttgactgatccttcatatgcaggacaggcagttacaatgacatatcctctgattggcaactatggcatctgctataaagatatggagtctgaaaaagcatggccagacggatttattgtgagagagttatcaaggatgccaagtaacttcagaaatgaagctcctatacagaagttccttttagataatgatataccaggtatctgtggtatagatacaagagcccttactaagatattaagagaaaagggtactatgaacggaatgattacaactaacgaaaactataatcttgatgaagtactccctaagattaaggaatacaaggttgcaggagttgtaagaaaggttacatgcaaggaaaagtatgtacttaacggagatggaccaagagttgcacttatggactttggtgcaaagaagaacattgctaagtctcttaatgacagaggctgtgaggttacagtatatccagcgtatacaaaggcagaggaaatcttagcttccaatccagatggtattatgttatcaaacggtcctggagatcctaaggaatgtgtagagataatcgaagagataaagaagctttatgcaagtaatgtaccaatatttgccatatgtcttggacatcagcttatgtcacttgcaacaggtgctgatacacacagattaaagtatggacacagaggggctaaccaccctgtcaaggatcttgctactggtaaggtatatatatcaacacagaatcatggttatgttgtagatgaagcaacacttaatccagaggttgctgaaccagcatttgaaaatgttaatgataagactaatgaaggtctttcttataagggcaagaatatatttactgtacagttccatccggaggcttgtgcaggaccacaggatacagcgtatctttttgacagatttatggatatgatgaagaaggaggactaagacaatgccaaagaatcctaatataaagaaggttttagtaatcggttcaggtccaatcgtaatcggacaggcagcagaatttgactatgcaggtacacaggcttgccgttctcttaaggaagagggaatagaagtatgcctcgttaactctaacccagctacaatcatgacagataaggatattgctgatgaagtatatatcgaacctcttacagttgaggcattaaagcagattatattaaaggaaaagccagacagcatcttacctacacttggtggacaggctggacttaaccttgctatggagatagcagaaacaggcttccttgaagaacataatgtacagcttatcggtacaactgcacttactatcaagaaggcagaagacagacttatgttcaaggaaactatggaaaagataggtgagccttgtgctccatcattagttgttaatgatgttccatcaggtgaagcatttgcagctaagattggctatcctgtagttcttcgtcctgcttacacacttggtggaagcggtggtggtatcgcccataacgtagaagaattaagagagattcttgagaatggtttaagactttcaagagttggagaggttcttgtagaaagatgtatagctggctggaaggaaatcgaatacgaggtaatgcgtgacagtaacggaacatgcataactatatgtaacatggagaatatcgatcctgttggcgtgcatacaggtgatagtattgtagttgctccttcacagacactttcagataaggaatatcagatgcttagaacatctgctcttaacattatagatgagcttggtatcacaggtggatgtaatgtacagtatgcacttcatccagacagctttgagtactgtgttatcgaggttaatcctcgtgtaagccgttcttcagcacttgcttctaaggcaacaggttatcctattgctaaggttgcagctaagattgcacttggttatacacttgatgagattaagaacgcagttacaggaaagacatatgcaagttttgagccagcacttgactactgcgtagttaagatacctagacttccatttgataagtttatctctgctaagagaacacttacaacacagatgaaggctactggtgaggttatgagtatatcagataacttcgagggtggtcttatgaaggctatacgttcacttgaacagcatgttgacagccttatgtcatacgactttacaggatttacagatgaggaactcttagaagatcttgctgtagttgatgacagaagaatatggaagatagcagaaggcttaagaagaggtatagagccagcagttatgcatgacataacaaagattgacagatggtttatagataagcttcagattatcgttgagatggagaattctttaaagaagggtcctcttacagaagaactcttaagagaagctaagagaatagaattcccagataatgttattggagaactcacaggacatacagaaagagaaatcaaggaattacgtgataagtataatattcatgctgcattcaagatggttgatacatgtgcggcagaatttgctgcaacaactccttactactattcagtatttggcagtgaaaatgaagcaacagaaactcatgataagaagaaagtgcttgtacttggttcgggtcctataagaatcggacagggtattgagtttgacttctgttcagttcattgtacatggtcatttaagaaagagggttatgaaactatcattatcaacaataaccctgaaacagtatcaacagacttcgatattgctgataagctttactttgagcctcttacagcagaagatgttgagagtattgttgagtttgagaagccggatggtgcagtagtgcagtttggtggacagacagctattaagcttacagaagctcttatgaagatgggagtacctattcttggaactaaggcagaggatgtagatgctgcagaggatagagagctgtttgatgaaatacttgaaaagacagagattccaagagctaagggacagactgtattcacagtagaggaggcgcttaaggctgctaacgaacttggttatccagtgcttgtacgtccttcatatgtacttggtggacagggtatgcagattgctgtttctgatgaagatgtagttgaattcatgggaattatcaacagaattaagcaggatcatccaatccttgtagataagtatcttatgggtaaggaaatcgaggttgatgcagtatgtgatggcgaagatattcttatacctggtatcatggagcatatcgaaagagctggtatccactcaggagatagtatttcagtatatccagctaagtcaatctctccaaagataattgaaatgattgctgattatacaggaagacttgcaagagctcttcacgtaaagggtatgatcaatatacagtttattgtatacaacgatcaggtatatgtaatcgaggttaatccacgttcaagccgtacagtaccatatatcagtaaggttacaggtattcctattgtacagcttgcaacaagagttataacaggcgctaagattagagatttgggttatgagccaggtcttcagaaggcagcagattattatgctattaagatgcctgtattctcatttgagaagatcagaggtgctgatataagccttggaccagaaatgaagtctacaggtgagtgtcttggtatatctaaaaactttgatgaggctctttataaggcatttgagggagctggaatcagacttccaaagcataagcagattattatgactcttgcagataaggataagcaggatggtatagatatagcccagagattcgaagcacttggttataagatatatgcatcaagaggaacagcaaaggttcttcgcgaaaacggtgttaatgctatccaggttaataagataggacaggaggcacctacacttcttgatcttatattagagcataagattgaccttgttattgatactcctgaaaatggtattgagagagcaagagatggcttccttatcagaagatatgctatcgagacaggcgttcactgccttacaagtcttgatacagcacatgctcttatctcaagtcttgagcatgcatttaataatcaggagctttctattgttgatattgctaagatagataacagaggtaagtaaattgttgtttaattgaatattagttggtgacgaacggacgacaaatataagctacaggcagtcctgcacactatgttcaatgccagaagctttgattggatatttctaagtctttccatgtaaactatggtaactgacacttccgctcagccgcgccgtccatggcgcggctgagctgcttcgtacatccgtgtacgaagctagctggttggctaagggaaagactaagaactatcacaatcaaacttcaagtgcatttcgcatagtatgcaggactgcctgtagcttatatttgtctgtgttacggcataa

SEQ ID NO: 457 - DNA, 11733 bp, Unknown
  gut microbiota DNA sequence
aaaagaaaaagaaatagcgattgaagatgcgttgaagtattttcagatgatataggagtgcaaatgctattgataggacatcaaccatagagggttggtgtctttttttgagaaatctaaaacatagactatcttttttatgtagtcagttgttatacatattagaatggaataaacgtttatacattactgaaatgggaaaggagggcagcttgaatgattttcttttgatcctacaaatgaaacagggcaatgaaaaggcttttgataaatttgtacggaaatattatgcagaaattctgtcttattgcaggtatcactgtctggatcaggcagaagcagaagatctcacacaggaaacctttcttcgattcatggaaaatattgcattttatcagcatattgggaaagcaaagaattatctgtatgtgatagcaggtaatttatgtaagaactacgcaaagaaatggaaggcagagagtttagagcaggaaatattggaaagagtgccggtttcggatggcggtatcctaaggaaagaaaaacgaatggatgtggaacaggcacttggcaggttaaccccagagttaagagaagtgatactgttaatttatttcggagattgtaagctaaaagaggtagctgatatcttacaaattggcttgccgctagttaagtaccgacataaaagggcaaaagaagaattaaaaaaatttttgggagaggaggactctgatgaatttagaaaagatgatgcaaaactataaaacagaagcaaaagttattccaagagaagaaaagattctggaaacgattcaaaaatctaaggaaattatgatggaagttcagtctgaacatacgatgagctatggagagtttttattttctcaatttcggctgatccgaaagagatggtggatgttgcaggcagcattactgatagtgacattttttctcatgaattatctggatgatagcgaatatttgatgagaacaataggaacttcctctgtcctttttatcgttatgatcattccagaattttggagaaacaaagaaagtgattccttacagattgaggcaacgtgcctatactccctcagacagatctattccgcacgagtatttttgataggagtggcggatgtatttatgataacgctatttatgctcgtttgctgtgtgggtatgagaatgcattttatggatattttggtgcagtttttgttcccaatggttgttgctgccggaatctgctttgcaatgttaaacagcagagctttgaatgaagcagcatccatgtttggttgctttttgtggagcgtgatctggtgggtggttacaatgaatgattttatttatactaagattacatttcctgtatggagtatcttatttggattagcaagctgtttcctgattggtgctgtgtataaggtggtacatgactgcaatcgcttatgttggacgatggagggaaatctatatgaaactacaaatggttaatgttacaagaaagtttggtgactttcgggcagtagagaacttaaacctgacgatagagaatggagtatatggacttttaggtgtgaatggtgcaggaaagacaacgcttatgcgaatgatctgtacccttttgccacctacaagtggacggattctgtgcgatggaaaggatattttcaaaatggatggagaatatcgtaatctgcttggatacttaccacaggagttcggattctatccggatttcacagtaaaagactatttactgtatattgccagcttaaaggggattcgacctatggttgctggcaaacgggtaaaggaattgcttgcacaggttggacttacaaagtcagcaaataaaaagatgaggaagctgtcaggcggaatgaaacgtagagcaggaattgcccaggcaatgctaaacaatcccaaaattcttattctggatgagcctacggctggacttgatccaacagaaagggtgcgttttcggaatctgattagtgagctgtcagaggatagaatcgttattttatcgacgcatattgtttcagatgtagagtatattgccaatgaaatctggctgatgaaggacggacaaatcatgcagcagggaaatcttgatcagacacttgcttctatgcaggaaaaggtatatgcgtgtgaagtatcacaggcagatgcaacgaagatgatgaaaaaatttaaggtgtctaatatgaaagcggaaagtggaatggtgaaccttcgtattattgccagtgagccaccgattgctggagcatctgtggtggagccgacattggaggacgtgttcttatattatttcggtgaaaagggcggtgagatggaatgattagatatgaaattaagaaaatcttttctaagagcatcagtaaagtatcattggtcgtgttgttattttcacttttgatatcctgctattttgcaatcacaaatgtcagttttttggatgagcagggcaaatctcatacaggaatcgaagcggcaaggagtctgcgggaagaaaagcagaagtgggaaggtgttctggatgaaacagcattacaagaggtcatggatgaatataaaaagatcagtgaagaatatccaattcgccctggagatgattctactaacttattacatgattccaaggtacaagggttttcggaaatcaaggacatgatcaatatgggattctgcgaatttagagattttaattattatcgcattgattcattatcgaaagaagaagtgggacagatttatgagaaccgtggaaagagtttggaaaaatggttgaattccgaagatgccaatggtttattcgatgaagacgagaaagcatttttgatagaacagtacagtgagatgaaaacacctttatactatgaggactatgatggctggaaatcagtactgagttacgctcagacgattattatgctcattatgcttgtgtcagcattcttggtgtcaggtatcttttcccatgaatttagttggaaatcagattccatatttttctcaacaaaattaggaaggaacaagggtacaagatctaagatcatagcaggatttatcgtggtatcagctatctactttattgtaatatcgctgtattcacttgtggtattgggatgtcttggcttcggtggtggagaagtcatgatacagacaggcttctggcattggaaatccttttacaatatcacctatatgcagttgtatttgctcacggtagttgcgggatatattggaacagtattttgcctgtttctgtctatgcttgtgtcagcaaagacgcatacagcagttgttgcagtgacaataccttttgcaatcctgtttttaccgctgttcctatcaaatttcgacttcttatcgggaatattaggtgtgttcccagaccgcttgctgcagatcaatgagattatcaatacatttgatttatatcatataggcggtaagattgtcggctcgataccaatcatgctggtcatttatccaatcctatgtgttttgatggtgccactcatgtatcttgtttatcataaaacggagataaagtagatgaaaaggaaaaagagtttaaaataaccggcgtaattaaggaaatctctcattttctttttctggcggaaactgacatattatttcattagaataatctggttatgacacggcagaggaagaatatttccagctttttatttgatgctggaagtgcggaagtgttctgcacgatactgcattggtgttttaccggttttttcccggaaaacagatgtgaaataactttgactggaaaatgccagggtagtagaaattacagagatcgcataatcggaatggcaaagcatattctgagcggtctctatttttttattttgtatataggaactgacagaaattcccatctcttttgcgaacagatgacttaaataaccgggagatatgccagcatgagcggcgagtaccgggacagtaatacgattatgtaaatgatcatagatatattccagacactgggcaaccggacgggagcaggcatgatttctatgcaatttttccatacgagtagtgtaatccagacacatctgcgggtgcagggcggaaatttctttttttgatttcatttgatctgccttatgaatgtagtagtcgctgagatcatatgcctctgtgacttccatacctccttcaatgcagtatcttgccagcatggcagcagtaatggtaaagtggtatttcagattttgcagaggagaatccgagaggacacccagacctttcttttcctgaaaagattcatgacacaattcttttactttttcagtatttccctgcctgacatagctgtagaattctggttccggatcataaggggcgcgataagtttctaattctctgcggacatattgttgatagagaagttcctgaggaatgttcatatggatacctttctgaaattattaccgtatttttcaaaaccgctatgtgattctttcacttgtggagtgaagatagtggcacgttggtagttataaacaatatagcataaaaatgataaaaataacatagaaacgatatatgaattttgttttaaattatatgatagaaaaaagaagaactgcagggttataaatttcccgttgcaaagaatcaggagggcaagagcatgaaattagagagaggtatcaatttaggtggctatttatctcagtgtgtgcatagcacagagcattacgatgcatttattcaggagggagacattcgtaagattgcttccatgggatttgaccatgtacgtctggcaattgattatgaagtgctggaagatgaatatggcggaaccagagaagaggggtttgcctatgtgaccagagtggtggaatggtgtaaacggcagggattgaacattgtactggatctgcataaagcgtatggctacgattttaataatgccggagataagaaaaagaatattctgtttacaaataaaatggtgcagaagcgttttgtaaatctgtggattaagatcgcagagcattatgcaaacgagactcatgttgcgtttgaactgctgaatgaagtggtggagcaggaaaatgcagaagcgtggaatctgctcattgtggagacggtgaacgctattcgtcgaatagccagagacactattattatatatggcggaattcaatggaatagtgtgaagacattgaaactgttagagaagcccaaggatgaaaatatattgttcacgttccatttctatgagccgttgctgtttacccatcagaaagcacattgggtatcgaccattagccaaacagaagatatctattatccggaagcaatggactattatcgtacaaagtcgctgcccatcggatatcagggagaagtagtctgtaaggcacagtcacagaccatgggaacagaatttatcacggaaatggtcatggaagcggttactgctgcaaaaaatgccggagtgatgttgtactgtggagaattcggtgttattgatcaggctcctgtagaagataccctgcgctggttcacggatgtggataccgtattccgacagttcggtatcggctgtgctgtctggacttataaggagatggatttcggacttattggggaacattatgcaccgattcgcgaacaattgctgaagctttggaatcggaagaaggtggaaagttagtgaagaatttggtaattacatctaacacacccaaaccttttttataatgattaggatattttaatcattcatgccctttgtcatatagtttttgtattttttggaagattatcaggtaacatagcatttatagcatcttcgttaccatctttcattgctgtttcataataccagcatttgaattttaagagggaaagagttttttgaagttccaggatttcagtttcaacagccgattttctggtttcaaataattctttccttttttcatagctggagctgccttcagatacccagataaaataggaatcattggaatctgcggctttggtggaatggctgttaacgctgctgcattgaattgcctattaaagtgtttgactgtgttttgaggttaaaccatcacactttgaactggttatcatttagtgttttttggttaatatattcaagcacagttaaacgtaacttttcaacatattctctgcttaattttttatccctattattcatgtcggtctgactaaatagcatgttagtgattgttgtaagtaattgtacgtctgatatattagtaatattaacattttccgaggttttcataattcctgatttaaatacacatccacgatatagatgcttctccaggagatttttgctatctatagcaatcatggatctggataatgcagtcaaagctcttgaaggaataacctcagaatctgataatagttgtactgatataattcatttgagctgatgaaggacagattaacatgcttggatatatactgatagttatgcttgtatacattggtatacagattatcttatatgacagaagctataagaaagcttgataaaaatatgatgaaaatatgataaaaatagtgtagaataaactataaagtatatagttaaaggaagttgtatacatggctaagtttacaaggaaagctataatgaatagtcttttagagctgcttaagacaaaatcaattgataaggttacagttaaagatatatgtgatgactgtgaaattaacagaaatactttttattataattacaaggatatatatgatgtattaaacagtatatttacgcaggcaatagaggagaatctaagagatgtagccgaaggtggttcattttacgaggaatacataaaggcggcttcgttgttagtccagtatagggatgttgtgatacatgtatacaattcaaagaacagggatattgtaacgaattatctagaaagagtgacagcagagatagtaagaggatatattgcaagaaagagtgaaggacagaatatatcagacaaggatcttgaatttatatcatatttttacagttatgccataatcggaagtacatataagtggatagaaagtggaatgaaggctgattttaagcattttataggtaagatagcagattcaatagatgcaacacttccggttatgatatcgaaggcaggcaaagcggattgacggaatgtattgaatgacaattgatttataaaaatttaatattcagacagattaaggagaatgtacgaattatgtacattctccttgtttcgtctatatgaattaaagcagaaaagtattaatgtctatatatcagatgaagcaataaggagggatgcttatgaatgacataaagggaataaagaatatgtacagtgtgcttacagcctgtcttattattgtaggactggtgctgctggcgatacctggaattgcattaaatgcagtatgcataatatttggtatatatctcataatatatggagttgtaaagataataggctacttcgcaaaggatgtatatcagcttgcatttcagtttgatctggcacttggcatagttgccgcaatagtaggcatagtatttatatgtaaaacctcaagcattgtacagatactttcaacgtgtataggaatcgtgatgctgatagatgccacacttaagatacagacatcacttgattcaaaaagatttggaataagcagctggtggttgatgttagttatggcaattatggttgcggcagttggaatcatgcttatacttatgccaggtgaaacaacaaaggttatgataagacttattggactgaatctgtgtcttgacggagtattgaatcttataatagtggtaaatacagttaagacggatagaaagctgcgtggataacgtaaaactttatataattatttaagataaaacaggaatggtgatatatatgggtacaataacacataaagcaggaagaattgcagtcagcaaggtaacagatgttgtattaaaaaatcttgataaggacagagaaaaagagatactaaagcttgttgattttatagaaaaatatatggatggtgaaaaactagatgttgattttaataatataagaaaaaagatagaagacaaggatagtgcaattaataagtatattaacaaggcattagatgaaattgatccaggtgtgttaaagacgatagttctaaatcttggctttgaagcatttcttaatggaacaaagacaattagaaaaatgagagaaaaatacgattgtaatattccatggcttattcttatggatccgacaagtgcctgtaatcttcattgtacgggctgctgggctgcagaatatggcaaccggttaaaccttacatatgaagaaatggatagtgttgtgacacagggcaaggagcttggaacatacctttatatgtttacaggtggggaaccgcttgtaagaaagagcgatattataaagctttgtgaaaagcataatgattgtgcatttctttcatttactaatggaacacttgttgatgaggaattctgtcaggagatgaaaagggttggaaatctatatcttgcaataagtcttgaaggctttgaagccgttaatgatttaagaagaggtgatggcgtatatggaaaggttatgaatgccatggaccttttaaagaagaatggccttgtatttggaacttcgatatgctacacatcaaagaatacagaaactgttacaagtgatgaatttatcaggcttatggttgataagggctgcagatatgcgatgtatttccattatatgccagtaggaaatgctgcatctgttgaattgttaccaacaccagaacaaagaatatatatgaaggaccgcataagacagataagaagtcttacaacaggtcagggactttttacatttgattttcagaatgatggagagtttgttggcggatgtatagcaggaggaagaaactacttccatatcaacgctaatggtgatgcggagccttgtgtatttatacactattccggagctaacataagaaccaatacattgcttgaaatactgcatcagccattatttatggcatatagaagaaatcagccgtttaataagaatcatttaagaccttgtccaatgcttgagaatcctgaaatacttcaaaaaatggtaagggagactggtgctaagtcaacagatttagagtcaccagagtcagcagagcatctttgcagcaaatgtgttccatatgccaataactggaaaccatatgctgataagatatggagcgagactccaaagataaaaagaagctatgagaattatgagaaacattaatgatatggataataattcctcattgactatgaggtttattaactataaatgtattgcagaagaaaggagattcatatgagtaaaaaatcaattggaagtaaaactttaaaggtgggtgcctcactgcttgcgttaggtgcaggtgttgcagcagttaatgctaaaactaagaataatacagagaaaaagaagataagagaaatacagaaaaatgaacgtgaggagtacagaaatactgaacgtggaaagtatgaaaagaatagtaaaggaatatattattctaatggtaattatgaagcatttgcaagaccagagaaaccagagggcgttgatgataaatcagcttacatcgtcggcagcggacttgcctctttggcagcagcctgttttcttgtaagagatggacagatgaagggaagtcatatccatatattagaggctatggatatagctggtggtgcctgtgatggtataaatgatcctacaagaggatatgttatgagaggcggaagagagatggagaatcactttgaatgcctgtgggatctgtttagaagtatcccatcacttgaaaagccgggtgcctctgtacttgatgaatattactggttgaataagcacgatccaaactattctttatgcagggcaacggttaaccagggtgaggatgcacatacagatggtaagtttaatctaagccagaagggttgtatggagattatgaagctgttctttacaaaggacgaggatctttatgataaaaagattgaagatttctttgatgaagaggtatttgattctgatttctggctttactggagaactatgtttgcatttgaaaactggcacagtgcacttgagatgaagctttatatacaaagatttattcatcatattggtggacttccagatttctcagctcttaagtttacaaagtataatcagtatgaatcacttatactgcctatgcagaagtaccttgaagcagcaggcgttaagtttaagttcaatacaagagttgaaaatgtagtgtttgaattcaaggataataagaagattgcaaagaggatagaatgcagcgttaagggtaaacaggaggttattgatcttacagagaatgatcttgtttttgtaacaaacggaagctgtacagaaagtactatatatggagatcatacacatgcacctgttggtgatgcagaggtaagaacaagtggctgctggagtctttggaagaatattgcaagacaggatccacaattcggacatccagagaaattctgtggtgatgtagctaaatctaactgggaatcagccacagttacaacgagcaatgaacagattattgaccagattaagaaaatctgtaaaagagatccaagaacaggtaatgttgttacaggcggtatagtaagctgcaaggattcaagctggcttcttagctggactataaacagacagggacagtttaaggaacagaagaaggatgaagtatgcgtatgggtatacagcttatttacggatgtaccgggtgattatgtaaagaagcctatgaaggaatgtacaggtgaagaaataacagcagagtggttatatcatcttggtattccagtagagaagatagatgagctggcaaagaatagctgtaatacaactcctactatgatgccatatataacagcattctttatgccaagaagaaagggcgacagaccagatgttattcctgatggctgtgtcaactttgctttccttggacagtttgctgaaacaccaagagatactatattcacaacagagtattcagtcagaacagctatggaggctgtatatggccttcttggtgttgacagaggtgttcctgaggtgtggggaagtgtatatgatgtaagagatcttcttgatgcatcagttaagcttatggatggcaaatcaccactcgaaatagagctcccaggtgtacttgataacatcaaaaaaccacttcttagaaagataaagggaacagttatagaaaaagttcttaaggaccataatgttataaaggattatatgaagtattaagttgttgtttaacacacattcggttggcgaactgacgacataatataagtgaaaatcggtgttgcacatacatcatcgatgccagaagcttcaatttacgcgagcaacgagccaaagtcatattcctgatatgaccttggcgactgccgcgatagccataataaacacgctttgcgagtttattatggctggatatttctaagacttttcttataggttgtgactactgccgctaccgttcgatacgggacatccgtgtcccatatctcacttccacagacatccgtgt

SEQ ID NO: 458 - DNA, 1681 bp, Unknown
  gut microbiota DNA sequence
ccttatgctctgcaacttttacaggttcttccggattcttcagatcgtataattcttcaaatgtaaccagattctgtccgccaagttctgatgcatcaaatgtataagaaatttctactttcattttttcattgccagcaacaaaggtataatcactctccacacgctttccatcaatgagcagttcttcatttttctctttcagcatctgccagccttttaactgatattttcttccttcttctagaccgtccagcgtaaccgtatctacaatcgttactttctttcctgcaacaattattttttcgcccgtttctttatccgttgctgttgtatgaataataatctctttttcatgctcatcggtcagtgttccaaggtcgattgttactttatttctgctgacaacaacttcaaatgctggaatcaatttcatacctttgttggattcacaagctaactcctcaatctcataagtgtcataaagtaatgcacctttactgtcatccggctcagaagttccgaaccagattccgtcctcactggatttcccggcatttgtatttctcttatgagatgcccaattggaagcagttgaaaactgaccgttcttatctgtcactacgatatggctctctccggttgttttacttgtaatcttaaaaggaacatttgcaagcctcttatgtgtacctgctccaatctttactccttctaaatctccacgtttaatctggttgtaaatggaatggctttcgtctgttaaatctacgatttttccattttccgtaatcgaaaattcaatcgcttttgccccgtcagtcagataaccttccggtgctttggtttcttccagtttgtatttaccatacggaagtaaatctgccgtcgttgttgcaattccgtcaatccctgtctgaatcgtcttaactgtctcgttctttttgtatagctttccttctaccagaaccgaattttcgttcaaagaaataattgcaaatgcagtatcttttaatgtggcacttccatgtgctttggtatcttttgtctctaaatcacgtttctgaatcttcacaccacctcggattacctggtcagatacggaatactggttgcttccggaaagaactgcaagttctccgtcctctgtgatctgtgtcagatacattccttttatctgttctgtactgtctcctgcctgcatataagctccgtccagtaaatatccgtctggtgcttttgtctcctcaacagtcagtgttccaagtggtaaaacgtttttttcattctggatgtaaaatacatctccggatactttgtaagcatctgccagttttgtcacataatgaacagttccattactgtctttttcagctaccgtctttgtaacccaggtacgtattgctttctctggtaaattgtcttttgtataaagtccgtcataataatgccaggtaaactctgctcctgccaatgcagcatcagcttgtacagttgcttttcctgtctccatatcaatcttgaacaggtctaccaatgtttctgtcactttcggaacatcggaaacatttaatacggctgtttttccggcttcaaccttcagactgtgtactgtcgtatccagcttatatcccttcggtgcagaaagctctttgatgtaaacattccctgcagtcacttc

SEQ ID NO: 459 - DNA, 1866 bp, Unknown
  gut microbiota DNA sequence
ggatgtgcatctttatcgcacactcatggcatgtggagacagttgtcttactttccaagggcgctaaaggtccggtggacctttgctaagcgcggaccgaagtggaacggagactggtagacagcagaaaagtgaaggtggacttctatctggaggatatggatttatctgaattcaagggaaaagcaacttatgagcagataaaggcatatgtactggaacagacaggacttaaggtttcttcattgtatatcgcgcagattaagaagaaatgtggactggatgtaggtgaaaattataacttatcaaagtcggagaatgcgagacagccaaagtgtacaccaaagaaggaagaagcgattatgcaggcgtttaagcattttggaattgtatagattgtggataaatagcatcgtgtgtctatcttaatgataggaagcgaaaaaaggacattccttaaccgtaattgttacgggtcaagggatgtcctctttggttgtcttggagtgtccaaaggacaaggtaatgagactgagggtattaagacttattataattatacctatcttatctaatcataagatgtgatgagacgatatgttcataatttactaatctttccaccatcaaacatgctataccctgtaggattctttctaaattcagaaggtgtgattccaaggcattttgtaaattgccggttgaagtaagaactatacttaaaaccacattgggttgcaatatcatcaattttgagattggtgttagatagcaattcttgcgatatcttaagacgatagtgaagcaggtattcaatacatgtacaatttacttgctgcttgaaacgctggttaagtgtggttcgattcaagtgtacaagttcacataggaaacttaatgtaatatcgttctgatagttgttgtgaatataatcagtgcaggttgtaacgggattagtattctcagataattcgtagaactttaacttacattggtctacatatatgtcaaaaatgcaattaagtgtctgacgcagcattcttctgatacggcaagtccagtaatcatcgctttgtgcgtatgtctcagcaccaatcataagcattagttcattaatgtgaacatattgttgaggtgttaagtaaaaaatgccttgaaaatttccatgatgctttgtaaacatatatagcatatttctatcgtaaacatatttttcatcgattggaatcgaatcttcaagattttcaaattttaaacatgcttttatgtaccatggatcaaagtgaaatgccttggcacttaaatgtgtatgttccaggcattgaaaattgtcgtattgtgatatacatagtatagctggagatgtaactgtttgaatatgattattgattttaatagttgcatttccacaagaaaccataatgatagtacacctgttattcattggtaatgattccagtgtattataaaaatcaaattctattggaatttctctttctttatgtctatcggtctgaggcatatatatcctcctttaaaaatatattatctgcaatttaaaattgtaaaaagtataaaaatatgctacgcaaatgacattgaaataacattttacgcaagttatacttgtatatagtataaaagaaatggaggagaatgtctatatgaaaaggctgttagtgtacagtaaaaaatattggatacaaatgatagcagcggctatttcaagtgtaactgcatcaatatctacagttatggttatcgatatattaagggaaataatagatatcatttctaacggtaatatgatgcaggaaatccggtatattattttgaaaataataattgtgatatgtgttggtattg

SEQ ID NO: 460 - DNA, 5828 bp, Unknown
  gut microbiota DNA sequence
tatcaaattatatggtagttgcaatgacaggttttgtcggtgctggattgttaaaggattttaggaatgatgctgtgaattcattgataaatgcctcaccggaatatatcaatcaatgtaattatggagatcttatggagcgaatgactgaagatatagaaggtcttgcaggtttcatgtctggttattttaaagactgcctgtatgtgccaattcttacagttgtatattcagtatatctgatttctatgaatgctccattggcaatgatatgtttatttccgctggtgattatggtgccattgaatgtaaagctgctaaagccgataaaacttcgtcagtctcagtatgtaaaagaactggggcttactaataataatgtggatgaggcatttgcaggggcagaaataataaagtcatataatattcaagaaaaaatgatgaatcggtatgaagacgctctttacaaaacatttaaaacatctaatgaaacggatttggctcagtataatctggagccaatatcaagagcaatacaggaagtccctatggcacttgccatttgtgttggtggtgtactggtatttagaaatgcaatcactatgggggtgttaattgcatatataagtataattaaaaaattgatagagccgttatcaggctgttatcagttggttgtacgttcacagactgccttggtatctgttttaagagtgtttgacgttattgatattatgcctgaggaagagctgtcagatggtatgaagagtgacgaaatgataacagattttccgttaatcagctttaatgatgttacatttggatatggagacgaaaaagttttagataatgtgagttttgatgtgaaaaaaggagaaagaatagcttttgtaggagaaagtggaagtgggaaaagcacaatcataaaactgatttcaagacaaatatcaagcaaaaagggtgaaatattctatgatgggatagactattacaattttacaccaaatgaaaatcgtaagaaattggcacttatttcacaggaagcaacattgtttcctatgtctattgcggataatattcggattggtaatcctgacgtcagtaatgaagaaataataatggcacttaaaatgtctggttgtgaggaatttattaaagagttgcaagaaggtatagatacagttcttacggaaaaaggaaataatctgtcaggagggcaaagacaaagacttactattgcgagagcaatagtgaaaaatgcaccgatttttttgctcgatgaaccaacatctgcactcgacttagaaacggaaaatactatttgtaatacatttgatgaagtgacagggaatcatacagttattgccgttgcacatagacttaataccattaagaattatgacaggatttatgtattagaacatggcaggattgtagaacaaggaacgcataaggagttactaaatcagcagggaagatattatcagatgtatcaggattacagtcgagaggagatagaataattgctatgaaagatttaaaaagattcttatcctatatgggaaaatatagatttgcttactggtttattctaataacaacattgataatggaatcgtctttgcagatactttattcgtatgtgacaaaaaagactctaaatgctattgaatttcagaacatgcagttatttcgtacagcagtggttgtatgcgtagtaattgtaatattaaagtgtttatttccttatcttcggtattttcaaatcagattggttcgtaaaatggtttatgaattgaagttgaagctgtatgagaaattgttgaacatgaatatgtattttttttaatgatacacatagtgcagacgcaataaagacattgaactgggatgctaattccctgaaagattcctggttttcgcatatctattgggtgttgggaaagattgtaatagtagtttcttctattattactatgtacttttataatcggatgctgacgtgtatatcattaattgttagtgcattgacagcttttgtttctattaagattaatcaatctattaagaaatatgcgaaaaaggttcaaaagaaatcaaccaaattgtccatgttattaagcgatattatatcaggttttgttacattgaaaatgaattccggaactaaggttgtattaaattatttttatgaggaaaatgaagcatcattccaatcagaaaaagacagagttaaaatggaggcattatttgagatagttgcatttttgctaggcatcattggaagttttggaacgattattgtgggggtatggcttgtttcagaaggaagagttgattatggtacacttatggctgtggttaccttgcagatgggggtgagtaatgcgatgcaaagactcgggagctctatagctgcattgacaacatcacttgttcgtgctggtcatgtatttgatttcatggaatcagaaatggaagaagaaataacatggtttactgcaggaaatggtcttgagagaaaaaatattaatgtacaaaacaaaagagataaggctattgatatatctaatttacatttttcttataatgaaaatgatgaatcaagagataagaataaaatgcatgctcagttaaattctaaaaagatgcagataagtgtaggtgagaaagttatgataaccggcgaatccggatgtggaaagagtacattgcttaagttgattcaaggattttatcctgttgaaaatggaaaaattaaaatacttggtaaagatataaatgaatattcactggctgaattaagaaatgttattacatatgttccgcaggatagttatttgtttgagggaacaattgctgaaaatattgcatttggctggaatgaggagactgctccagtaatggatgtgattgtcagtgcagcgaaaaaagcacatgctgatgaatttatcaaagatttgccagaaggttataacactaaggtaactgcgggtgggacaaatttgtctggtggtcagcgtcaaagaatatcaattgcaagagcatttatgaaagatgcacctattgttttgatggatgaaccttcatcggcattagatacatatagtgaaaatgcagtacttgaagcgatgagcgtatttatgaagaaaaaaacagtaattatggtttcacatagaatgacaggtgcagagaagtttaatcgtgtggtaaggatggattagcaaagaatttcataacaaaatcctatatcttttagaggagtttactgtaagcgtgacttgacaaaacagaaccaatattctacatttgatggcggagattttatacccaaaaacagagaatatgaatgcacaaaaggagctcaacccctttgggtttgggcttttttggacgcatatagtcttgtaaaagtagcagcatggcaatcgagtaacatcggttgctttttttgttgcctatttttagaaagtcatcaaatgccctgatagagtgatttctaaaaaacaaagcagaaagagtggaggaaatgcaaagtgaaagagtattcaaaaggtgtctatgtgaaatttaaaccagaggatatgtaatattccctgaatggcctgatttgaatcgggtaatatctttacattcaaagattagtaataatctcaaggggggagtaacaatgagaaaaaagtattgtgaagatgcaaaagatatcagcggtattttatttgcatgatgaatatgaaaagtcttcctgtatgacaaaatcaaattgactaatgctgattagcaatatataatatagacaaaacgaaaatgacacaaacggaggaacaatgaagtggagaaggttataacacttgaggaagcattaaaaagaattaaagagttggaaaatgagaacgccgagttacgtgaagaattggaatattataaaaatcgtaaattaagcggaaggcagaagcacaatgcaaaatggatggctatttacaatgattttgttgctggttatgaaagtggaatgactatgatagaaattgcaaagcgtaataatgtcagtaagagaacgatttacaggtataaagcgtattatgacaagatgaggaacacaaaggagaatgtgaaagagtaattgaagaaattaatagtaaaaaacatattgctggcgtcagcaatatgttcataagaggagggaatttgaatggaaaagagaataatagaattgtacagaagaaaatttgatgatatccgacatgaagcggatggcattgagtattggtatgcaagagaactaatgaaattattggattatgttcaatggagaaattttgataatgcaataaataaagcaatgatttcatgtaaaaataatggaaacgtagcagaagatcatttttcaagaattaacaatacaattgaagttggaaacggtgcacttcgtgaagttgaagattatatgcttactcgttatgcatgttatcttattgctgaaaatggagatccacgaaaggagcagatagcttttgcacaaagctattttgcggttcagactagaaaacaggaattgattgaagaaagaatttcttatattgaaagaacagaggcaagaggaaaattaagggaatcggaaaaaagattgtctcaaaatatatatgagcgtggagtggatgatgcaggatttggccgtatccggtctaaaggagatcaggctttatttggtggatttaccacgaaacagatgaaagaacgtttgggagtacaggataaaaggccacttgcggatttcctgccaacacttaccattgccgctaaaaatcttgcaactgaaatgacaaattataatgttgaagaaaaggacttgcaaggagaatgtgcaatcactgttgaacatgtggaaaataatacttctgttagagatatgcttggacaaagaggaattaaaccagaagatttaccagcatcggaagacattaagaaactggaacgtagagtgaagagagaagagaaaaagcttgcagagcaatctggaaagttgacaaatgaataatacaggagtgtgaaactattgaagaagaaaacaagatattacatatactcgtgtatcaacagcaattcagattgacggttacagcttatgcaggattatggtgttaatcttatctgtgtagaagatggaattgacagctcaaaagaagctggtaaactgcttatatctattgttgttgctgtagcagagatggaacgtgagaacataagagtacatacgatgatcggacgagagcaaaaggccagagaaggaaagtggaacggtggatttgcaccttatggatataagctgaaaaatggagaacttgtcattgcagaggatgaagtagaaattattcaaatgatttttaatcggtatattcataccaatgagggaatcattcattacgataaaaaaatttcagatttacagagacgattagatacccaatatgataaaataaatgaagtggaagaggcaatcgcagtgtccagaagataaagagagtgcaattgtggaggcattgaagcattttaatatgaatagttaataaagagaggtgcatatgctatgccaggtatactcgtggttgaagatgatgaaaatttaaatcgtggaattacattttcactgaaaaaatccggatatgaggttttttcagcagaatcagtgaaaaaagcgaaaagaattgcaagtgataataatgtggatgttaccatttgtgatgtgaatcttccggatgggaatggactggaatttgtaaggtggatgagatgcaattataatacatacattatttgtcttacagcac

SEQ ID NO: 461 - DNA, 719 bp, Unknown
  gut microbiota DNA sequence
tacgattaatggatgtttgggcactgtgacaaatcagagttatatgattgatgcaaacggaaatattatagagacagcatctggtacaaatgatccagatgggaaaatagcgaaagagaatgctgaacgaaaagcaaaagagaacagagaaaaagaggaaaagataaaagaaaaaagagctgctaaaaaagcagaggaagaaaaagctgcaaagaaacgtgcagaaaaatcggcagaaggaaaagaaacgggtgattataccttatccgtaactggtaatgatgtaaaaagtatgacacaaagtcttgtagcagaatctgtgagtatttctgcacctgatagatcaagttttgatattaaggcataagaggggtcggtaaaaggaaaaattcactattttaacatcaggtggttatggtgttcaaattcagagtcagggtgtgagtgtattgttaaataccggtgccggctggggatatgaaatgactccggcagaacttacaagaaaagatgaattttattccatttactgtaaggaatataatgcagtaaagaatgatatgaattctgaattaaaagaattaccagattatctggagaaaagatcagtttttgaagtgaaagcctaatgataataatgcaattcaaataaaaaggagtattgatatatgcagattagttccaactattctatgaatggtgtgccatatgaaaacaga

SEQ ID NO: 462 - DNA, 201 bp, Unknown
  gut microbiota DNA sequence
cagataatcctcgttgtttgcgggtttctcttatacgtttgcctataagtgcataatttatttccatgtcctcacctcctttccatcacaacttgactttcttgtgttgtagatagaaaaaatggtgagctatacaacagcaattagttgtataaagagaagtatatcatatgtatatagcaaaaagaagattgtcgattg

SEQ ID NO: 463 - DNA, 3732 bp, Unknown
  gut microbiota DNA sequence
aagaattgctcttgtgatagctgcattttcatctggagcaccgccttttaagtcatctcttgtgcagcgttcaaagccgaaatcctctggcttgataacatatgacttcatccagccatcacggatctcgcataccttagttggtgcactcatagatatctcatctaacttatccatgccatatactaccatgcctctcttaactccaaggcttacaagaacctgtgctaaaggttctacaaggtattcatcatatacaccaagaagctgcatagatggtgaacctgggttagtaagtggtccaagtatgttaaatactgttcttacccccagctccttacggatagcaccaacatatttcattgatgtatgatatttctgtgcaaagaagaagcacattccaacttccttaagaagttcaacacatttttctggatcctgttgtatattaacgccaagtgcctcaagacagtctgctgttccgcacttagaagatgctgccctgtttccatgctttgcaaccttcatgccgccagcagctgctacaagtgcagatgtagtagatatattaaagctctgtgcattatcaccacctgtaccaactatctcgaatatatccatacctgtttcaaccttaaccgcatgctctctcatggctgctgcacatcctgctatctcatcaatagtctctgccttggcactcttagttgaaagtgctgcaagaaatgctgcattctgcgtaggagaggtttctccattcataatctcattcattacagcataagcttcatcataactcaaatcacctttgtttacaatctttacaatcgcttctttaatcatataaatctccattcttgcgctgtcttttgcgcatctaaagtttgtgcgtaagcacaaatcttgcgtgtgaaaaatcttatttttcacactatcctccttgttttgtatctgtcacaggataattattaatatgtctttctcatcacttctctctgttagtaacgattgcattatatgctcctcagccttcatcaatgcataaaaaaagtccctgacagaattatactttctgtcaaggacgaataatgtgcttatattatattcactatccgcggtgccaccttgaattcatgatattaatcatgctcttagcaggatactaacataccctcggcatataacgtctgcctgcaacgtcacactatactatgcatatatgcatttcccttgtgccctcagcggtccatttgacaacttgtttcttatctgcatctcagcctagcagactctctgtacaggcatcattgccgttatctccgcttcaacggtttagcttattaaattatttagaataatagcactcagctttgcattagtcaatatatcattattattttttattatctttattattttttctactactgcacttctacaagctctatcttaaagttaagctcttttcctgccatctcatggttagcatcaaatgttatctcatcatctgtaagtgctgctactcttgccacaaaaggctgtccaagtgcgttctgaagatataccttatcgtctaccttaaggtcttttacgcctgagccaagttccttaacaggtactgttataaatgcttctggctcaacctcaccatatgcttctgatggcataagatgtacatctatgacatctccaacattcatagctgctactgccctgtcaaaaccaagtatcatcataccagcaccacatacgaactccaatggttctcccctgtcataagatgagtcaaactgtgttccatcgttgaaggttcccttataatgcaccctgcatgtctttccgacattaggaccatcaaaaggtggtgtataacttccaccacagccagaacatccgccacaaccatgtccatcatcatcaccacagctgccacagccacaatcttcttcgtcacttccacagtgtccacagctatgttcctctccattattatgatgatcacagttaacaccctgtgattcaagtgagccattaagatattctgctactgcctcgtctgcatcaccagatactcctgagcacacctctatacccatctgaacaagtgcttccatagctccgtttcctatgccaccacatatcagagcatccacattaatatcatcaagcattgttgcaagcgcactatgtcctgaaccttgtgcttctataatcttagtatcaacaatattctgaccatctatctcatatattttaaacatcttagaatgcccaaaatgctggaatatattaccatcctcgtatgatactgctattttcattaataaaatcctccttgtttatgaaacagaaataatattacttattgtaatcatttcattcttaaaaaataatatatctgcttcttaatatttattagtgtaacatatgctatgttaccatactttcacaaaatattcatctattatttgttaagacaggctactaccgtaagttatgatactctccgtctatcgcaaatgcatgattcataggtccacttcccttaccaaggtcaagcatagcagcaagtgcacctgatatataattctttgcacacctgactgatgtctcaagatctcttccctttgcaaggttagaggctattgctgaagatagcgtacagcctgttccatgcgtattaggattatttatccgcttcccataaaaccatactggttcttttcctttctggaataaaagatcattagcatcgtttaactgatgtccaccctttaataaaacagaacagcctaatgtgtcacatataagctctgctgccttttccatatcttctgctgctttgatgtccactcctgaaagcacctctgcttcaggaatattaggtgtaataactgttgcaagtggtaataatctgctctttaatgtgctgatagcatcctcacttataagtcttgccccacttgtcgccaccataacgggatcaacaacaatattccctgctttatactctgtaagcttatctgctattacctcaatcagttcacttgaagcaaccattcctgtcttgacagcatccggatatatatctgtaaatatactatcaagctgctctgctaaaaattcaggagatacctccattatatctgttacaccagtagtgttctgtgcagtcagagctgtgattgcactcatcgcatatacacgattagccgtcattgtctttatatctgcctgtattccggcacctccgctagaatcacttccagcaatagttaaagctgtatacatatatacctccttgttttacgaagtaaaaataaaagtaaaaatgcaggaacccaactaaagattcctgcacataaaaacgcacccgcgacttctttatctccctacgttggcattatccacatcaggttactgggttaaagcttctgcttactctcagcctgtcatacacaagcaccccattatattttcatagtattttacattcactgatatattatacacagataccacaaaaatgcaagttttcatctgttccccaaacttccaagacaccttacctggcacttcgtcagctgaattccatcaaacaaatgaacttaataaacagcttttatcacccctgcactatattataatattctttagcagtcagcgcataaaccaatgcatatatgatacaaaatactataaccgtgaataatgtacaccatacaaaaagca

SEQ ID NO: 464 - DNA, 5107 bp, Unknown
  gut microbiota DNA sequence
catattgcttccaagtgataatattaccattattaactttattattctgaaagaaactattacatgtattgcagcaactgctattggaataaagaacaccataagtatctggctcttaatagttcttttaacctcttcgcggctcataccaaccttcatcataatctcaaatcgtctgcggtcttcatacccttctgatatctgcttataatatattataagaacagtagccataaggaacagtattccaatataacagcctaagaataagagaccaccatacatctgtgtaagctcctctgctatatcatatctgttatcgcacataacataggcttcaggacttgactcagcttctatatccttacttaactgtctgctgtcctgttcagaaagattggtattaacatatatattataactaatactttcaaacctcttatcagagttaccatatactaaatttctgatatgattcatttcatccatatccttaactataagtatatatgccttaactactgacgtgacagcaccggagaagtacttctcatcatctgtaagcacatctatcagcttatactctgatacattatcactgttatttattgttatgctgtctttgctttcaagcttttccttggtaacaagaatagcactagctttgtcatctataacatagctatcaccataaagcttattaaagtcttctaatgtcataatctggcagactcccagcatactttcatcataacgtgacatattatccttatcagtataaaatgtattatctgtattaagcagtccctgaacagatattgttttataggaataatctttttttattacagcgttgtgtgcatcaatacaatcatatattctgtcttttgcctcttcaagaacatcggcatctgttccatatataacgatattctgttcactagggtatgctgtattcagcgaatcctgcattccagcataaagagatacagtagatgcaaccgcaataagaactattgttgataaaacacatatatttgcaagacctactgcattctgcttcattctgtataacattcctgaaacagctgtaaaatgtcctgtcttgtaataaaaccttttatttttcctcataagcttaagcagtacaatactaccagccgtaaataacagataggttcctataacaacaaacaatgctgcaacaaagaaatattgtacagctttaagaattgaagaaactgtaagtgcaaagtaatatcctcctccaagacataaaagtccaagaattgtcataataaactttgtctttggctccttctcacctatctcgtcgctgtgaagaagttcaattggcttagacttctgtaccttgacaaaattatatatatatattactgcaaatatacctataaaatatataatagtgacagccaccgcatttgttgatattacaaatgctggaacagagtcggctttaatcagcttcataagcacaagaaacataagcctgctgaatataataccaaacactatacctgctgttaatgatattgttgttattattacattttcaaaaagcatcataagagatatatgctttttttccattccaagaatattatataagcctatctcctttgtccttcgcttcataagaaagctgtttgtataaaataaaaatatcgctgagaatataaatgatactacaagtgcaacctgcagcagtagtactacattctgtccgcctctcatagctgcaacattcttattcttaacaatagaaatattcataaaaaacatcattactgtaaatatggcagttattatatatggcacataaagcttcttattttttcttatattagatactgccatcttaggaaataacattttactcaatattatcacctcctgtagcaagtgctgtaagcgtatctgatatctttgtatacatactgtcatcagtcattgagcccttatatatctgatgaaatacaaccccatcctttataaaaagcactctgtttgcgcggcttgcagcctttgtgctgtgtgtaaccataagaatcgtctgtccatcacagttgatttcattaaaaagagtaagaagctgctctgaggactttgaatccaacgcccctgtcggttcatcagcaagtattatctgcggattagttataagtgcccttgctactgctgctctttgcttctgtccaccagatacctcatagggatatttatccagaagttgttctataccaagtcttttagaaagcggctttaccctttcttccatctcgttatattttttccctgaaagaacaagcggaagaaatatattatcccttatagtaaatgtgtcaagcagattgaaatcctgaaacacaaaaccaagattgtctcttctgaaggcagaaagctctttatcctttatctgtactgtattctttccattaagaagtatctcgccattcgtcggtttatcgagtgaagcaagaatattaagaagcgttgtttttcctgagcctgattcacccataatcgctacatactcacccttctcaacactgaaattaacatctgataaggcctttacctgattagtaccgaatcttgttgtatataccttttttaaatttttcacctctaataatgccattttcgcaccagcctttctttacattatattttactctttgtttatcctttacgctcattacattacagagtatataaaaaaatgaaatgcacagccattgatatagcttacatttcattttcatttcttacaataatgtaaggtttattcatgctttgtataacgttgtgtcatatcaagcaaaactctggtgccattcttataactggcatcataggttatcacaaatccaagcctgtctgctgcctttctgcacagatacaaacctattcctgacgatttcttatcaagcctgccattatatcctgtaaagcctctttccattattcttggaatatcctcttcacttatgcctattcctgtatcttctatcacaagctgcagggaatcatcttttgaatccttttttataccatcactgccatggagagtatatattcttacacttcctccatctttactatatttgactgcattggatataagctgctctataataaagccaagccatttggaatccgtacatactgaatcttcaatctgctcaatatgtagtgaaatatgccttccgataaactgtggtgcaaacttcttaaccgccttttttactgccgtatccaatctgcacagcttgaattcataatctgaagaaatatcttcaagccgcagataatccataactgcatccgtatagaactctatcctgaacatttcatggctaagctcatttaacttcctgttaagcttttctaaatcattatcatcatttttttcattactctcattgtttttaaaatcatcataatgttcatcataactctcattataggaattgcccaatgaattattctcaagattccttactacatcatcaagtgactggattatcagctttgctgcggcaataggagttttaatctgatgtgcccagcatgcatagtaatccttgagatttcttgatgcttctacaccggcatcatattgttttcttttctgttcctgtagttttataataatatcagcatacaacgcctcaacatcattcttcttatccggcaatgctatattctgtatatcatctgtctttatatttctttcaagtgtccttattttgtcagcaaacaccgaatagtcatatataagatatactatgtatagcgcaccatataattctattccaaacgaaaacgcctcataatatggaagattgtataaccatatcacaagcagaagcactacataagcaagtacaacctgtattatattactctttttattctttaaatataaaaatagcaatctcatcttacatctctttctatcagccctgctgtctgatatataaggatactactcaataatatatccggttccctttttagtctttatataatctatgagccccgcctgttcaagctttttccttaatcttgtaacattaacagtcagcgtgttatcatcaataaagtcatcactttcccaaagcttcatcataatattatcacgcgaaaccacttttcctatattctcaagaagactctgcagtatacggtactcattcttagtaagctccatccttttcccattatacgtaaatgtctggtcattcatgttaagtatacagccgttatgttctatgatattcgtgctctcggcaaatgaatacgtccgtcttagcatcgcctgcaccttagctataagcacattgatatcaaatggttttacaataaagtcatctccacccatattaatagccataactatattcatattatcagacatagaggacataaatataaccggcacctttgatatatttcttatctgcatacaccagtgataaccattaaaatatggaagtccgatatccataagtacaagctgcggctcatactttgcaaagatttttaaaacatcattgaaatcatctgctattttaacatcgtatccccattttaataactgttcgcatacattatcagctataatcctgtcatcctcaactattaatattttatacatagactcaccctgcttcaatgtgcttcattattgtattattatttacaagctattacgttaagtatatattcatacattctcttagttgaagatatgcttaagtgttcctcagttgtatgaatatcaaaaatatcaggtcccattgatatgcagtcaagtccttctattttgcctgcaagtataccacattcaacacctgcatgaatagcctcgatagttggctttttaccatacatctgttcaaatatccttaccatgtcatcacgcagcttagaatccttcttatattcccatgctggatattcacctgtaaattcagcatttgccctgaatgcttcactaatgaatttgatctggctcttaagattctttaaagcagcccctacagaacttctaagtgagaatctaagacatatacctgat

SEQ ID NO: 465 - DNA, 701 bp, Unknown
  gut microbiota DNA sequence
cgaagtccagtggacttcggttctgcaccgaccgaagcggagcgtagaaagctggaaaaagtgcttgagaatccgcaagtaattaaaactccggtagtaaggaatggaaagcagtccacacttggttatcagccggatatctggaaaggatggaactgatgtacataataaagacagttaaaggtgatataacaaaaattacagatgtgcaggcaatcgttaatgcagccaataattctctattgggaggtggtggagttgatggtgccattcatcgtgcagcaggaccggagcttttagccgagtgcagaacacttcatggatgcgagacaggagaggcaaagctcacaaaggcatataatctgccatgtgattatgtaattcatactgttggaccagtatggaatggtggcaggaataaagaggaagaacttcttgcaaactgctattttaattctatgaagctggcaatggagaatggaatcagaacaatcgcatttccatctatatcgacaggtgtgtacagttttccggtagagctggcagcgaaagttgcagttcatacagttaatagatgtctgcaggataatccagacagctttgatgtggtggaatgggtgctgtttgatgcacatactgaggcggtatatgaagctgaggttgataagctgtataaaatgggataataaaagagtaaaact

SEQ ID NO: 466 - DNA, 234 bp, Unknown
  gut microbiota DNA sequence
ctgttgatggttcttttgctttttctatggatttatcagttgccttcttcttttcttgtatgtcaaatactgcgtagccttcaaatatattgacttgcatcgatttttgatgttcttccactggaataccgaactgattcttccattcttcaggataagaaggtgtcctagcagtggttacagttccattgtcttttagtgtacgaggaaatatttcaggtgaagttaaatcga

SEQ ID NO: 467 - DNA, 238 bp, Unknown
  gut microbiota DNA sequence
aagaaaaagactcttttcgttggtgttcctctggaaaaaagcgttcgccaaaacaaatcacctgtcgaattttctttgctaaagtgatatctctcatggactggaatcctaattatcggtacaagattctcggcaaactaattcgttctggcaatgaaatactgttcattttcgatttaacttcacctgaaatatttcctcgtacactaaaagacaatggaactgtaaccactgctag

SEQ ID NO: 468 - DNA, 1271 bp, Unknown
  gut microbiota DNA sequence
accttaatggacttattgatgttgtggaaagtattaacaaaccagttattaacaggaaaaatgttatcaatgcatttgcagagtatgtaagaaattatgacccatcagatgaaaagataaagcttaagatagatcatacctacagagtagcaggactgtgtcaaagaattgcagaatcattaggcttaagtgaaccggatgtagatattgcatggcttcttggaatgttacacgatataggaagatttgagcagataaggcgtttcggtacatttaatgatgcccagtcagtagaccatgcagaattcggggcagatctgctgtttaaggaaggtcttataaggaagtttgcagaagggtattatgaagaatgtgagcttgcacaatcggataatcagtctgattattgtcagggagaacggaaaattaaagaattcttagttaataatgatgcaacgactgtcgatgatgagcagataataaaaaataatgagtaccacaaaaaagatacaggacttcttgaactggcgataagacagcataataagtatcgtgtaaaagaagacctcacagaaagacagcgtatgttttgtgatatactgcgtgatgcggataaggttgatatatttaaggtgaatgcagatattcctatggaaattatatatgatgtaacaacagaggagcttaaaagcggagttatatccaaagaagtactagaaagcttttataaaagggaaacagtgcttaaaagtgtgagaaagagtgctgttgaccatatagtagggcatatatcactgctttttgaacttgtgtataaagaaagttatagacaggccaaggaacaaggttatgtatataaactgctggattttaagtctgatgtacctgaggttaatgcagaatttgacgatatgaggaaatatgtagacgagttccttatggaaatataaggctgtataaatctgaaattaagcggtataagcatacaacagattaataataggaggttgtgttgtatgggattgtaataaagattgaagaatatgcttgtctttataccgcttgtttactataataaatgtatatatgagttgtagatgtgttatatatactgatatatactttgaaagcaataggagaaaatataagacaataaaagcagtaaattgctatacagaaatggttatgtaaaatatccaattaatatatgtgtgttatatgtatatgttatatatgcgtatgttatatatgtgtatattatatatatgtat

SEQ ID NO: 469 - DNA, 4844 bp, Unknown
  gut microbiota DNA sequence
catggatgtcccgtatcgaacggtagcggcagtagtcacaacctataagaaaagtcttagaaatatccaattgaaacttctggcatcgatgatgtatgtgtagcaccgattttcacttatattatgtcgtcagttcgccaaccgaatgtttgttaaacaacaattttattaaattgctgcttcaagcctatatgtatcttaattcagcatagtatttatattctctgacataagtgccattgttatattaagattaccattccttattcttagctgatcaatgaattctttttctggagcatcttttttaagttttacttcgtatgtaagttcatacattgttcccatattagttgttttaactctgctcatagtatgttctgatgtatatttgtcaaaaacatcatcaaatatggtgctataattaggatcttcaggtatcgtaatcttgagctgcttcttatcataattattgtctgcaaatcccaacacagtagccgctataagaactacaagcataacagcaacaaatactgctgcaaatgatacatatccaagtccgcatgcaagtccggctgccatggtgaaaaatacgatggagatatcctttgcacttccaggtgcacttctgaatcttacaagtgcaaaggctcctgccatggaaaatgctcttgccacgttgctgcctacaagaagaataactaccgccacaaccgcagggagaattgccagaccgattatgaaatttttctgatatccttcatttttacacataaacatataaactgcagctataataaaaccaattataaaagctgcacctattgcaatcgctgcctgtgccatattgattgaaccatctgttgtcgttgtaaatattgtattaaacatatatcgctccttatattatttattttatcttaattatatttgtaatatgactagtgcattgtttcgtaaataactataccaatcgcataggatgcggattcgggtgtgcaggcaggtggatggtataaatatttcgaaaacgatgtgctagatacatactgctccagtttcattatctgtatatattcctgatgctgacttacgtctgttcttatatttaattacactgttatatgaatctgagcatgactctttatatggtgactcataaaacatatcacagaaattatcaagctcttcggtatctttatcatagccttcaaggacatatcttttatattctgtaccatattttgagaaagaaacgggatatattttaagctctgaaaggcagtgcgtaaaccacatcggcacagaaccatttatcttgatttccataaggtataaactctgcggaagaagtttatttccatagattccgctttctaatcgtacatcgcctctccgggttgtgatattcgtgtcaaatgtaactctgaaatcaccatcatttttttcaaaaaatgcatatctgtcatatgagagataaaccttaggttttagatcatatatacttctgaaataatctatttcttttaaaacctgtctgttaagacactccgtttcgtatggaaaggttccattctccatataacgatatgcatcttttaatacaatggatgtccggcgtttgttaacaattccattgtattttttctttatctcaagaaaaaccttatcatgtgcattcggagtaccatagcttctcatcctgagcttctctttatacacaggtttttctattgaacttcttataagtctgttgtcatctgtatcataataaatattacttatactgtaaaattgtccgtttttgttatatttatccagctccatatagtcagatatacggtttaataagcttttaaaagtcacttcatcaattaagtatttcttttcatatctgttaaatacctcgattgccatacacccagcctccaattattaatgcctgttttgtattatgcttcacatgttttttcaacgcgttttcctgtgaacaattgtataataattggaaattgtgactaaatgatgtaaaaagtaagtaaaaaatgtgatattatcgttaaaaccaaatcgtttttttatttgggctgattacaacataataaccacaataaactgattgaataaaacagggattgaataaaacaaaaataaaatagaattctgctcttgttttatttgatgatatggtatattataataaagtatacgaaagggacgtggtagatatggtaaacaataatacacaattttttaaaacacaaccagaaaagacaatatcagtagaaggaatacttgaacaggtatatcttgctcttaaggaaaagggatataatccagttaatcagattgtaggatatattatgtcaggagatccaacatatattacaagtcataacaatgcaagaagtcttattatgaaagtagaaagagatgaacttgtagaagaagtgataaagtattttattgaaggaaaaggattatagtacaagcatatgagagtgataggtttagattacggaacgaagacagtcggagttgctcttagtgatgcacttggaataacagcgcagccagttgagactataacacgaaaagaagaaaataagcttagaaaaacatatgccagaattgaagagattatcagtcagaatgatgtagacaggatagttgtaggattacctaagaacatgaacaacacagttggagaaagagcagaggcctgtatggagtttgctaagaatctcgaaagaagaactggacttgaagttgttatgtgggatgagcgtcttacaactgtttcagcagaaaaggcacttatggaaagtggcgtaagacgtgagaacaggaaagcagttatagatcagatagctgcggtgttcatattacagggatatcttgatagtcagagtaataagtagcattgtatttgaataataatataaaggaaatttttatggaaaagcttacatttgtaacggatgataacgataacgttgatttatatataatagaagagacaagagctaatggcataaactatttgttagtatcagattctgatgatgaagaagatggtgatgctcagtgttatatattaaaagatacatcagcagcagaggatgaggaagctgtgtatgagttcgttgaagatgatacagagtttgatgcaataagcagaatatttgcagagcttatggatgatggagttgaacttgcatagttttatgtgcttataaagggtttcggtacgttaatgaaactctttttttgcgtatttattacgtttttttaattttattaattataagaaggatgaggtgcttaatgaaaaaagaaaatattggatctgttaaggttatacctcttggtggacttgaacagataggtatgaatattactgccattgagtatgatgacagtattgttgttgtagattgcggacttagtttccccgaagaagaaatgttaggtattgaccttattattcctgatgtgacatatctaaaggataatattgataaggtcaaggcttttgttataactcatggtcacgaggatcatataggtgctataccatatgtgcttaaggaagtaaatgtacctatatatgcaacaagacttactatgggacttattgagtcgaagttaaaagaacacaatatgttacgggaagtaaagagaaaggttgttaaatatggacaatcagttactcttggagatttcagggttgagtttataagaactaatcatagtatagctgatgcggcagcaattgctatattttcacctgcaggtattcttgtccatacaggagatttcaaggttgattataccccagttaatggaagtcctattgaccttcagagatttgcagaacttggcaagaaaggtgtgcttgcagttatgtgcgacagtaccaatgctttaagaccaggctttactatgtcagaaaaaacagtaggaagtacatttgataagatatttagtgataataagagcaacagaataataatagctacttttgcatcaaatgtagacagagtacagcagattatcaatgcagctgtggcatatggcagaaaagtatgcgtagaaggccgcagtatggttaatatcatagatgttgcagaggatcttggatatcttcatattccggatggaacacttattgaaacagagtctatgaagaattatacacctgagcagattgtacttataacaacaggaagccagggagagtctatggcagctttatcaagaatggcagctaatctccatagaaaagtatctatacagccaggtgactgtgtagtattctcatctacacctattcctggtaatgagaagtcagttgcaagggttattaatgaacttggtatgaagggcgcaaaggttatattccaggatacacatgtatcaggacatgcatgtcaggaagaaataaagcttgtatattcgcttcttaagcctaaatatgctataccagtacatggtgaatacagacatcttatagcacagaaggaagttgttatgtctcttggatatgataaggatcatgttatcatagccaagtcaggtgatattatagaattaaatgatgaaaaagctgagatagtaggaaaagcacacacaggtgctatatttgttgatggtcttggcgtaggtgatgttggtaatatagtattaagagatagacagaaccttgcagaaaatggtattattatagttgtacttacccttgaaaaatacagcggtcagcttatagcaggaccagatatagtaacaagaggttttgtatacgtaagagaagcggaagagcttcttaacgaggcaaaggcaat

SEQ ID NO: 470 - DNA, 201 bp, Unknown
  gut microbiota DNA sequence
ggtcatatccgagcagaggaggtgtaaggaatattccccgacgaaaacgcatttcaatggaagaattcataatttcacttttggtatgactttcttcctgtgcaagtgttgacatgaatgacagaatcatttcgcttttgggatcaagagtatttaaatgctctgtttcaaaaaatacaccgacgggtggacggagtgaag

SEQ ID NO: 471 - DNA, 1039 bp, Unknown
  gut microbiota DNA sequence
ttttttcaaatacctcgtctctccattctgacttccagccggaaagatcgctcatgccggtaagaagaaagttctgcggacgtttcttttccatcatcttaagcttacccggaaagaattcagggtcagcaaagtcatcaatcatatgccagcgtttcacattattgcgggcgtagcaatatgcacaccccactgtacatccgataacgatattcatgttttgaatctgatctttgatacaaatactcatgatttctgccactcctcaagattctttctgatacggtcgaggcattcctcaaactgggtaatttcttcctccgaaaaacctttgtagtaaatactgcccattttatcagatacagaatcgtattcgtcctttaaggcatgtgctttttcagtcagaaacagaagtgttttccttttgtccgtttcagactgaacgcgtcttatcagcccttgattttccattctttccagcatcgtagtaagagaagttatcgctaatccacatttaatcgagagtgacctgattgagattccatcttcctgccacagtacataaagaatacgcccttgggctccgttaaacgcatcaatattcttttcgctgagaatcttctcaaagattcgatctccaagttgttttattttggtaacaagaaaaccgccattcattttcacacaaaaactcctatatagtattttatcaaataatactatataggagttttactgtcaacagtttgtatgtctaagtagaagtaaatcccgattttacgctttcttaatcggatgtctaattacagttttccatttatctggagcaacctttcttgcatcagacatataaatctcgtggtgcaatctatctttgttaatatcattgagatacccattttgttctatataagtatccataagagcaacggttgctagctcattatcaaaagaacctatgtgcataatttgaacgcataatccttcatcaatcgtaagatattctgctgacgaacaatcgagtttcttctttttcgtt

SEQ ID NO: 472 - DNA, 707 bp, Unknown
  gut microbiota DNA sequence
attaatgttgctataattaaaggaccatcaaaccattcagcaactaagggaagaactaaagctgttaaagagatatttaatgcttctggaaagaagattaattatgtatttgaagaccacgctgactgggaacagtcaaaagcagaggaaatgtttaatatattcttaaagaccaaccagaaatgtgacgttgttatatgtaacaatgatactatggcgcttggtatagtagatgcgtgccgtaaagcaggaaagggtaatatattaattcttggtatcgatgcgacaagcgatggctgtaaggcaatagaagcaggaacaatgtcatttacagtataccagtctgctaatggacagggaaagcggcttatagaagcagctatagcactcggaacaggaagcagtacgagtggcattgaaggaatatcagatgacggcttatatgtatgggtaccatttgagaaggtagattcaactaatgtatcaaagtataagtaataaaagttataagtaataagtaataagagtaataagtgataaaaaatataagtgataaaagtaataagtgataaaccgggggatttgctggttataatttatagttgataaaataaaatgcgtggcatagttaatatctatgtcacgcatttcatatattatatacttaagtatgtaattatatttatcttataattctgattatataa

SEQ ID NO: 473 - DNA, 1028 bp, Unknown
  gut microbiota DNA sequence
atattggggagaattgtgggagtgcgtagcacggaacaattcgtaggtatcaaagtcgggggcttttgacccctacatcatgttatttatatatgcatattgtgtctggatattttttatgattggctgattaaagtatagaaatgcatataaaatatatcttcaacgcaaacttatgattaggaaagggacaatatgaatcaggaaaaggttatagttattgactttggcggacagtacaatcagttagttgcacgtcgtgtccgtgaatgtaacgtatattgtgagatatattcttacaaaacacctcttgagcagattaaggcgatgaaccctaaaggaattatccttacaggtggtccgaatagctgctatgaagaaggttcacctacttgtactaaagagctttttgaacttggtgttccagtgcttggattatgttatggtgctcagcttatgcagcacgttcttggcggcaaggttgagaaagctccagtaagagagtatggaaagacagagacatttgttgataagagcagtgctttatttggagatgtttcagaaaagactatcgtgtggatgagccattttgactacatttcacaggttgctccaggatttaagataattgcacatacagcagactgtccagtggcagcagcagagtgttcagaaaagaacctctatgcaatccagttccatccagaagttcttcatacacaggaaggtacaaagatgcttcacaactttgtgcgtggagtatgcagatgtgctggaacctggaaaatggatgcatttgtagagaatactattaaggaaatacgtgaaaaggttggcgatggtaaagtattacttgcactttctggtggagttgattcatcagtggcagcaggtcttctttcaagagctatcggaaagcagcttacatgcgtattcgtagaccatggtcttcttcgtaagaacgagggcgatgaggttgaaagcgtattcggtccagaaggacagttcgaccttaactttataatggt

SEQ ID NO: 474 - DNA, 75560 bp, Unknown
  gut microbiota DNA sequence
tccctgcacccctgcaatccctaccattgctgcaaataaccctgtaataattttccctgataactttttacttatcatctgttgtacctccaagtatttaatatttttatagcaccccgtcgacgaattactatgtatcatattatatcacattaatttatcaatattttacaaatgtaaaaagttgtattgtttgatgtaactttttgtaagtttgtgaacttattgacattgttgtatgtaatttctatattatatgtcatgcatgtattttaaaagtatttatattctttgttatcaaataatttttcttactgtgatttttatatagcattattaaaatagcaattatagatatttaatatattgccaaataccatcacctattttcatgatgagtattcttatataattatgttttaaaaaaattgcagaatttattcacacaataaattctgcaatcttaagcaccatatattttataaactataaatcgtgttaaaaactataatacaacgtacaatacataagaaattcaccactcaattattttcgctgacataaactctttatttatatcattacatgtctatagtaacctttgtctgatatacattctcagaaacattttccttatatgtaccaccatatttcttcacaagccgacgcacattgttaacaccacgcccatggtctatatagtatgaaactggctttttctcattatttctcatatagttattctctattattattattagtcttcctatactttcagatatggttatatgtatataagcaccttctttgatatcacgtactgccttaatactgttatcaagaagattacctattattactccgatatctcccatgtctatttcaatattctctgacacatctgcctgacattcaagctgtatgttatcatcaagattgttaagcttatatgtcagtatgttgtttatcagaagattattacaatatatcttccctttaacattatccacacttcctatcatactatccagataatcaagtgctgctgtagtgtcattatctgctatggccactctcagcgcattaagtctgttcttgatatcatgccttatattccttaattcttcctgtcctgaccttatattgtcatatactttaatattagtttcccgttctctttccagcatgataagttcataactatatctgttgttctgctctatcatgttaattattatggtcatgacattggataacaaccataatgctattatcagcattattatactatgtcttgtttctggatatgcataacctattctgctggatattatcataacaatcgtcagtgacaatgacaccagtgctatagctatccccgcagtcttcccatagtttatctccacatatctttcatatatattgatgattatggaaagtaatatctttatgattattatagtgagcatctcactgttcatatctgacatatgcttatcttctatacgtaccagcgaatatgtttccatacagaatcttactattacacatatcgatgctgatgtacttatatgatatatcgcattggttataatcaggcatatgttctgactcttcatatatacgataaccaatatgcagattgggattatatacaggtaatatctgttattcaacaggaaatcaagataacttactgtatctgccacagctgctgcaataatacctatatactgtatatatgcatattctgttgctgctatatgcagtttctttagatactccatgtatataatgatatctaatatactggctaatatgcttagcatacatatgttagatgttgtcattctaccacattctcctgcttcttcctcttgctgatgttatatactgtgcataatcagtcatgaaatcattgtatctgccacgcccaaggttcagctgtatctcttcttcccctattctctttctgcaccacactgatgatttatctacacggcttatatatctatagttaactatacatccactcctcgtccttccgaatataagcattggcagttctttatatacatcattaatctttccgtagaatgtatattcgttatctgttgtaacaactttaataactctctttgctgattccatatacacaatgtcatcatagtatacactcattgtctgtctgttacagctaaataccagtttttcttccgcagcatacattatctgttcaagctgtgtcactatcttatctaccttatcttctgtgaccggcttgactatataattaaatgcatgcacatcgaaagctgctgacatataatctgtatggcttgttgtgaatattattacggaattaatatcatatcctttaatataccttgcaagttcaactccattatcatttccaagttctatatcaagaaaatatgcatcatatttagcattctcaagaccccgtttcatatcttctgcactaagatatacatctatggaattctcataactggctatttcaaatcttttctttagcatcttttcaagtgctcctgcctggagactatcgtcttcacatatagctatcttcatctgaaagattatcctttccgttcgttaatggcgcagaaaaaagaaaatgtctgcttcgcagccgctttcttttcttttgcgctcattatatcacgattcgtagctttgctactcgccgctgctatcgcagctatcgtgatcgtcattcgccgttcgccagaaatctgcaagcagctttctggctctctttcgctcattatatcataatcccactactttcgccgtgcaagttcaagaaagttttgctttctacagtatcatcttgattattaggttgttgttgtatacaaactcaagaaaactgttggcatgtatctgtgcaagcagatccgctgcccatgaactgtttcctgctgctgtaacaacagcgaatgcaagccatactattataagtccctctataagacctgctgccataccacctaatctgtctgcctgatgtatgactggaagtctgcttataagtcctgtgactgatgtaagcagcttaagtatgacgaataatgctatgaatactatacagtagctgacagcattcactataatacgtgtcatctgttctgcaaatattcttgaggcaatatctttaagtgtatgtgatgccgaatcacctatggttttatccagtccactgactgctgccgctgatatactctttgtcagactctccggaagattcatatgttcgcttatagccccgactttttcctcaatattatctatatatgttgttatgcctgactctataagctcattatcatcattaccataactcttgccatctcttgatacattttcatatatgcttttttctatcttgtcatcccatgttgtattgttccttatatattcgctaagaaccggtgatgcaactgttgtgactgctatagttattaccatagctgcaagtgaaactgctatccttataacacccttcctcattcctgctaatgcaaatatgcataaaactgccaatactgctataaataccatactatccattctccgtttctttacttaagctttatattctgtatatactttgcacttataagcacatactcacctcttgtacctatcggtataaccttgcttgccggcatatcaaagctcatattggctatatttttgccactcagattatatatagacaatgcagttgagttattcataacaacacttttcttatcaaatgatatgttctcaacctgtgttccaaactcagcctcacatacctttccacctgatgtattgtatacaagcattttataaagttcacctgaccccgagttatctactatcactcctatataatcctctgagaaaaataccctgcttattgcactgtctatacttatttctttctcaaggcttggatattcttttatcttatatatgctgataacattctcccctaccgctactgctatgttgttacttaaaaactgtacatctcctacaagtgtgtcattgtaatgattgaaaccaccaaccacacgctctgtttcattctgtccgacttccgagaagttgtagaacacaacattagtcttaatatcttcaccactcacatatacatatgatgctataagcttggctgcatcgttggatatactcacatcaagcggatatccatcacctgacactgttgttttaatactatatatcttagtaccttccttagagtacatatttatataattagcctcgttgtcttcaagaacagccaccacagcgccgttggcagccacttctatctgggatatgacaagtgaagtatctatctttccaagaagtcctgacttgttaaaaacatatactgtatttccattgatatcgcctacagccacacattcctcacacatctttacctgtggcttctgcatggaatatgtctggttccatatagcctttcccttatctgtatagtatgatacaccatcattgctatacttgatatatcctccctggtaggctatatattgtgaagttgacgtatcttccctgtttattgaaccagtaacactataagatgtatatgaataaccatctagaagatgcatagcaagcacaactgctcctgctataagtgctataacaagtactataagcagtcccatccttatcctgtgtcttactattctttgtcttatttcctcataatcagcttctttagttaccgctgcctgtcctatgtttctgtcatcatagttatttatattatttcctatactgctgtctgtatttaacttgatcacttttcttacaggagccttcttatctcctgtgaatcttgaaccacctgatattatgtcagccattattcatccctcattctgccattttctgatatagtttagtatcattttaattatacataatacccataaatattcaagaaagtttgtcttaatgttactatcataacagcttgtttttctatctttattgtcgttctttattgttgtttttagctttaattattctggcagctttatctgctgtcctatatacaacatatcactgtcatcaagtccgttatactgcataacctcctgatatttggttgttgtcccataataccgcttacatatacccataagtgtatcaccctgctttactgtatacatgctgtaactgtcagtcttaacactactgactgatgcatctgtttctgataccgcctgtgtagtttcagagtctgcattattatctgacacagtttccctctctgttttatctgatgtactgttttcctccaaaggatacacatctccagacagtctgtttacctttatagcgttaccatcaacacttatatccccggatgcttcggaatcatgaacaccattgtcatctccatcctgtccaccacgttcatttccttcaagctgattcataagattatcaaccgactgattcagtcttttcattttctcgtagttattcataagattaatccctatcactattatgacaactacaaggaaagcacttacaccatacataaagctgccactttttctttgttcctttagttcttccttttcacgtatcacatttcgtatattccttataacccggtcatctgatgcatcctcacatgattttttttcgcttcgttcaagcatatattcctgcatctcgtagttacgctcataaaaacatacatatcctttctgtctttttaatgttccattctcatacagataaaaatgctcttctttttctactgtatcaacaagatacagtgtcttcatattccctgcaaaattatcaagatgcagttttttaagtcttgccatgcgttcatccgtcacctctggcattactgcaaaccatcctactactgaaagatccgggaaatatttttccgtatctgaatatattttattccatatattttcattgaaatatatacctgtatctgatgtatcacctaatgctgcctttataacaccttttacaaatacgcacctttcatttccttctttggcaagctcgcctaaaagaacaccagcctgttcttcctgaggactgttatatgcaatagagttaatatatgtaaacgcgtaatcctctatgtatatcttcttatctgagctgacatcacctatctgcttgatattcttaggtcttcttatacatgtgttattatctttaggattctcttctgatttatctgaatcatctttgttacatattatctctatcatatcctcctccattctgcttttacatataagtcacacttgtaacatatcctaagcatcatttatattaaactgtcaggatataaaagcattttgctcctgactgatgtatccaccccatctaaacagggatgtccacttataatgcttgaataatatcattaaacagttgtgaattttatcagaaaatgtcggagaaaatatatttttaaatataggaatattttttatgattttgaataaaatgattatgtttatgattgataaatttattattatgaaatgaggattattatgcactattattacgattctaccagtaacgatgcagctttgctattaagcgaaaagctaaagtacataataaagacttctaaagattcccggcaggaaactatcattctatgtgtaggaagtgaccgttccacgggtgacagccttggacctatagtagggtacaagcttaaaaaacatatgcagtgtaacttctatgtctatggcgaccttacgcatcctgtccatgccgccaatctgtcaaaatatattgaatgcatcaaccagacattcatcaacccttatatcattgcggttgatgcatcactaggacgcaaagaccatgttggacttataactcttggagccggtccactccgtccaggtcttggagttaaaaaaaagctgcctgaggtgggaaatgtccacatcactggtatcgtaaacgaatccagtaatgaaagccactccacactccagacaacccgtctatgtgttattatgcagattgcagatgtcattacaagtgcattcggaatgcttcaatcagattaatctcttaatgctggtttttatattccgcgattgcctgtgctatcgttgtacaggctccactcttcatgatattacaaagctccgcaagcttttctttatctacaaactccttgccaatataagcttcataattggatgatatatatatacgctgctgctttacaagatcatcaagctttgtatattcatcctttttcttagtaagctctctgttcataagctcgagcttatcaacatatctgccttgtatttcctcaagaatgtcaggttttactgtctcttcaaactccttaagagccccctgtttttcattctctgttttttctatgctgtcatgaagatcattaatcttatgatcaaagctttcaagaccatatattgcatcattatcgtccttctttatagaatgacggattttcttaatgatctttttgttgttccttattctgtacttagtatcccttgccgctattatagtattgtaatgcggcataataagattaatgtatacacatctgcttatgataagaaaaagcaaagcaatcactgctgtataaacaacgggaacccatactggtataaaaggaagcacataaagtaccgccggaataccaccacacattataagcatgaaaagtatatataccaatacatcctttagctttcttgacaaaaacaatgcaaggaaaaatgtattattcgtaatctttgaaatattttcctgtataaaggctcgctctatctgtgatgcgagttctttattttcctgccttaaggaagctgtttctgtctggatacgctccttcattccctgctgctttgctttatctctgtctgcctgcacctgctttatcttatctttatcgcagtctatcgccttatcatatcctgcacagatagcatcagtactttccttaattctggctgatatttcatcctgcatagctttagaagtactatcagtctcttttgttatatccttaatgctcgcagatatgtattcaagtctttcctgattttcttcatattcattaatatctgataaaatctgctctaaaacactctggtctgcacttaatatattctgttctgccattgtctactcctatgttatcctgatatatataatctcagaatacagacatcataaaaccgtttattacttattgtttctatagtagttaataaggcatccatcaagaataatctgacgttcatcatctgtaagttcatccatcttaagtgtgaattccttcatgtccttgttaacaacatatgctttcatagatgttgccttattcttaactgcctctgttatctgaggtatgaatatataatcaccgttagcaaaaggaagttctcccttatctactataaatggaagcatgccccagttaataagattagaacgatatctcttagttgcatattcattagctatattagcccatccaccaagcaccttctgacatgaagctgcctgctctctggctgaaccatcacctggcttaactgcgaatattgtgcttccaacaccaacattttctttgcttacatcataagtttctttaatcttatgcataatatctcttaactctggaagtgcttctcccatacattctccggcttctcttgccttttctgctttctgtacttcctttgcacgtccaacataagctggatcctttcttgaaagtgcgaactctgcaagtcctaaaggattagaacggaatgatgatgtttcacctgaaggtatcagctcatctgttgttgttacaggatcatgtatctctgaaacaacctttattataagattctctggaagtgcaaccatctctggccaatccttgatattaggtccaaactggatttcctggtcaggatctgctacacccttgctgtcaaatactctgttggcatatatgttactgtcaaaatgatatgttgggcctgtaaactcaacatcacaatctgtagctgctgtaaggaagcccttgttagctgctgtagctgcgatagatcttgcatccataagtgcaactgatgatatctgaccattctgtaacttagaaccttctctgttagggaagtttcttgttgaatgtctgattgaaaatgcattgttagcaggtgtatcaccagcaccaaagcaaggtccacagaatgctgtttttactatagcacctgtttccataaggtctgcaagtcttccgtttcttgcaagctccatatatataggtgtacttgcaggatatacgcttaatgtgaattcatcagcaccgatagagtgtcctcttaatatatcagctgccgcacatatattctcgaatccaccacctgcacatccagcgatgataccctggtctacatataacttaccatctttaatcttgttagtaagcttaaagtctacctgtccgtcaagacttacaagtgccttcttttctacatcatgaagaatatcaacaaggtttgcattgagttcatcaatagtatatgtgttacttggatggaatggcatagctatcataggcttgatcttactaaggtcaacgtatacaacgccgtcatagtaagcaacgctgcctggattcagttctttatagctttcacttcttccatggatatcgtagaattccttaaccttgtcatctgttctccagatagatgaaagacatgtagtttctgttgtcataacatctacaccgattctaaagtcagcacttaagcttgaaacgcctgggcctacgaactccataaccttattcttaacataaccgttggcaaatacttcaccgataatggcaagtgccacgtcctgaggacctacacccttcataggttctcctgtcatatatatagcaactacaccaggcatattgatatcatatgtcttgttaagaagctgctttacaagctcaggtccaccctcacccatagccatagtaccaagtgcaccataacgtgtgtggctgtctgaaccaagaatcatctttccaccctcagcaagcatctctcttgcaaactgatgaataactgcctgatgaggtggcacatagattccaccatacttcttggcgcatgtaagtccaaacatatggtcatcctcattgatagttccacctacagcacacagactgttatgacagtttgtaagtacataaggaatagggaacttttcaagtcctgaagctcttgctgtctgtataatacctacaaatgtaatatcatgggaagtcatcttatcaaacttaatcttaagcttatccatattgccagaagtattatgcttatctaatatgccataagctatagtattcttagctgcttcttccttagttacattcttacctgtctttgcagcgacctcctgtgctgctgtctggctatcctcaataacctctgttccgttaatgagatatgctccacctttgcttaacttaatcattgcaaactcttttcctttcccgtttttataatgtgatttctggtacatcgtttcgtaaataactataccaatcacgttagtactctgttaatctttaagatattcagaaaccttactcttaatatcctctataactgaagcatctgcctcattctgcttccacgttacattaactgtatcattcttatatcttggaataatatgcatatggaagtggaatactgtctgacctgctgcctcaccattattctggactatgttaagcccatcaaaatccagtgcctttctatatgccttagacagtttaacagcaaccttaaatacatgtgcagctgtttcatcatccattgagtatatatcgtcataatgattcttaggtaatataagtatgtgtcctggtgctgccggacttgcatcaaatataaccttaactacttcatcttcatatattgaattggttggtatgtctccattagccagtttacaaaaaatgcaatcatcttttttcataaactctttcttcctccttatacatcatttacttattttatatttaagtatatactcgtataataacttaaagcaaggttgattacaatatttttgcagataattattcaacaattattctgatgtatgtataattttagaaatgaggttttatatgtttaataaagaggaatatgatactatcgtatcggaatgtaaaaaaaacagcaaattatcatctgcattatctgatttaaaaaaagactctctggaagagctgtcggtcgtttcccacgaaataaaaaactacgcagcctatcttaaaacatcttatcagtttatttcccataagaattctgaacttaaagataataaattctggaacaacatgggaacgactatagatgagctggttggatatatgaaccgcacctctttatacagatacagctttaaagatagtgaaatggttgaatgtaatgtaaaagagctgctggagcgtattaagacatatattggaaaaaaatacagcaatgaagcacatggtgaaaatctcccattaaacactgaacttataaatgcagacgaaaaaacaagcttctatatatcctcacatctgcttacacttggtattaatgagcttatagataacgcatatgaagcatgcagtaacaaaccaatctgtctgcagatacaatgcgacaatcagcttatgcatctatctataataaatgcatcagacagcgaaccagacaagagccttttaaaagacatgatagatgcagctgataagtccggtacaccagacatctacagttatgatttatccagactctgcacccctttctttacgacaaagaaaagccactctggtcttggattacctagtgtctatcagatgtgtatacttggcggagcctcacttagcatgacctataatagcgcttcacatattacaacaacctgcattacacttgaaaggtcatgacaaagcatgaccttttctcataccattctatgctccgaaatcaaatatttcatctaacatcctgagtgtcctgaagttaccttttgcagtcatatctcctgtcataaatgccctgtgaaaggtgattcttccctgtactatattatcaaaggtctccttggacattttacctatgacatctgctgtcatatcttcaccaaactctgcgttaagctgtccacctgcaacattcaccacaatatttttatccttgtcacttatcatgaacatatatctgccattataactaagttcaggtttaaaatggtttctgaatacacttaaataataatcatcgcctccatttgcctggtcattcataagctccttgtatatacttgcaagtgattcaatgtcttccttctgtgtctttacaaactcatcatcagaagcatactttgataactgctcactctcctgaggtgtaaagcttacaacttcctttataacattctttcttatagtctggctgcttgaaggcaggctcttaaccttctttgatatagttctgtatatattctcagcatatttttctataatatctttatactcctgattgaattcaaaatcagtcgtatcatcaacatatgcactaagtgagcttcctataacaccacctattatctcccacgaattacagagtgcggtcacaacctctctttctccatatgcccttgacataacaaccggaaacatatatgtagatgctgccttgcttttatctgcatataaccagcacgaatcaagaagtgtctgcatatatccgcccattccaacccactctactgttgttgcaaatataactccatccgcatctgctaccgactgtgaaagtgtcgttatcgtgtttttcatctcataaaggttatatcttgttaccgttacattaagctcttctaacacttcctgtattctgtttatcacaactattgtaggatcatcgaccataccacgtccaccatagtatatattaacattcataaaatagtcctccatatactgatttaccagtaaactagattgtatcatatgaaaagggatttggcgatatactggtacatatatttatttattctttatactatgatatgcacaccttaaaattataagctgctactcttagtatatctccatcagctatacgtgtcttgctatgcatggctattctctcatcatttatatatgttccgttagtagaattcatatcttctatatagaacttatcatcctccttaagcagacatgcatgcatcttacttataactggtgaatctatgaatatatctgcacttccctcaaggcttcctattgtgcatggatattttactggttctatattttccaatggctgctcatatgcctcctcatttttcatgtataacctgttatctttgttatcaagaaggcttagtgtaagcttattatcctttaacatcttaagataatcgcttagaagcattgtatgactgacttttatttcctgctcttcttcatccttcatcacccttgctgttaccatactgctatatgaagttttttctacatcctccgtgtattcatgttcaacttccggcttacgttcataagatttatctgtattgttatgcattctatatggtataagttcatcctctgtcaccttgtcttcactggcaatttcccctataatatcagccacttttccagatacatagaatataagcacgccagctattatgcatattacagatgcagctgtattaagctttactaccgcatatgtttttaaaaacatgctaaggaatgcgtttaataaaataactgaggccactgctttcatgacaaatactgcctttttactgcttttattacttttgttatcctctgctgtttctggaagcacatcttttattattttcccattgtgctggctattttcatccgtcttgcaggtgatatcttttgttgttctgtcttttccataatcaacagcttcgctttcacttttcattctgttgattttcccattccaggtctgtacagcatcgtgatacgttttaccaacatgcttattgtcatcatcctctatgtccatctgtgtattatcatcgttttcaaaaaaagacatgagattgcgtggtgtataatctcttacaagaattctctgatatatttcataaaagcgaacaagacttgacttctcaacagaatgatcgaatctttccagtatatattcaaataacgaacgcatattatcatagaaatcagaattaccagctatgggagaatacatgaaactgtattttttattggctagtgaaacatatatatgctgcggctttagtataactctgtcaagatccagcatatattcatcaaccacacgtaccatctcacttatgttgttaaacattgtcttaacctcttccattgtaaccttcccatattcaaacagcttactaagctgctgttttgaagaaatatcataatatatacaatttcttccatcaatttcattcattgtgattgcaagaaaatgctctggcatgttaaacatgagcatctttacttcatagtcatcttcacagttccattccttctgtgcatctataacagcatagttaatactattatccctttcgtatcttacattcacttctctttccaatgtatcttccataaatactctccattctcttttaacgtaatgagccactatttatgcagcattatattagtctttcttataatctgttctgaatggtttctatatacctccctgctcatacttatatttccaatattgattccgaaaaaatccagtttaaatggccattgtgcagtacatgtaatatgatttataccgtctgctgcattttcttttcctgcatatgaacctggcttaacacttactttttttacaaatattgttttgtcttttatatattcctcactttttacaagcagagctttctgttcattacttgttatattcctggaatattctattgataactggttaagaatatttcgcataacaactttatcatgcatatatccgctgacacttataagtgctactataataagcgtaaatacaggtacaatcaccgcattctcaactgtatgcataccatcatcattcccttctatatacaaaacaacgttaacatatatgctgatagtaaaaatggtatatatggtacggctgttttaatcttcatttttttagcagctacccatataccacctgaaactgccagcataataaatgatatcaacactgtaaaaactgctatatacacatccgagagcagacagacataaccaataattatcccgtctgcttcgccgatcagcggcgtaaacaccgataaaagtataaatattattgcaataattattgacagtactatctggctgtactgtattatttcaccacttgctttataatcacacacatacataaccggtattacagctcccattaatataagccacgtaacaggaactgtacggcttcttatatctttatacgaaagtatagcaagacatattatcaaatatattattttaaacatgcggcacctcctgtgacacctcctgtatttacaatctatagtcatccactgcatttttcacacaatttcctgtcttttatgtccgattttttcactttctggatattgcgtcttagctctgtacacatactattactatgaaaacgtgtgccatattctgtataatacacactgtttgtctttgtatctcctgtttctttatcatctgtattttttttgcacattttacactcataatattttgaaccagaattattacgtatttcttctatatcacctttatcacatttttttatataacgcagcaaatgtgtacactttgaatctgtatgatatacctccccacctgctgttatgtatacatattcctctgacatgccatcagcttttttatatccatccatgtcttcaccaagccacgcattaatcctcttcctgtcagcgatttttatacgtgtattgccaaatatatcaaaaggatttttaatataatatgaaacctttatatctataactgaatttccctgcagtactcttgaacttataaatatgaagcccgcatcaccattttcaatgttattattttttgcataatctttaccaagttcttttataaacattctccttatggtctcaacaaccatgcctttttttatcccaccacctgcactgtctattgtagaatcatcagcaattccatcttctatggctttctgtccggcatactcattaaaattttcgtatatatatgcgtaacctgcacttttctttaaagttatatataatgcatcattcacatgtgagcgcactgccataacctgtataaaatacattactgccataactgcatatataaataagggtataacaagtgctgcctccactgtggatgatgctcttaatgcattaaaagctgctggtttaatatatgcctctttattgagataaactacattattgacttgagcagaggatgtattatgtttatgtatttctggcgttataaacatcatacctgttaatttataagaataagtcttatctttctccttcctttaaatttttgttttttcctttaagtttaattctaatgtttctttttttactttatgattgacacagcgtaaagtgccgtgttcacatcatttatttttaatataagtttatctgcacataaagaggcagctgcttatcctgcatattatcactatatgttttaaaaagcgggctcatgtggttttagaccttttgaccatggtatcttaaatatacgaatactccagtttctgactgtatgtctgtccgttttttacatatacaaacacagccgtgccagatgcttcatatatgtattccttcattctaaaatcctcatgtcctagtgcaatcattaccagttccatggctgacataatacctgcattcctcgcagttctatcttttataagcagtagaatacgcatataatccatataatcaaggctgttaaaaccagctgtactgcctgtttctttcccagctttattcttatccgaaaacagacttgtctttaaacctgcggcaccgccgcttataactgtgttaatatctgttatccagttgtctgcattttttactgtggcaatactttcaccagcatacagctctcttaactccataactgattcagcatatgcccatatagacataataaaatactgggctgccttgatgagtaccatatttcccgtatatccaagaagctgtagtgctaatccaaaacactcattcttcttctgtacatctgttacaagatatgaaagattaagtccctctcttatcagtataagcttaaaaataacttcattcagattatccttatctgactgccttccacacagaatatattcgatttcataatcaagcagcctgccaacagcacggtcgtttttttcaatataaccagtttgttgtccgtttttttcaatataatctgtataacctgcatatcttgatattatatattcactgacaagtgcctgacgtatatctatattggatataccatctcctccataacttcctgatacacatgtatctgcaaggtcagaataatctatggtcttatctgatatctcacaatcaatcaccagtcctgctgctccttcctttaatatctgatagattttatttagtgaagttatgctggtgttataatcatctgctctgaaagtatattgttcatattcctgtacgattgttttgatactaaatccatttatttctgattctatatcttcgtatattttttctatctttgtgatatactcctgcttttctacgtcaggctctgacattttcatatatatatcctgaacagcctgcatattaccgacgatattttctatgattgagttgtcattatccacactatccctgatatatccctccgataatacattggcatcatcatattctgtgtacagtctgtctatatcctctgataattcctgatacagctcatcacttatatcactcctgttaaagttcagcttttcatgacattcccttatgctttgttctgactttgttcttaactcttcataagacgaagcctgatataatatatcttgtgaaatgttatgtatttcgtctgatattctttcgatttttctgctatacttcgatagtatatttacatcatctgcttcatacatataatgcagttcatccatattctttttacattcagccaccatactggatatttcattttccttttcatccatatccgaacatgtatttataagcaggctcttcacgctgctgctctcaccggctgcagcctgtgttgaacatatagcttctgtaacccttctgacagcatctgattcttttatgcggttattgacagcattatagtttttaacaacatcagcatacccaccacttttcatatattttattatctgctcttcaacaccatatccgccattgtcagtcatgtacttataaccagtatatgatgcttctgtaaggcttaaatccttagaatatgtttttatattttctttgatgtactgggggattttttcattgactatgtccgattttttcaatgcaaatatatcgaattgttctaataaatcattactatatgctgcaaatactgattcatcagacaagctgcatgactgttttattatcgtgttatatcctgacattgctgcactatccacacatgttgttacaaatgaaacaacaagcataaacaccattgccgccataaccgtaatctgtgcccttaatgatattgtccttatatatgatattgtctttatatgtgatattactgccgtatttatcatatcttgtttgcctggcttgacatttttgataacagcttattaaccaatgctgttatctgacttttaaatatgatgacaagacctataagcacaacgataataagtactatttccacgactcccataccatcttcatcctgccagaaattttttatattttcttttacttttctgcataatactgccattttgttttttttattttctttcactgctgtctttataacatctgttttcataataatcctccattcttgcgctgcttttcagcgcatctcaagtttgcttcctttcctgtttaatcttcatataacatgacagaagaaatctctgctttctgctatgtaagataaaagttcataactgccggaaccataactataaccataactaccataagaagcataatcattggtataagcagtcttgttgtagcttcttcacccttctgccttgcaatattttttctttgttcaaacgcatcatatgactcctgacagagtaattcccttagccggttcgttcctattttaagattagtctgaagcagcgatgcaagctttaagtattcccttgtgttacatctgtatccaaactcctcataagcttcatattcagatattccggattttatattacaatctgttatatacatttcttcatatactatcttcactccaccaccagcctgctttttcttcatataatcctcaaccatcttctcccatgccttccttatggtcataccggcaccaagaagtaatgtaagcttggctataagctctgaataatcgtattttaattcctttattcttagctcctgttctctttttttcttcatttttcttctgtacaatatcagtaccgcaacagctgccggcacaataacatatgataaccatgatgttttttcttttgtgtatctgtaatatatatctttctgccctatatttgacggcagagctgcctccttttcgtctatatttttattaactgtattatctacggccttctggatagtattctgtgctattaccttctgtgattcatcttcatattccccggctgcccgtacattcaactctataacaccatgtctttcatattcctcatattgcataacgtatgttagtaacacctctttaacatcgccttcacaaaacatctcattatgcaccgtaccatcataatcaattactgaataatctgaaggatacatgcttacacttataagaccttctgcaagcttatctgtcatacatatatcctgtgtaatataatctgctgaagcattattctttaacacaatccttaaaagctcatcataggcttcatcaaagcattgctgtgtctcttcctctgacatttttcttggctcaacatatgtatttattgttgtctgtttatttccagctgcatcataaacatctaatgaaatgtttttagaagcttcacctggttctggtctttttatatgacttactgatgatttctgcgaatcttttataacaagtgtcttaactaacactattccaagaacaagtattacaacaataatatatttagtatttattttatttgttatagcatttactctgattttcttattcatgacaactctcttagtccttttatgttacaccttaatatccacgatcctgattgaaataacagctgcagctgcatatatgatcatacatagtgtcataactattattcccagcacattaccatatagcacatcgacaaacccctgtgttgtcatcctaagatatataagtatccccaatggaatacacaccataatcttctgctccatttttcttccgcttattatcgtgtctatttccatctggacttctgacttttcccttatcatttttgtcgtctgttttataatcgctggaatatcaccaccacttcttttggcatatctgaatatttccgaaaaatagctgacatcgtctatatttaatgtttttgcgtaatcatccataatatcttcaaggttttcgtttctttttattctgtttaccatcatcctgaactccctgactatagatgactcttttccgtatagaagttccagctcacccactgcttctgcaaacgcattttcaatcgagtaacccgtatttaacgcaaatgaaaccgcctgcattccatcactgaactccatggttttacggcttatttttttaccataagcttcctttttacgtaacacaacatatatggggataaccggacttagaaatatgcatgaccataagctgttatagaataaatatgcagcaaggacaatcactgctattccctgaagataatatataagctcatttttattttggggaattgcatccagtataggaaagcagcttactctggttttgaagcttatattctgttttcttaagttcaccaataatccttccgctttcatcttcgccttcttccacgaacctaaacagtggaataagttcaaaccctttctcaccataatcacacacctctgatatctcaacaacctttcttgtcttatccctcattctcttaagatgcactattatatctatagctgacgatatctgcctgtctattgcttccactggcatattcatgcccataagaaccatagttctcagccttacaagcatatcccctggactgttggcatgtcctgtagaaagactgccatcatgccctgttcccatggcttgcagcatatcaagtgcctcctcgcccctgacctctccaactatcacacggtcaggtcgcattcttagacttgacttaattagatcccttattgtaacctcattatctccttccatgtttgcccttcttacttcaagccttacaaggttatcaacgccggatatctgaagctctgcggaatcttctattgtaagtattctttcatcctttgggatataattagataaggcattaagaaatgttgttttaccacttcctgtacctccagatacgaatatattatatttcgctttaacgagcagcttaagaaaatctgctgcttcaactgttatagaacctgcctgtatcattcttttaatgtccatgggtgttctatagaattttcttatagttattatcgggccatctatcgctattggcggtaataccatattgactcttgacccatccggcagtcttgtatctacgataggtgacgactcattaatgattttatttgacattgctgctattctctgtgctacatcagcaagcttttcctcactttcaaactgtctttcacaccttgttatacatccattcctttctataaatatattgtcataaccatttaccattatttctgttatctcgtcatcctctataagctcctgcaatacatcaagcttcttgattgaattatataaccgtgtccttaacatttctctctggttaagtgacagtctttttactgccgttgctttatatatacactcatctattatttcataaagataatcatccgatatatcaaggcttacatcaagctcttcatatatttccttttttaattttataaacaattcatccataaaactacaaataattaatcaactcgctcacacagccatacgcttctgtatacatgattctctgaagaaaattcacatcaacatcctcttttgttttaagattaatcctcattatactatcagacacctgctccatgtcattctctataagatatcttttaagattatcaaacctgcagccttctatatattcgccactatcagctatatatgtcacatcacatttttccatcagcttccatggtcttgtgattccttctgatatattgatcactacatacatgtattgtccgttatatgcagctgcatcaataaactgcgaaagaagcatatcccctgcatatgatatatcatctgcggatactactgccgggatataatcaaatatatctgtaaaatgtatactacggcggatgccatctgtatactgcattcctgcctgtttaaacatatataaagcatctgagagatttcttgattcatcacttcccattatatgttcaatacctgagaattcatcaaggtttataaacagtgtttttccctttcttgaaaaagcggctgatattacaagtgcaagcataacccttaaagaagaattgaatccatatacacctatgcacttaaaacttttttccttttcattctgctctgtttttgtatgttttttagatattgtacctaacagctgatatgccggctgatacttgcatacgcctgtatgtccttccttttttctatcattaatcctccttgcttcattttcttcttcacataaaacaataacattattattgctctttttctgaatctcataagtataacattcctcattaaccataagcacgtcggcatcgttaccagctatatacttgttaaattcttcttttcttgtaaacattcttgccttatacggaatatctttatcatcgttaattatccccataaggcgttttgcgtaacgttcatccggatcatatataacacatacatttccttttcccacttatatcacgcctcctttatattccggctgactttaaacacaccatcatacatacacctgccattattgcatatgaaaaatggaatttatgcatgctttttcctgtaaccagcatgatttcctttctgccaagagcctctgccacaccaataaacactcctgcaaataatgcaataacaataatatacatcacgtccttatatcccataaacgttcccacaaccataaaaagctttacatcacctgcccctattgccctgaccttatacaacacataactgacaaccaatgcccacaccatacctgataaatacattaaaccaatatctttataacccttataacctccatacgtaatatccacaccatttttacttactacatacatcatatacatttctgcaatacacaccattgctgacaatataagaccccctatgattattctgtttgatatcttataccttttataatcatctgctgctgccgccatcgtaaccatcaataaaactaaatatcttactacatccatatgccctgacaatatttctttatatattccagcccacattttcatacatatttccatgattttttacttctcccataatcttattaatacctgtgaatgtgacaaagacaaacattttataaaaatatttcctttaatgtatagatctgccagcttctgactatactttataaaaataaggaaatggggtaacggaaatgaaactgttctgcaagaaaaaagaacctgctacatatgatgaaaaatatcttgttgaggaaataaatctgacgaaagctgcacttagtgctgcatatgccaactttgataatgctactgacccggatcttatagactgttatatatatcagctgaactccgagcagaaacgctataaataccttctccagaaggctaaagaatctgaaatatattcatatattccaaatgtctgatgtatatatatatggtgtatcttatatatactatatgttaactatattgtcaatattttttttagttttttaatcagtttttttattgacttttattagttttaaatctttacctattaattttgattttgcagccgatgatttttacatcacatttgacttttatatatcactcgtatacactaattacagacataagggtcaaaacatcttttggcgcttacatcattaacatacggagggatatatatgcataagaatacagatgatatctcattaaacaaccactttaatgatgatattctgaatacaggaaaaaaggggcagaaaaagaaaaacaaaagaaaagtttcaatatcgccattaacgattgtacttttagtaacagcaatcatttctatagctgctaatatttttcttcttgttactgaccacacacgcaccaaacatacagttgcacagcttgaatcaaaggatcttgatgttgcaaaagcttctgagaaagaggatttacttaactctatacgtgaacagtttgagagcggttcatcgacactttctatacttaagaagctgtatcctgataacattgtatattctaacaggaagggaaattatgtttttgctgacattgaccctgcccttgcaaaaactgattacagcacatccggattcacacgcaatggtaatggttttatgacatattctgatgataaatcgactaaaacgtatacaggaattgatctttcaagatacaactctgatgtagattttgcccaggcaaagtcagctggcatagattatgctatgataagatgtggctaccgagcttatggttcaggacttcttgtcaaggatacttcttttgaaaagtatataacaagtgctcttaccaacaatgttgatgtcggagtatatttctacacacaggctgtaagccgtgatgaagctgttgaagaggccaactatgtgcttgaccttataagaccttacaatgttacataccctgtagctattgatatagaggctatagaaaatgattccttccgtcaggaaaagctaagtgcaagtgagcttactgatgttgttatagccttctgtgataccataaaggctgccggatacacaccgctcatatatagtaatctcttgtactttatggacaatgttgaacttaatcgtcttgaatcttacgacaagtggttcgcaggatatcagactgcagctccttactatccatataaatatactatgtggcagtacacaagcactggtacggtacctggtgtatctggaaatgttgatattaacatatgttttaaaaattataaaaattaacataaaactgctattataaaaaaatgctggcttccatcaggaatccagcgttttttttattcagtcaggcaatcctccctgaatttaagtatcatttcccttgtaaggcttattccatcatcttcaagcgaaagttcctctgccttcacccacttaccaagtgaaagctcttcctcctgaagtgttatcgtatcatcaccatcaagctcacaataaaagcctgaaagtatcgaacctgacaatccccatggctggctcttatagtatcttatgttcttaaccttaagccccgtttcttccataacttctcttttgactgtctgctcaagtgtctcaccagcttcgttaaagcctgctataagtgcataattcctatatgtccttcccgcgtatttcgtaagaagaatcctgtcatgatccgttactgctactataaccgccggacatatcttaggatatatcatattgccacatgacggacattttaacatacgttccctgtcatcgtgaatagttggcttaccacatcttccgcagaagtgattatccctgtaccatccgtatatatgaaatgctgttatagctgcaaatgcctgcgcctttggctcagcctttctaaaagaattaactccgacaaaatcaaagccgtcaataactgtatcatattctttatgtatgtctgagtcagccatttcgccaatatactggcctttaagcagctcaccgctctttcctgcaagaaaatatcttgtatcatccactgacagaagataaacaaatgtatagttatccactgtatccttgttatccgccttgtttatccccagaacgaactccttgtactgtggatatacaagtacatcttctccttcataccttgcaagaagtgatgaacccttaaagaaaaatataatatcgttatcacatggactgcactctacatactggttatttaaaacttttggaaatatatcctgtatcatattagaaatacaccatctcttccactggtggttctgctggctctaccttttctacataaagaacaggaccctttttcttatatgccatctggaattcaaccttaacagttgctgtaacagttatccactgcctgttttccaatgaagcaatgtcattatagaagctgatataaccaataaactgagtatcctctgcgcagcatgtcataactttacgtcctggaacgaaattcttatctttaaagtatttattcttaagtacctgtcccttaaatcttactttcttgccaacatacacatctggtctttctgatacatccatataccatatgccataatcagcatcatctatttctataacatcagcattcacatcataaggaagctgttctgctatagacatcatttcacccttatcatcctcaaatactatctgaagtgtgttgttaagtgctctcatacttcttctgtagcttccaagatccataccagacttgcatctgttaaatataaccatatcggcatacttaactgtttctgctacgatagacctcatattattccactgaagattaaacgaagctgcatctacaagcgtaatagactgatatatatcccatcctcttggcttggctgttgccataataagagctggatcccacataccattatattcaactataactatccatggatcatattccttatcaagctcattcagcttttcttctgtaagctcttccttttcaaggacaaccatatctacaccattgtcctttaaaagcttctcactatattcttcttcaccctcttcgcatacaataagaagcttattcttggcttctgcaaactgtcccattgctattgtatcctggataaatcttgttttaccactgtcaagctgtccatttattaagaatattggaatctgatattcttcttcctgtgccatattttacctcttttcttatatttatgatgtttctgccatatatttttataaatcctaaaaatgcagcccatgtcattatgtgcaaaacatggactgcactatttaaaaacttaatttatacattgaataactctttaagagcatcttccttgagcttagctcctataacgcatattctgcctgtgatttctggttcaccatcacggatttcatattcttctggtacaagatcaaagaacatccacttaccttctggtgtaggaagcataccctttgctcttaatatatcaccataatcatctgtttcagaaagctttcttagtatctctgaaagtgtttccttatcatacttatcaggagtctctacaccccagcttgtaaacacctcatcagcatgatgatgtccatgatgatgatcatgtccacagctacactctccgtcatggtcatggtgatgctcatgctcgtgatcgtggtcatgtccgcagccacactctccgtcatggtcgtgatgatgctcatgctcgtgatcgtggtcatgtccgcagccacactctccatcatggtcgtgatgatgctcatgctcgtgatcgtggtcatgtccgcagccacactctccatcatggtggtgctcatgttcatgttcctctgcagccttagctgctgcttctgcaagcatctccagctcaagattagtaacattttccattgcatcaagaatctgcttaccattaatatcatcccaaggagttgtaataatatgtgcatccttgttaagtgatctgataagttctatatctgtctttaacttagcctctgaaacattctgtgttctgctaagaataatagttcctgcatgctcaatctggttgttaaagaactcaccaaagttcttcatatatacctttaccttagatgcatctgctacagtcgatgcactgttcagcctgatttcgttctcaatatgaagatccttaactgcctttataacatctgaaagcttaccaacaccagatggctcaatgataattctgtctggatgatacttttcaactacttccttaagtgatgtaccaaaatcacctactagagagcagcatatacatcctgaattcatctctcttatctcaacacccgattcctttaagaatccaccatctattccgatttcgccaaactcattctctataagaactacctgttctcctggaaatgcttcctttaaaagcttagctataagagttgtctttccagctcctaagaatcctgaaataatatctacttttgtcatctcattatcctccattatatccttactgtatataatctcctgcatttctgccttatatgcagaaacctttcttacatccgactgcagcattataatagttctgtcaacatctttatatctatcataaatatgccccgcctaagttttattatacgcttgttgtcaatacccctgcctggcagcccttatctcatctgccatttcgcttatctttcttagtctgtgattaaccccggactttcccacaggcggatcaagaagctctcctatatccttaagattcatatcctgatgttcaagacgtatctttgctacctggtaaagtccttcctttaggcttgaaagtcctactgtatctcttatatactcaatatctcttgtctgcttgactgccgctgatattgtcttattaagattcgccgtttcacagttaaccttcctgttaacatcatttctcatctctttaagaatcatgacattatacagctccatctgggaaacatatgctcccataagattaagggcatctgttatattgctgccctccttcatatagactatataattattcttacgctgcgtaacctttgcatcaagattaaaaaagcaaagcatatctttaacacactctgcatcttcttcataatcacatactatttcgtaatgataaaacttattagggtcacttattgagcctgcggctataaaagctcctcttataaatgcttttttgcagcaatccttctgtactattcttgggtccacgaatactggttctatatgttcaaatgtatcatctgcccacttaagtgtctgtaatatctttgcgacctgcttctggtcacatattcttatgcttgtatccctgctgctctcggatatatataatatatctgaggaatctatatcaaatatagtctctaaaagtacaataaacttgtatctggcaacctcattttcagtgagcagttcaacctgcatctcaccacccgatgaacgtcttatacgtcccgacattcccataatagctgcaaactcagctatctggcagtgtcttgccgaatcaagccttgcactcagctcttccttaacatctgaagaaaacgacattaattatctccatttcttatattgctatacaagggtacaccctgcatttgttgtatcaaagccgggacttttgaccacagcttcattaaatattaaactcttatgaattcttaacccttacgctttgaatccttctctatatccctgtgttccaccttgcagccataaggtgtctttgaaagtctgtctgcgattgcattggcaagtgtcaccgaacgatgctttccacctgtacatccaactgctatgacaaggcttgactttccctccttgacataattaggaagcagaaactgtataagtccatcaacacgcacaaggaactcttctgcctctggtgctttcatgacataatcctgtatctttttatcattacccgtaagcggtcttagctcttcaacatagtatggattagggagaaatcttacatcaaacaccatatcagcatcagctggtataccatacttaaacccaaaagataacactgtaacgataaggttgttaaactcttttctttcaagcactatcttttcaagttcttccttaaactctcttgtcagaagctggcttgtatctatgataacatctgctctttgtttaagaaaccccagctgctctctttcaagcagtatagctttatccactcttccatccttagcaagtggatgtgtccttctcgtttccttgtatctttttataagtacatcatcacttgactcaagaaacagaatcgtataatcatatttcctgcttttcatataatcaagtacggaatcgaactcggcaagtgaattgccactccttatgtctacaccaagtgctatgttgttatatccattattctgcttctggcagtctgcaagctctgcaaactttgatataagagatataggcatattatccacacaataatatccctcatcctctaaaacattcaacgctgtcgatttgcctgctcccgacatacctgtgactataataatcttcatatactgcctcgctcctgactaaaacctgtatctagaactctcctattttaacaacctcaagctcaagcttaacgccagacttctttaagacctcttcttttatcttatctgtaagctcacatacatcctttgctgttgccctgcctttattaacaacaaagcctgcatgtttttctgacacctgtgcatcacctgctgacagacctttaagtcctgcatcctctataagctttgctgcaaaatatccctctggtcttttaaatgtacttcccgcacttggatattctaacggctgtttcattcttctcttttgtgaaagttcttttatattctcttttatctcatcagtattgcctttacttaacttaagtgttgcacttactactatatatccatatttcattatgcagcttgttctatatccaagttcaagctcgtctttacccagagtatgaatatcaccgttctgatctaagacctcagcactgacaataatatcctttatctctccaccataagctccagcattcattctgactgccccacctattgttcctggaatacctgttgcaaactcaaagcctgcaagtcctttatctgaaagcctgtttccaagccttgacagtttcatacctgacatagcctttactgttacatcatcaatatactccacttcatcaaaagcatctgaaagctgtataataactcctctgaaacctttatctcctacaagcaggttgcttccatttcctataacatagtaatttatgtctgattttttcaataaacgtattatagtctgtaactcttcaacagaagaaggcattacgaaataatccgcagtgcctcctattctgaatgtagtatgactgctcataggctcatctgttctgacctgtgattcacctgctatatccttaagcttttccaacaaatcattctgactcatgtattatcatactccctgtctatattcattatttacataattctgcttactcatttaatacaagtctggctgcgccatacataccagcatcgttgccaagtgttgcctttaatatcttagtgtttcttgaagcatggaacacatactccctatagtacttttccactctgcttaacaaaaactcgcctgctgctgaaacaccaccacctatacatataacctctgtatcgaccataccagaagcacatgcaagacctttaccaagataacggcacatataatcaacaacctttaaagcaacagaatctccattcttcgcctcatcaaacacggctttggctgatatataaggaatatcccttaacgctgacggctcatctgattcgctaagcattctgacagctgtcttgactatgccagttgcagaagccacctgttcaagacagcccctcttaccacagttacaatactccttctcctcatcagctacaggaaggtgacctatctcagccgctgcaccattgaagccgcacaaaggctttccatcaatgataacaccaccgccgacacctgtaccaagtgtaactaaaagactgcttgagtactctttggcacttcccatccaatactcaccaagcgcagccatattcgcatcatttccaaccttaaccttgtatcctgtcatcttactgaatgtctgtgccacattaaacacaccccatccaagattgacacatttgttaactgtgccatcatccctgacagcacctggaactcctattcctactccggctatatcatcacttgctttttctactgcttccaacatatctggtatatgtttttttatatcttccagtataaggcttccaccctcatcctttcttgttggaatctcatccttataaagaagctctcctgacacactaaaaactccacacttacatgttgttccaccaatatctattccaagtactatgcttttatcattattaattcctgcattacttatattatcattaccacacatacaaacttcccccagtcataatctgttatctgattattgtaattaaaggtcgtcctcttcgtcacctttcataaggttttcctgaacccttctgtataactccttagctgcattgtaacccatcttcttctgtctgtggtttaccgctgctgcctctacaataacagcaagattacgtcctggacgtattggaagcgaatggcatacgactttattgccaagatactctgtgtattcctcttcaagacctaacctgtcatattccttatccttattccagtcctcaagcttgataaccatatcgatctcctgtgtttccttaacactttctacaccaaaaagtgtcttaacatctatgattccgatacctcttagctctatgaaatactttgttacacctggggctgaacccactaatgtttcattacttacctttcttatctcaactgcatcatctgttacaagacgatgtcctctcttaataagctcaagtgcagcctcactcttacctataccactctcacctgttataagcacgccctcaccataaacatcaacaagcacaccatggattacaatacaaggagccagctgtaccttgagccatcttataacttctgctgaaaatgaagaagttgactcctctgacttaagaataggtatctgatacttctttgcaagttctataatctctggttcaggttcaagattcctgcagaatataagacatggaatattgcttgataaaagctgcatataacgttcaaaacgctctgtatctgaaagactcttgagatatgaatattccacattgcctataatctgtatacggtcattatcaaactggtcataaaaccctgtaagctggagtgctggtctgttaaactcaggcacatgaatccatattcccttgacatctatatctggtgtaagattcacaagattcatcttctcaattacttttgataaattaactctttctttaccattcatatactactcctatcctgcatattaaagtcattactgacaatgccgcaattattatatatttgattaatgttttcctgttttatatttaatatatatttttaccatatgtatccacatgcgtacatattgaatgcaatattcacaacattttattccgctttcgatatttaccgtatcttaagtaaaaaggatttttctaaggacagaaatgacttttatactttcgacacttacaccatcttatacattagtgtaacacagcggctctgatattaaaagattttcttcaaatatattgttgttgaattgaatattagttggtggcaaacggacgacaaatataagttacagacagtccaacatattgcctgttcacattctacatatatactcaatggaaatacttatatatattctgtgccacattctctgttatgccttcaacctccataagctcactcacacctgctgcccttatcttttctatatcgagaaaatgcttcataagtgcttttctccttaccggtccgattccttctatatcatcaagcaccgaattaacctgcagcttacttcttagtgatctgtgatactctatggcaaatctatgtgcttcatcctgaacacgtgttataagcttaaagccctcgctatgtctgtctattggtatctctacgttgttataatacaagcctcttgtattatgattatcatccttaaccatgccgcataccgggatatgaatatccagctctgacagcacctttagtgctatatttacctgtccgcgtccaccatccatcataatcagatcaggatacaccgaaaagcctcttgactcctcttcacccgcacgttccctcatgcctctctggaaacgtcttgtaagcacctcactcatgctcttataatcgtcaggtcctttgactgtctttatcttaaacttacggtaatcatttttctttggtcttccatcttcaaaaacaaccatggaacctacagattccacaccacttgtattggatatatcataagcttctgctcttcttaggttcttaagtccaagccacccagctatctctttcatggcacctgttgttctcttttcttcaagcttaatcttctcagcatccttggtaagaaccataagtgcattcttatgtgccagttcaaccatacgctccttgtcaccctttttaggtgttatgacagatacctttcttttctttctgcttccaagccactcagcgataacatctgcatcatctatctcttcctgtgtcataataacattaggaatatatggagttccaccatagtactgcttcataaactgcgataatatggcacttctgctatcattcgcagcaaccttcatatgaaaatgttctcttccaagcagctttccctgtcttataaaaaatacctgcacaaccgcatcctctgtatccatagcacatgctattacatccctgtcagtagcatcatccgccgtaatcttctgcttctgtgctatctgctttacgctgttaagaaggtctctatatcttgctgcttcctcatactcaagcttcctggagcaatccatcatcttatccgtaagctcgtttattatctctgaatagttaccattaagaaaacttataaccgactctatatttttcctgtactctgcttcactaaccataccctggcatggtgcattgcactgtcctatatggtagttaaggcatggtctttctttgcctatatccttaggaagtcttctgttacaggttcttaccttataaagcttgcataaaagttctatagtttcttttacggcacctgctgatgtatatgggccaaagaactttcctgtgccatgcttcattgttcttgagaataacactcttggatatgcttcatttacagtaaccttgataaatggataactcttatcatccttaagcatcgtgttatactttggtctgtgttctttaataagattacactcaagcacaagtgcttcaagctcggaatcagttactatatattcaaaatatgctatatgcgaaaccatctgtacaacctttgcagaatgattcttactgctctggaaatactgccttacacggttttttaacacctttgccttgcctacatatatgattgtgtcatgcttatcatgcataatatatacccccggcttatctggaagtttttttaactcttcttcaagattgaacatacacatcctcatttcttatttctatgctattctttatttgacctgcgctcattatagcatccccacattattcactcaatttcatttttataattttctgattttttcacaatattcacatatcgtgggattatatgcaaaaatgactgcaatggtattataacttataccattgcagtctttgcccatacaccttaagactatatccatccctgttattcctgcttgtgaaacccttctcttgctttactgtttcgctgtttcactacttcactgcttttttataattatataccagtattatttccatgattagaaatactacgataaacagcagcacactctttaacccatacccatatgaatcaaacatcctgtttatatccatcgcggctattattgacattttctttgccaatcctacaccaagcacatataagacatgtggaatgagcatacacagtgatatgattactgacaccttataactaaatctgtacgataccatatatgctataactgctataactatcagccataataacctgcatatataattaatgataatatatgaacgtatacttatatcaaacggaaaatctgcgaatttctgcagacacagtatacttttatcaatctggttatagctgtagcagcgtgttatgttatatatattaataccagcagcaagcccccatataaagaccgccagtataacaatctttgacagcttaatccaccacagcttctttctttttcctgctgttcttatatgcatattcattccctgctgccgctctgaggcataatctcctgccgctatcagtataatgataacaacggatatcagattcattgtttcattgttagaatacagcctgcttccaaatatatcatcgtaattatatggattaactataaccgcatctgcttcacgggactcatttatatttttaacataatcatattccttctgcattatgtccactgtaccaagaagctttttggcattttccttctcataagagccatcttctttactatcctgcactagtacagcctcatctcttaatgcttcaatataatcactgaccttcttatctgcctcatgcccatcgaattccacataaaaactgttaagcttatatgtcttgttattactgccataatctatgcccttcataaccttagccgatgtaaacagatatatccctgccagtataaaaacaatccccttctgtactatcattgttttatagatttccataacatacaaaggcataccagacacaagcttctgattagcccgacttatctttaccgcagcagcttctatgacactcttttgcctgattgtatattttaatgaataagcaatcacatttccagtcagtcccgcagcaagcaaaacagctgtaagaatccacgttgttgtagatatatctgttataaagccgtctcttccccagttctcatacataagataagagcctccaggaaatattatattgaatacgttaatatacttaagactgttaaatgtactgttatactgtattctgccatacagcatatattcgcataaaagcaccgctataagcagcgtaactgctatcttataattattcacaagatttatcataagatatatcaaaagacttatggcagtcatggcgcaggcatatactaatgcatatataacaaaaatccgatttacactaacagcataaggaaacatactaaacattttcgaattctgtatacagcatgttccatcaacaccatatatctttgcatatataccatatgctattgaattaaacagacatgataatattatattaaatactataataataaagcatcttataacaggcagaaatattcttcctctcctgcttgttcttacaagcacatatactccgttgtcgctctcttctgtaaaatgtattatgataaccgtcatcataatcacgtagataagcggtatagctctattaccaagaagctgctcaatagctgcagtgttcgtattattaaatgccacatctgctttttcaagcttttctttatcttttaactgcttattggcattgagaatataatagctgtctgtatcaccaaaaagtgtgctatctgctattctgttataatttttagacttgatgttgtccgcactactgtcataatagctgttataagacttcacgtacttttccttattctcaacaagctctgctgctttgtttatatactcgctatcttcttccttatatgtatcatatgcggctgtcagcttactggctgtcagacctaccctgtcttctttaatcttgtcataatcattgataatctgtctgtaatatctatatgtcacagcatcattgctgctgttaacctgataaatacatatgcttacaaccgctgccagcgcacatattatacacagaatgcttttctttattattcttatcagttccataggcattctccaactactctggtgttatctgctgccactgcatgcttgtgcttcctatctgtgacttatcaagaactgcagttacacatatatttgctccacccttctttttctttgccgcctctttctgaatagcctctatcttatctttttcctcctgtgacagttccatacctgctacatccgctctggcagttgtcacaagcatgcacctttcatcaccgcctttatagtcaagagttatattgcctgaagaaccctcattagttttattcagtacaaccgtttcatcaacatttccatctgtatcaaatatataaatataattatcataggctgccagtctttcttctctgctttttcccgctaatttagaaagattaactcctctgtatacatacagatgttttccatcatatccataaaaatgtatgtaattctcatccccagtttctttaaactgcgaaacctcctcatttttaatttcttttttctcctgctttgcttcctctgtagttccctcaatatccaatgtaaatatatcttttatctctccgttgtccagatttaactttcttataatatatttatcctcgttggcacatgggaagtacatattattgcttttatcaaagctgacttcactgttccagtttaagattgaatcagctatatcaggatattgttcattcatattgtaaagtctctgcacattttctgtatttatatcaagcacctcaacataatatatactttttcccacagatataccactgttccagtttatatatactttatctcctataccatacaatactataagttcaagatagttatatgtactttcatatgtctttataatatgaggctggctgtcatccgataacgatactgaacacagcatgattgtattattaccagctaacatataatacagctttccatggctgatacatgcattgttcttatttccattgacagaataaccatctatggacaatgttttttcctctttcttatctctcatagtcttattataagaaacaagtatatccttctcagcggtcttttctatcatatatattctctgattgtgataccatatcttactactaagacacatatctgatgatatatatgcctcacagtcttttgtcttatgatcacaatcaatatcggaacacagtggaatagcctcctgtttaaccatatcatagtaatatatgtagctattcgtattgtcactgactcctgatgcaccagctatatagtagtaacctgtctctgctgccgctgcactgtctgacatataatattgcggctcattgtcatcatatacatatgatgcatacttataatctacgtctgtctgtccgctatcagctgttttactgctgcatgccatcactgctgacaaacagcctataatcagtgtaatcacgctcacatctaccaatatcttttttattgatttcttcataaaaaccaccgtccttttccacgtttatttctgtacttgacaggtttgtgccaaatatatgcagacacacccggcatattgacctttggtctgaacatcataagcttatgtatatattacagatacacggctggaaaagtgacatgtattataaaaaaaataatggtgctacgtcatatagcaccattatcatacattatcatataagaattttatgcctgccttccaagatcaaacgccttatgattaagctccctgaacttctctggtacgattgcatctatagcagcactccagtcctcataaggtatatcatcaaaatattctgataatcttcccataagcacgatattaacagccttagatgaaccagcctcctcagctattgataagaaatcctttgcatcaaccttagcaccagcttcttccagcttcttaacaatatctgccgggtattctgcagcacctgttataacaggcataggatcaacctcctgcgtgttggtgataatctgtccaccaaccttaagatattctatccagcgttcagcctcaagcttctcgaaagaaagaatataatcagcttctcccttgtctataactggtgaatatacttttttaccaaatcttacataggtaacaacgcttccacctctctggctcataccatgtacttccgataccttgacatcataaccctgatgcataagcacatatcctaacatcttgctggcaagcagtgttccctgtccacctacaccaacaatcataatattcttaactgaatcattcatatatgttcctcatttcttattaaagcctgatatttattgaataaatcggactttatattctgataataatgtaatccttaaatagccccaaacttacacatctgtgagcacaccttacatcctatacaaagtgttgggtcaatgtgtgctttcttatccttaactgctatagcaggacaaccgatactcatacactgcttacatccaacacatttatcctcatcaacacttataggtggtttgtggactgttccttttatcataacacaaggtctgcggcttataatgatagatggttctttagcagcaagctcctctgttacagcttcttccacagccctaagatcatatggatcaacaactcttaccctgttaaagcccagtgccttacatagtgcttcaaggtcaaccttacctgccggctcaccacgaagattcttaccagttgtaggattctgctgatgacctgtcatacctgttatggaattatccagaataataacagttgagttactcatattgtaagaaatatcagttataccagtcataccagaatgtataaatgttgaatcaccaataacacctacgctgttgctttctcctgcttctcccatagccttgttaaagccatgaagtcctgaacatgatgctcccatgcacacatttaaatccatagcattaagaggggccaccgcaccaagtgtataacatccgatatctccgtataccatgcattttttcttttttaatatgtagaatatacctctatgtggacatcctgcacacataacgggtggtcgagcaggcagattctcatctatgctcatgtgagcaggtacttccatgccaagacattctcttacaagattctgtgagaattcaccacatataggaaatgtatctttgccagataccttgataccaagctgcttacagtgattctctataattggatcaagttcttcaagaactactactttgtcaactttagctgcgaaatccttaataagcttttcaggaagaggattgataagtccaagctttaatatacatgcgtcctctcctaatacttcccttgcatactgataagaagtagaatctgtgataataccaacacttgtatcttttcccatctcaaccctgttgaattcacaattctctgcatattctataaggtctttcgttctctgctccactcttacatgtgcattgcgcgaattaagagtcatcataactttagttggatctttcacataaggtacctgtgctggttctatgcgttcctctgtatctactatactctgtgaatgtgatactcttgtaaccatcttgagaagtacaggagtattgaatttttcggacatttcaaatgctttcttagcaaacactcttgattcctctgaatcagatggttcaagcataggcagcttggctgctatggcataatgtcttgaatcctgctcattctgagatgaatgcatgccaggatcatctgccacacatactacaagtccggcattaagtccctgataagatatagtaaagaggggatctgctgccacattaagtccgacatgtttcatggcacatgctgctcttacgccaccaagtgtagctccgtgcgccacttcaagtgctaccttttcattaggtgcccactcacagtatacttccttgtaagctgccgcctcctctgtaatctctgtacttggcgtacctggatagctggatatcaccttacacccagcctcatataaacctctggcaactgctttgttgcctaacatcaattctttcatatattactccgttctttcttgttacactaatattcatttatgcattctttctgctatacatatccattaaaatacagcaatcaaccctgattctcctgtgccacaagcttatcagccccatatatcttacgaagcttaggtttctctatcttacctgttgcattacgtgggatctctgcaaatataatctccttaggtctcttatatctaggaagctccatacagaaattctctatctcttcctctgtacatgtaactccatcctttatctctatgatagctgctgtcttctctcctaatcttctgtcaggaagaccgataaccgccgcatccttaatcttgtggaatcttcttaagaaatcttctatctgtacaggatatatattctctccacctgatacaataacgtctttcttacggtcaacaaggaagtagaatccatcttcatcctgcatagccatatctcctgtatacagccatccatccttaagtacctccttagtagcctcctcattcctgtaataacatgtcataacgccaggtccttttacacataactcacctacttcaccctgacagacctcgttatcatgctcatccactatcttacactgccagccgtatcctggaataccaatagcacctaccttatctatattctccacaccaagatgtacgcatcctggacctgttgattctgataaaccatagttagtatcatactgatgattaggaaaatactctttccatctttttataagtgaaggtggaacaggctgtgcccctatatgcatgagtctccactgcgacagattatagtctgaaagcttaatccttcctgaatcaagtgcatccagaatatcctgtgcccaaggcactaacagccatacaatagtgcagtgttcacttgataccgcagataatatctgctccggcttggttcccttaagaagcaccgccttacttcctgccacaagacttcccatccagtggaacttagcacctgtatgataaagaggtggtatacacaagaatgtatcatctcttcctgttgaatgatgcttctgctccatgatagctgcctgtgtaagactctggtgcttatgtaatatagccttaggaaaacctgtagttccagaagaaaagtatatagcaccataatcatcctcagttatcttaacatccggctccttgctggagcagtctgctaccagttcatgataactttctgcgaaacttggacagttatcaccaacatatataagaagtcttcctcttgataatctctctgcatttacctctattcttccaataaatgcgaagccaaacactataacatcaacctgtgcaagctcggcacagtaatatatctcatccgaatcataacggaagttaaaaggcactgcgatagcacccgtctttaacacgccaaaatatataggaagccattcaagacagttatacataagaatagctaccttatcccctttcttaactcccctgctaagaagcatattggcaaacctgttagccttttcgttgaatacactccatgtaatctcacgcctatatggcatgttattaataggctgaatcagatcgaactccttccatgtcgttcttctagtatccttctcatcaggattaagctcaactagagctacctcatccgggtataactcggcatttcttactaaataatctgttactggcataatattttccttcctgctatataattgataccatggtaaaaggtctaaacccacatgagcttgctcataggtggacgaaagacctttggatccgccccgatatgagcataaaagtgggatgataatcccgtatctttataaaacttcattaaataatagaataccacattttgcacaataaaaaaagagctgcagggcaactctttagttaaatataccattatacattaatcaccaacatgctcatttataacctcacacagattacgacacggttcataatattttcctttatacattaaaacatctccaaaatacacaggaatttcttcacttgttccgtcattataattaaatgtaatcttatataaagtacgttctgtgtctggcttagctttttccggcatattatcttttgatagtctttcaatacaatcatctaatgtttttccatctatagtcactttttttgatgtaatattactttttataataatatttttcaaatctgtaagattaaacttaattatctttgaatcatattcactatatacagcagcgagttcatttataatatctgtaatcatgtctgtatcttctactgtataacttttcccattatactctatattgctttgcgatatcactatacttttatgttttccatcactatctttatacgaaagacgatactcccaaccagtacgcgatgcatctccttttaatatagaaacaacagaatatgttctcacatgtattccattaatcataccagctattttatcacaatcacctatcttctgtattactccatcttttccccttgtaacagatagttctgatatattctgatttatactgattcgttttggaatccttatatttattgctatgatagctatcgctataactaaaaggcatattagtataattgcatattttttctttttcatatatatatccccctatttataattaatatttattcaaaataatataaatatacatcttccagattaatattatcttcaacttttactgcttcatcaggtaactcatctcctactaccctcaatgctaaaccattttttctttgtcttatattacctatcttatattttttctgtttatcactaatctgctcaagagaacaagtaatttctcctacttttcctgacatattctcaatcaattctacaggagtgcctgttgctataatttgtccatcttttaataaaataaccttatcggctatacactctatatcacttactacatgtgttgcaaaaagaattatcttattctttgataattctgcaatataatttcttattgaaattctttctttagggtcaagtccagcagtgggttcatcaagtataagaattctaggttctcctaataaagcttgtgccaaaagaactctctgtttcatacctcccgaaaaaccacctattttcttatatgcaacattactaaggttaactacatcgagaagctcttctatctgctgattaacacttttagtaattgtatttccatttttatctgatactttaatttttttcacttctttaatttctgccatatatttaagaaatgccataggcgaaaaatcctcataaaatccctgctgttgtggcatatatccaacaattttcctaaaattttttccaagcttcaatatgtcttttttttctttatcctgactatataaaatacttccaccattaatcttatctcttgaaatattatcggtaataagattaatcatagtactctttcctgcaccatttgaacctaatattccatatattcctgatgtaaatttataatttattccttttaacgcttgtactgttccataagttttttttaaatttataagctctaattccatattttaattaactcctttccttatcatttttatttataacagccttatgctggaatacattcataatatatatagttgcgcctattacaatcaaaataattattccagtcaaaaaccagtaaacagtcatcgtccttccgctttctatccaacatctgaaaaatgccatatactttactattgatattttatacataaacttaaacccaagcatatacaataattgtggtaaaataattaccagccctacaataaaacaatatgaatatttaacatatatagatgcaactgacattatcatttgtattcccaaaaggaacatatatttaatcataaaatcaataaaaatatatactattatcggtgggtttattatgtaattctgaaacagcattatacttttcaatggtgctgttatattggtatatgtatatacaccacaaagcttcttataatacatcccatatgtaatacaggcaaatagcagactaagcatactctggataaacaacttctttaccagccattttcttctgttcattcccgtaagagccagactctttaccattgatttcttttcatatgctataaacccgcatgaaataacaatagctgcaataacatttatcattgcaataagttcctgattattccactctctgtttcctattgtttctgtatactcatatggattaattacaacggctgatattcccttctcattcatctgtttaatataattaaaattctcttttacagtattaaataagtcctgtctattagcaagaaatgttttcgcgccttcagcagaataatcaaagttatcaagaaaatcttcatattcatcattatattcattataaatatctattaattccgtaccataacttaacccttccgctttctcataatatcctaacatataactctttttggcatcatatataaccccatagcttggctctacattagctgcaatatatgcaagaagcagcagtatccatattattccctgtgaaattaatatcttataaacttctttaccgaaattattcgtctttaccattaatctcataatatatgtcagaattaactctatagcgttttctactatattcatcttaccagtgaaatattttcttatgctgatatatgcacttgcaaacaaagccagtattcctataaataccgatacaattatcgtagttgttaacaaagatactgcaatgttaaaacatccccagttaaagtattctgctgctttattcggaaaaaataaataatatacattcagatacttaaatatctgcaatatagattttgctgaaataaccttatatatcaccacatcagccacacaaatacagcaataaaaaaacagaccaatatttacattgccaaagcacaataaaattgcccataaaacaagcgataatacaacatttgccaatatcgataataatattattaatcctaaaaactgtattcttgaaagcttacccgaagtaagtataaaatattcatcacttacggctgcaacattcaggtcttttacaccatcatatctgttaagcagcataaccgctgactctgtatacagtgcaacattcgttactaccgcctgtattaacaatattatacttctcttaacaaacagaactccccttccactctgacctgtatgtacaatatgatataatccgttttttctttccgaaaaaaacatatatactgtatatacacacgtaattaatgttaataaatgaatataattattcttatataatttttctaaccacaatccattacttaattgtacatctgcatctattatctgtgataaatcatattgcgtttttaataagttgttatattcaaagctgttctttttataagttcccgctgttgcatataatattgctgtctgtcttttatcctcaattatccccttgtaattatctatatactttgcctgctgcattaacttctctcttgcctgtttagcagctgctgtcttgtcagaactgtcactgccattgatttcatatttctgaaaatattcctgccacgctatcgttgccgcttccgtactcagtttgctatctgacttaacaccttcagccgtattaagcatttctatatatgcatatgttacctgcaggtcatctgttttatcgctgacaagtatcagcatattaaacactaataaacatactaacagacctatatatgtttttccaacaattcttttaagctctgccataacatcccttctccccgtaattatttttaaaaagcaggattaaacattttatatttaaccctgctctgtaactatgataaattctgatatatctgttttattgatgcagtgccactattcagataatccattttatttattactcctacgcctgttgttatcacctttttatacggtttgctattaagagattttaaattcttatatacatctgaatcactattgctgcccataagaatatatctttcgtcaatcccatatacacagattcctgatgcatccgcaacaacagaagtatcctctggatactgctcataatatttttttgctttttccaaaaattcctcatcatattccatttcatattgtgcttttaatgtaccattcatatctattgctgtgaaatatgactttgtttctctgctttgtgtagactcaaaaaaatataaatactcaccatcactttgtaatgaatacaacttctccatatctgtagtgtaaataacttcacttgtatttttatcaaaattaaccttaattaaggtatcattattattacctgttgatgatgtcataatgtagaaattaccattactatccatcctgacataactgccatctgacataccatctacttttcctgtattttctccaaatacatctactctgtcatcacctgtatatgtccataattctgtatattgacctgtacttaaatcatactttgaaacacggtattgtacattattatcagaaaaatacattctcgctgttccgccagcataaaaataaatattattatctgacagataaacgccaaaaccattgttctgtccagctttcatagcataatctcccggaaactgaaattctccaagaacctctcttgatgaattgctttcaagccttattctacatatataaaatggtgcaatataaccattttttgcatagtcagcatccaaaaatgatgtatagtaataaaaataaccatctgatatcatacttgcctgtacactggttaccgttatctgctcatcttttactgatgcaagctttgtaatacgttctttatttccaaatgtagcatcatactggcataaataataatccctgtctttagtaacctcaatacaatataaatgattattataatacataactttttcattcatgcaattacatccaaatgtgccattttctgtattaattccactaacataagcatcacatgtttcaccatcatgattacagtttaccttagagcataacggcatattgacatcgctatttatattataaaaatacaaaatattgtcaattatataataatagccattttctgctattgccatatctgactgcccatataccccctgctccttttcctgattatatacataatcaggaaaaggattattattatcagactgttcctcatttatctggtatttagtacacgccgccaacatagccatcataaaaaatatagcacttaataccacttttttcataagcttttaccttgaattaacccaaaatgatgtatctccatattcatcacatgaaatatatgggataacataatgtccagaattattcaattcaaattcctgataagccatgtttcctctatatacagtactgctattatattcaatacctatactatttccatcaacagtaacatccggtctatcaaaattagctgatattacccaacctgaagatccttcatcccatccaacatttgcctgtactgaggcagttccacgtatactatgtgaaacattgtaatcatccatataaccaaatgaaaatggctcattgttatattccactcttcttgtctgctgtccagcaaaagcactaactgataaaaacagactaaacactgccgataatgcacataccttcgctatcttttttttcataacaaattacctccaatttttaaaattttcttaatgatttaatttcttttgttaccttctctacaaccatttttgaaaaatctgccataaatggtttaatattttccaaaacgttatactttcctttttactatcacccctttccaacttcaaatgcctaagatacatgaaatctaactaacaaataaccttctatgtaccaagcatcttacttattcatcctgctctgtatctttgacataaccaataacaatgcacatatgttaatacccatagccatatatcctgttattgttctatcaaccctcacaatacacaaaactatagttaataatgcttccaaagccactataattcttgctcttttcttactttccattaattcgccatcattaagtgcaagattaggatgattaactgtaccaacacatattatgtataaaacagataccatacaaagaaacataacaagtgtcatatactttaaccatacgaagtcacatgcctcaatgataacacatataagattagttcccataaaacactggccaaatgtttcaagatgaaaaccgcctgttcttcttctaagaaacataaatgtacacaaaaatattattatattcacaagcctgtttaaaaccacacccattatgcttatcgtaattagtgtcaatactttttccagtgtaattgtataagcatacacatatgcttccttgtcatcttttgatataatatctgtatttatcatactatcaactatttttactattaattcatcaatcatatatacaattctctttctatttacattttaacatacaaaatacacaattcaaccccattatcaaaaaacgactatattgaacaaaaaacgactatattaaagtacccctctaaatagcaaccacaatctatatagcaaaaaaaccagacgtcatcagacatctggtttctgccatctacattattattgaaaacacaaactctccattcttataatcaataatatattctgcattatatttttccaatgttgcaactacatttctcatcccccatccatgctcttctctatctttcttagttgtgcgtatatatccatcttctgtaagcactggttccgccttatatgaattagacacagctatactgagtacagcatcctcatatagcatttttatctttacaattcttttccctatatcacactgttttgctgcctcaattgcattatcaagaagattagacaatatagtaacaatatcattgtctgatatcttaatatctgacaagtcattgatcttgagaacaactaaaacatcattttttatagcttcgtaatactttgcattaaaaatcgcattcacaacatcattgtttgtatcaaccatatctaactgtgcatccagcccatctgatatattacctatgtagtcttctaacttactataatcttttttcttcataagcatatccatacatacaatctgatttttgtattcgtgtgttctctgtctttgtatattataattttcacgcatcgaattatataattcaagctgacctatagactgctgccttaaagcctctgcttctttcatatttctagaattctcaagtatttcactaataagatgaaacacaacaagattaagaacaataagtccaatagctataatataataaatggcaattatatcactatgatacgattttattacagaactagtcatcaacattacagcacatatggtaaatatagggaatatcagaaactgaatccactctttatcactcatatcagccgtaacactgttgtttttcttagtgctaatcctgcttagaataataagtcctacaaataatattaatctgcttagaataataataagtcttcctattaaagctgaagcactttctaatgcagttatatcaccataaagctttgcaagtatcataattattatatagtcaataagtgtcattatactctgaacaaaaaacaccaatattaatgcttttacaatgctaatatcatataaaaaacgcattactaataacattataacaattatcattaacatctttataatagtatacttattcaagaaacatatgcatagccttaataataatattaatactaaaactgataatattaccttttttttatttttttcttttttaactgccaatatatcgaaaaaaataaaactacaaacaatttcaataatcaaaattgttatgtctgtaatatattcaaacatttaactactcccacagtactactgcttatcttttacacctggtcttttaggctgatgtaaaatagaaatacaacctggtggccattcttcatttcttctctgaaccatttccttagtcaacttattcacagttttaagcacatttacccttaaacttttcatttcttttacctccattaacctataacttggctttgaattccaatattgctttctttacttccctatatctttttttaggcactcctatgtcaacaccattcttcaacaaaatatgataactactgatttttctgacatacatcatattaactatataactctgatgtacccttataaaataattatattcacttaattctttttctatattattcagcttatcattagtaatgtatctatccatctcccttccttctatgtggaattgtactttatgtgcactgctttctatgtacataactttattaagtgtaatctctttttcctgctgattgcatgtgaatacttttttatcggtgccaaaacaattcatcctgtataataccgcatccatacattcatatattgattgttccaactgattagtatttttcggtatataccttattgcattataattatagccttttagggaataactaatcatagctgttataaacgctataatcactctgtctgaaaacattcttatccatccagcaacttcaaaaccatctgcatctggcatatcaacatctaaaaacacaacatcataagtcattatcttatcctgaagtgccatcaaggtttcacctgaattatataattcaatgctatattccattgatttatctttaaaatatgtctccaacacctcaccaatatattcagcagcaactttttcatcatcacatatggctatcttcaaccttacttacctcatattatatataatttctgataatcatatcctttgccactattatacaaaaacttatgctgttctaacgcgtcataaaatgtcataacatatgttaagatacaatgtatcactaacataattctataacaatatcgtgtgcaaaaaaagactattttgttataacatcatagcaaagaaaaactctcccctctcacatcttatgacatgccttgcattatacttatcaagtactgccataacattgcgaagtccaaagccatgttcctgcttttcttcctttcttgttatcatatatccatcatctgtaatctgtggttcatatttataagtgtttgacactgataatatcgtatgtgcatcctcgcatgtgaacttaagctttatcagcctgtgattaatatcgcactgcctggctgcttctattgcattatcaagaagattagataacacctggactatatcctcatctgatatatttattcccgaaaggtcgttaatcttgaataccataagtatattgttatcgacagcttcgcgatactttgcattaagtactgcattaactatcttgttattagtatctatcatatcaagttccctgttaaggtttcctgttatgctcttaacatagctttttagcttatcatactccccattttcagcaagtgtctctatacacagcatctgattcttatactcatgtgtttttcttctttgcctgtcgaaattctctgatacagttctgtataactctatctgtcctgctgcctgttgttttaacacctcattttcacgaagcttatatgaattcattattatatcctttacaagataaaacataacgatatccataataacaacgcctactgctattacataatatatgacagcaagctgtgtagcatccatcgtcatcatcgttccactaagcgctataacgataaaaactgtaaacactgggaaaaacagaagctttctgcaatcgctattgcttacatctactctgttaacattcttcctaaggctatattgccttaagaatatcgttattaataaaaatactgccctgctcagtataataagtgagttaccagcagtttctgatatattcccgacattttccaagcttccaaatatgcttatcataaccagcataacaagataatcaagcacaattgccaccgaataatatatcagggctattgctgctgacttgataatacttatctgttccataatatacatatatataactatcgctatcatccctgccaacagctttactggtatatatgtcttaagagtcctggaaatgataaacattacacctatgagaagaaccatgctcatattatatactttatctgttatatttttcttacggacaacaaaagactcatataacattctgcaggttatcatttctatagttattattatcacgctgttaatactattccccattataatcttcccctgtatgctatatagctgtcagcaacatctctatacctcacctttggtatacttatacgttcaccattctctaatataacataatatcttacgagcttactaatatacttcatattaaccatatagctctgatgcacacgcaaaaaatctgcttctatgtactctttttcaacatcgtttaatgtactatatatactgtaatcctcaggatcttttccaattatatgaaacagaagcttatgcttattactttcaatatacattatctggttgaccaatacctcacagcttccgccacagaaatctatcgtcttcgttttgtggctgctgcttatcttatcaagtattgcatccatacattcatatatagatgcagccagctgattgctatttttaaggatatatcttattgcattgcagcgatatccctctggtgcataattaatatatgctgtcacaaatgctatatatatatcctgtgagtatactcttattttatcagctgtctgtattccgttcatatctttcatatctatatccagaaatgcaatatcatattccatcacattctcacccaatgcaacaaaatcaatcccggatgtatatatatttatttcacgagcaatgtgtttactatcaagatatacttcaagcaattctttgattttctctgcaaaaatcttttcatcatcacatatggcaatctttaacatctgtccgacctcagtttctttgtataattatacacttataataccatgatataagtgtcaaacgcaaattcaacactaatatcatactatatatgcaaagaaactatatgctcagcatgcatatgttttgagtgttttatagtcgtttatgactatatttctattccatccacatctgtgaatctatcactttattaatatttatgcaatatcacttacaaaaacaggacattttatgcaaaaaaaggacattttttcttatttaactatgttctttaataaaccaccattatatttcaattaaatcctcgcatttacagtttaatatttttgcaagtctgaatacattttcagctttggtatgattaatatttctctgtctttgttcaaacaactgtatctgtcttaacgacacacctgataactctgacaattctctctgtgaataacctgaaagcatacggatcctctttagattagtatctatataatagctttcccacagttcgttcattctatcaacaaactgttgtatatccatctcgtgatacacaggatacatatctactatatctttaagctttacagcattccatatctttgcaaatgttctgcctgtgtaccattgataatatgcaagtgcccagcctgtccagtattctgctgttttatcaatgtacattacatcttctttatcgtccagtttaagacctgattccgctataacctctttgaacaattcacatccagttttacccgctacatatgtaggattacctgactgaaactgtttagatatatctgatactataaacatgccaaaaaactcatcaatctccacatcatatgtattaacagcataatcaagcatatcacccattattctctgtgccatatttacataatcacacggataagcgtgcatcaccattttcaataccctccctcataatatcaagcatatacaggtcattaatatccgctttttcttttttattcattctgtattcttttcttgcttgtttttcacgtttcactttcttaacataatatatatcgtgactcgcattttcatttcctgtatattttatcgtctgaaatgctttctgactttttaatacaatctgctccccaagctttccatacctcatagctgccgataatttctgaagcgatataacacctgccacaaaatcctgtgcaaacgaaaaatacgaatcatctgcacgataacctattatcacatcataatcagatatatcaatcaaaaaatgttctctaagataccttttagcttcttctgcgacacttccgttctgccagtacgtcctgttatcagttaatacagcaagccagttaagtatattatactttgatgaattgagattaagtatattcatttctgacatatctaattcatacatattgacataaccatcgttattctttgcacatgcccattctctagcaagattaatatcttctgtacaataaaatcctctcccataatcattatttaattttccttttccatattcaggctgaccaactataacatctgagccgtgatataattttatgttttttttacccttcaagttttccatctcctacctgattatttttttattataatatagcttttttattatatcgctactgcgatatattttcaatcagctgcataaaaaactccccattatccagcagccataccaccggataatggggagtttaaggtgtttaaggattgcgtgaattgcatagcaatgtagcaatcctgatacatcagtaagtgtcaaaagtcatttacacatcatgattctttacaccacgaagtctggccatagctcttgccagtgatgccgttgatacgtggtattccataatactctgtttctgtgcaagctgttccctcgctctttcaagcgctgcctcagctctgaacttatctatttcttcaggtctttcagctgaatacactattatgtcaactttattgtgttcaactttaagaagtcctgtcgaaactatagcttcctgccatgttgtttctcctggaaccctgaatcttaattctccagtctcaacactacatgtcataggctcatggttagccataatagccatctcaccgtcaaaaccatcaaatataagaatctcacatggtccatcatagaataccttatcacaggctattaatttcaatgaaaatgtattcaacccatacctccttgtttttacgaagtaaaaatgtgagtcctctggcgagcagaggtatttacctccttgttttttacgaagtaaaaaatgtgggatttatttcaatgtttctgccttagccttaacatcctcaatagtacctacattaaagaaagctgcttccggatattcatccatctgaccatcaagtatagctttgaagcccttaacagtatcctcgacaggaacatacttaccaggagtacctgtaaagttctcagctacatggaatggctgtgataagaatctctgaatctttcttgctctgtatacagtaagcttatcatcctctgaaagctcttccataccaagaattgcaataatatcctgaagctccttgtacttctgaagtacctcctgaacacgtcttgcaacagtataatgttcctcacctactacatcaggttcaaggattcttgatgttgactcaagtgggtcaacagcaggatatataccctgttcaacaatctttcttgaaagaaccgttgttgcatccagatgtgagaatgttgttgcaggagctgggtcagtaaggtcatcagcaggtacatatacagcttgtactgatgtgatagaaccctttgttgttgaagcgattctctcctgaagttcacctaaatcagttgcaagagttggctgataaccaacggctgatggcatacgtccaagaagtgctgaaacctctgaacctgcctgtacaaaacggaatatgttatcaatgaataaaagcacatcctgtttcttaacatctctgaaatactcagccatagtaagtcctgtctctgcaactctcattcttgctccaggtggttcattcatctgaccaaataccagggctgtcttatcaagtactcctgattccttcatttcagtccataagtcgttaccttcacggctacgctctcctacacctgtaaatatagaataaccaccgctctcagcagctatatttcttataagttcctgaataaggactgtcttaccaacaccagcaccaccgaacagacctatcttaccaccctttgcatatggtgcaagtaagtcgattaccttgataccagtctgtaacatctctactacaggactctgttctgcgaatgatggaggatctctgtgaatactccagtgctcctcaccatccagtttagttccatcatcaagggtatcaccaagaacgttaaaaagtcgtccaagagtcttttcgccaacaggaactgatataccacttcctgttgctgtgacttccatatccttacaaaggccttcactcgctgcaagcataatgcatctaacaacattattacctatatgctgtgaaacctccataaccttctttttaccgtcctgtattacataaagtgcatccttgatagctggaagataattaccttcaaattcaacgtctactacaggtcctgaaacctgtactatctttcctttcatctcttccacgtgaattacacctctttctgcctagtctgaagccctttttatcctgcctgggcttttttcttcatctttttcttcttaagagcctttgcaccaccaataacctcagttatctcctgtgttatggctgcctgtcttacacggttatactctatagacagctctttaagcatagcttctgcattatctgtagctgcctgcatggcaaccatacgggcgttctcctctgttgcaaagccctcaacaagagctccatacacgaaacctgtaacataattatatgtaagatcattaagaacaacctttggagatggatagataacgaaataatcatcattaccttcaaaatcctcaagtgtaccgttactctttccctgtctggcattagctgctaactcttccttgatgaattcgttagtcttaagaggaagaagctgttcaacctgaacttcttccttcatgccatgctccatcttagtatacacgatatacacctcatccatctcttccttcttataacgttctactatatcctccgttataactctggctctatggactgatgggttatttgcagagaatctgaaagaattctccacattataaccaagtgagctaaagtaagcccttcctgtttctccgatggcaaatatcttatactgttctgcctcgtcacacaacctctttgcttcctttaaaacattatggttataagctcctgccatacccttatcaccacttatgacaataaatgcttttttcttgacactctcatgtatatctacatttctgttatcaaagaaaagatgctgcatagtaggaaaatggaataatatacttcttatctgatcctgtaatccataaaagtaaggttcggtattctcaagcttctgcttagcctttctaagcttaactgaggacatcatatacatggctttggtgatcttcatcgtatcatgaatactacttattctggcctgaatttctttagtattcgccatagcaatcccccttatctttcactcttgaactcgttagctgctgctataatagcttccttcgtctcatctgtaagatccttagttgattcaatagtattaactatctctgaatgctggctatggaagaactcaagcatatctgccctgaagccattgatcttagaaagctcaatatcactgaatacatgcgcattagctgatacaagtataataacctgctctgccatactaaatggatgactcataggctgtttaagaagttccataagtgcacgtccatgctgtaactgcttcatagtaccctcatcaagatctgatgagaactgtgtaaacacttccatctcacgatactgcgcaagatcgatacggatacttcctgctgccttcttcatagccttagtctgtgctgcaccaccaacacgggatacagaaagacctacgttaacggctggtctctgaccagagaaaaacagctcactttcaaggaatatctgaccatctgtaatagatattacattggttggaatatatgctgaaaggtcacctgcctgtgtttcaataataggaagtgctgttatagaacctccacctgcttctggtgaaagacggcttgatctttcaagaagtcttgaatgcagatagaatacatcacctggataagcctcacgtcctggtgaacgctcaagcagaagtgatatagctctgtaagcaaccgcatgcttagaaaggtcatcatatataataagaacatcctttccgttatgcatgaaatactctgccatggctgtacctgcataaggtgctatatactgaagtggtgctggatctgctgctgttgctgatacaatagttgtataatccatggcacctgctgtttttaatgtattaacaagcttagcaatagtagatgctttctgtccaatagctacatatatacagataacatccttacccttctggtttatgatagtatctgttgcgatagctgtcttaccagtctgcctgtcacctatgataagctctctttgtccacgtcctatagggaacatggaatctatagaaagaagacctgtttccataggaacggatactgacttacgttcagttatgccaggagcttcacactctactggtctgtaaccatctgcctggatatcacccttatcatctataggtgatccaagtgcatcaactattcttccaaggaagccttcaccaactggaacaccagccatcttgcctgtacgtgcgaccttgctgccttccttaactgttacatcactaccaaaaaggataacaccgacctcatcacgtcttacatcctgaaccataccttttacaccgctgtcgaatacaacgatttcaccgtaaaatgcgtggtcaatgccgtcaacattggcgataccatcaccaacccagttaacaacacctatttccttatccttaacagcaagctcgaaatccttgatattagcctcaagtattgaaagtataccttcctcacttgctgtagtcttaccagcacttacagcctttgctatgctgctttttaactggtcaatacgtgctttctcactccagtcatactccttagagccgacctttagcacgaaaccactctttatagatgaatcctgtaccatctctaacttaatatcaggattgtggaattcttttgctataaagcttttgattcctgcaagctgttcatcagatggtgcctcaacataagtaagtactgctgtactttctttctgttcaggagtcatctcaagctcctttaaagccttacatacttcatcaaataaatttatatcatcgttatcacataaaagctgtaagaaatttctcacattcttagagaataccttctgaatcacaagatgttttttctcaagtgatactgttgggtcactaagttcttccttaacctgtggtacaacatcgaatatatccttaatagtggataactcttcgtgcgacatacctgttttatgtaattctgatgcataatcaatcgctgtctgtatcactatttatcacctgctttattcaaaaatgtgtcataaagtgcagcatttgtatctttactgttgcttgctacaaccttagcagcagcatcaacaaccatatctgcaatttctttttctgccttctttaatatctgttccttctggcttatagcttctgcctcagcatcatccttaatctgtgatgctgtcttgtgggcatctgcaactatacgctgatattcttcatcagcagtctttcttgcttcagaaacaacctttttcttctcattctctgcatcgcttaacacagcctgatactttgtcttaagctcctcagcctcactctgcttagcagcagcctcaccaaactgtctgtcagcttcctcctgccttttagcaataatcttctgaactggcttgtataagaatattctcataagcacgaagagaattaaaaggttaataattgtaaataaaacattccaaacatctaactggagcatcttattttcctgcctttcttcgtagtctattctttgttatctgtatgcttatattctacctgatatactttatgtacaattattttatgtacattcatacatcaaaatgtagatgcatttttattatgtacccggataataccggatataaacatacgataccatcatgcctttatgcttaatccatgcggattagccaagcataacgataatcataagggcgataacgaaaccataaatagcagtagcctctgccaacgcactaccaagaataagtgtctttgtaatcttgccttctgcctctggctgtcttgcaacagcttctgaagccctgccagttgctataccaataccaatacctgcaccaaatgaacctaatacggcgatacctgcgccaatagctatgattgttccactcataatctaatctcctttttctttcttaagtttccagattcttttctaataatatcttctgctggctgcacaagccttatcagactttatcctgcatataactgtgccatacatatatacgctatatgcactactctgtaatctcatcaatatataatgatgtaaggaatacaaaaacatatgcctgtaacagaccatcaaatatatcaaaatacagactgaatacaaccggaagacctaccggaagtatcatcttaagaagctccataataacgaaagctcctaatacattaccaaaaagtcgcatacaaagcgaaagtggctttgttactacttcaagaatgtttataggtgttactattgcaaccggttcaacaaagccgtgtaaccagcgtttaacacctttgtgatagataccagctgcttcaataagtataatactcataagtgccagtgctaccgtgactcttaagtccttagttggggacttaaagccaaacagtccgatgatattggaaacgccaatatacaacataactgttgtgagataaggcacatatttcctgcctttttcgccaaccattccctgaaccatattcataagacctgttactatactttctgcaacagcctgcctcttacttatatgatccactttaaggtttcgggtaagtataaatgcaactataaccagcacagccataatgatccatgtgaccacaactgcctctgaaactggtattccacccaaaacaggaatcgtaaagacggtctcacattgaagttcttcaataagcttctgtgctaaatcattcaaaaaaccatctccttatcctttcgttttcatactgcggattttatacccattttttgtaaatgtaaagccaaataatttattttttaacaatgatttttataaacattttaaaatatatacaatctcttgtatcttatttagtacaattttaattattgcttaattttattcagctaattttatataatcctccagttataaagtcatggtacatttccacttattgtagataaacactggcttttctttgtttttttccattttatttcctgttaaaattcttacagacatttaaagtgcaagtaaatgactattggtcattttcacagttttaacaatactaattttgtatttatgcaattataccaatataaaatttatatacaagtataacattttaatatattttatatgttaaagccttgggaagtgaatacaaaatacaagtaaaatacaatgttatacaacaaattgtataaatattaatattttattaaaaaactatttatttttatatgcctatattttttatgtgcctatttatttttatatacctatgtttttttgtcacatttttcttcatgtaattgtattatctatacacagcatattacaataatacatatgcttgtgttaatattagcaatatccagataacagcagggggaaacagcatgggatataaaaacaacacaaaagaatatgaacgtattcttaagatgtacagtaatgacgtctacagaatggcgcttcttaaaaccaaaaacatcagtgaggcagaagatatatttcaaaatgtattcatcaaattatacacatatgataagacatttgaatcagatatacacataaaggcctggctgcttaaagtaactgtgaatgaatgtatcaacactattaaaagttcatggaattcaaaggttattaaaagtgtcaatgataattgtgaatacgatgataattcttctattgtaagctcagatagcgcagtaaataattcttcgaggtatacaaataattcttacgaaccactaaacagcagctcttataaggattttgatatagattcgatgtatgtatgggaaactgttgctgcccttccgcaaaagtaccgcgatgtaatatatcttttctatcatgagcagtactcaactgaagaaatatcagatattcttggtatatctactgtaaatgtaagaacacgtctaaaaagagcaagggaaatcttaagaaaagaggtgaacgattatgaattttaaagatgccttcgataaagactgcagcaaaataaatgtaagcgacgagcttataaaccggactcttatggctgcaatgacagatgatgataactcacatactatggataactcacatactatggataaccgcacgccttatggcactggcagagccggtttaaaacatacagaaaaagtgtcttcgcacaaaggcttaagctatataataaccgctgttgctattgccgctgctgttacattatgcattatatcttataatatattattaccatcactgaatagcagtcatagcagtccatcatcatcaactcttaaagtatatgctggtgagaacaatgaagaacttggaaaagggggcttgtcacttgcatacagcaggaattctgctgaccatgccagcaacatacaggcatggggaccacagggaaagaaccagaccatggtgttatactttgatctcaacatgcagctgaccgacagcacatcacaaatcagacggataactttatcctcatctgatgaaaacacacatttacttacacgcgaacctgttcctgatgagattatcgaaaataactataaaatatctgaggaatatggcatgcagcattctcttttcaggccatctgctgattttggatatcatacattcagcttatttaactcaaaagaaaagtttctttatatagaccatgcaaacggatattccgctgattataatgactttgaacacctttatataagcttctgtctttataaccagtcctctcttaaaacacagttaacccttactgttgagtatgaagatggcacaaccatttcaagagattatgaagctactgcttatgcttctgaattatatatgtttataagggaattaagataaatatcatcataaattttcattaaaacatttattaaaatattcgttaaaatacttatttaaatacttgtttaaatacttgtttaatactcgttaaaatattatcttttgttttaatatttttatccatatgataaaatatagctaagatgtacatttaagttgcatcttagctctttttattataaagcgcattctgcgcagaaagcaggtattttatggcattacatgtaatggatgaagctaatcgttgtcttcagtgcaaggttccacagtgtcagaagggctgtcctataaacactaacattcctctggctatcagacttcttaaagaaaacaagcttgatgaagctggtaaaatgttgtttgaaaacaaccctcttacgactgtatgcagtcttgtctgtaaccatgaaaaccagtgcgaggggcactgtgtacttgggcgtaaaggagctccagttcatttttctactatagagaattacatatccacaacttatgctaacaagatgacagaaggtcctaaaccttccaatggtaaacgtgttgctattatcggctcaggtccagccggaatcactatcgctattatacttgcacgatatggatatcaggtaactatatttgagggaaaagataagattggtggtgtcttaagatacggaatccctgagttcagacttcctaaagcagtgcttgatgatatagaataccgccatcttgaacttaaaggtattaaggtacgtccaaatacaactattggaggtgccataactatcgaggatctcttccgtgacggatataaggcaatattcgtaggtacaggtgtatggaaccctaatactctacatatcaaaggtgaaacctttggcaacgttcattttggtattaactacttaaacaaccctgacagctataagcttggtaaacgtgttattgtaatcggtgccggtaatgctgccatggacgtagctagaactgccataagaaaaggcgtacgttacctcacatgcttctctataactaaagaggttgctgcaagccagtatgaatacagctatgccaagcttgaaggtgttgaatttgaatataataaacgtcctgttgagattaaagataatggagttatattccgtgatatcatagagaatgaagatggttctttcactgatgtagaaggaacagacaagctgtatgaatctgacagtgttatcatctctataagccagggacctatgacaagacttgttaatacaactaaaggtcttaacgccaacaaacgtggacttctagaagctgatgaaaccggtcatacatcccgaccaggcatattcgcatcaggtgatgttgtaaatggtgcaagaaccgttgttgaagctgttgcacatagtaaaatcgtagctgaatccatgcatgcttatatgcagtcgctggatgaggcataggtatactctgtgggcttgagtgtaatacacttgaagcccattttatctccctactaaaaagaaattatgcccctgtttgtaacaaaagacaaacagggtcatagattacaagaatgatttcacctcttagacaacgttaagaatatctggcgggctccaacatcacacctttcatttcacctgtgtaaccactccactatcatctacatttgcattaatactaactttgttaagcaggctgaatatcctgtctttgtctgaatcctcagtacatattcgagttacacaacctgaaagcgttccatcctgtactgctggaactactgatacatctacttttccatctgtatcatcatcaccacttatccttatattaacaagcatagtgtcaacgttgtattcatcaaaccagaaatttccaagactgtagaatattggcttatcttcataatactctattccctgaaggcagtggctatgaccacctattattacgtctgcaccagcatctatataatctctcgctgttgacctctgaacctcttcaagaactgttgtatgctctgttccccagtgaacaaccgctattacatagtcggcattttcttttgcttctttaatagtctgtatgaacagctctgtatcataacatctaagaattcctggtgtagaatcagttgcctgtggtgtcatcttatatttttctgcccttgaagctgccactatcgctatctttttaccatcaactgttgcataatatggcttcatagcctcatcaagattcttaccggctcctacataaggtattccagcagcttcaagtgctgcaaatgtatcattcatggcatcagcaccataatcatatacatgattattggcaagctgcgcaacatctacacctagcaaattaagcaccttcgctctttctggtttagccctgaaagtccacattttattaggcaatggctgccctctgtcactataacagaactcattatttacaagcgttatatctgcagccttcatatattttatgagttcaggcgatatacactttgttatatctccatcatttttatccagttcctttgttgtcggctcgccctcagcaagattaatatcacctgtaaatgtcaatgttatatcataaggatgcacatctcttgttgttacttcctctgttacaacttcactgctgttgtttgtgttatcaatatcagccgctgtctctgatgattttccacatcctgtaagcaagagcgtacctgacattgttatgcatgctagcattgctatattctttttaatattctttttaatattttttctcattacattctttagtttactgacataattatgttttatcatacaataactccattcgacatttacttattctatctatcatcaatagttctataataagatgtaaaatattatttaacaaaagctgtaatatgaatcgaatgttcattcatatcacagcttgtctgtaccatgtgtacatatagtatcaccatataacatctttattatctttattattttatgatcttattttataatcctattattttgctattttataatcttgttttataatcctattactttgctattttatagtcttattatgatgtcgtggtcaaaaaccaccgactctgatacctacggattgtttattactacgcacttctacaatcctacccaatattctcatgattctgttccaataaattcttagccttttcaaaagaatccatatgaacaagaatgtcacacttcgcattcttatcattgttaaggaatcttaacaggcctgtatgaaacttccatctctcaaaatatgaaatattattctttctaagcaccttctctatctttttgcattcatccttagaaacatccgaacgaataactctctccattgtagaaacttcactcataacctgacacctctcatcatctttgcctttatacttttagattttatcacatcaattctaaaaaatccacttaaaataattaggtaaattatgatagatacaatcattttataatatcttttatcacttatatgacttttgattaattatcgtatttaattattgtaaaatattttatatgtactttttataaaaaagcacattcaaataacacataattctctataaaaacaatttctacaaaagcaatttccacaaaaaacaaccgttttatggattaaccacaaaacggttgtcttatactatatattaggtatattaggatataaacttatttaactctgttcttctttctctttacttcatagaagcatacaccaccaagggcaagaacactaagtacgattaatacaacatagagtgctgtattagccttatctcctgtaggtactggagtaccgattgtaggatttgatgacttagttaacttctctattgagaaatcagcaccaactcctgctggagccttatctgtaagcttaaagatgttaccaagtgctattgtaccatcagcatttcttacaatacctgctactgatttattaccatctaatatagatgagtaatcaagacttgcaaaccagtctgctgaaactgttgttactgcttcaccagctgctggtgtgttgaatgaagtcttagaagctgtatcccagtagaagtttgttgctttatatatctttgttaaatcctgtgaaccaactggtttgatattttctgcaacatcttctttagctgttctaaatgatattactcctgtagcttcaaaatctgtattcttagctgaatttgtatagaatgctacgttagcaccctgattgttaattgatgtacaattctttaccttgatatctgggcatgagttagaatcaataccctttgccttgtttgcaaatgctattgaattctcaagtacgtgtgaaccaggcatgctgtctccacccatcttgaatccattaccgttacctgcgttagttccatcctcaagatatccgttagcatatgctatagaattcttgatagttactgaaccgatagaacctgtctgaacctttgcgaaaagatcccatccatcatctgcattgtgatgagcgatacagccatcaaatacgtttccgtcacctactgtaagcttagctgcgaatccgtctgcatcttcataacccttatctgcattaccatatgatgtacagttaaggattaagttgtatgaaggccactcagcatatgtatctgttacatttaatctgctgatctgaagtcctgtgttaccattgtgatatgtttcaatctgatctaatgtgttatggcttcctgaaacctgaagtcccttctgtccatctgctgaacctgttacatcaaatcccttgaagtaccagtaatcaccaccgatagtcatacctgtacagagtccctggaagtcaataactggacgagtctttgcatctggatctgctaccatgtatatcatctgatctgctgtaccattgatacctcttgcaatctttaatggtgattcaagcttatatgtaccttctgtaagaacaatctgctgtgaaggcattacatacttaacagcatcatagatgctcataggatcttccttagaacctgaaccctttgcatctggtgcaacccagatagactgacctgcttcaccgaatgtcttataagttactgtatgatcaataactactgtttcataagattccattgctgaatattcgccatttggcttatatccttctgctggtgtaaagtttatcttatattcattcttacccttgttaagtgttacactagctggcttaacaagtgtatctgcctttacttctacatcagaaacaacaacttctcccttagcatcctcgattgataatgtaccatcacagtttgctgagaataagaattcataatcagcactacctgttgctgtagcagactgtacatatgtgttaactgccaccttttcaataggtctttcttctgctggtgcatcttccttaggatcaattgttgtaaatgttatatctgagaatgttgctgttgcatttcttgatgcaaagaaacctgcatatacataatcagaatcgattctttcaagtgcctcagtatcataatacttctttgttgttgaatatgaaccatctgctgactcataagttacaaagtaacctgtattattcttctggattgtaaggtacatctctgttatatttccagcatctgctggtgtattagtagagttacctattatattcttagcttctggatatctctgctcaagtggataagatgttgacttaaagttcgcctgaatagttgctgtatcattagcttcaatagcagcaatgttgtcctttgtcacgcctgtcttttcctgtgatgcaagaccaatcttctgagatacctttgttgctgaactatcagttgttacttcttttgtttcttcattccagtaatattctgtcttagaagctactgccatataagagttattccaaccagtaccacctaacttatcagctgccataagaccgaagccttcctgtccatttgataatgtccaagaatcaactgttaccttagctcttaatgtgaagttctgtgatgcaggaacttctgtataatagaatgacactccatcaaaagaagctggtactaacttaccacttgcactcttgattgttaccttgccttcattagcagaacctgtgaagctgtccttagatgagcttgcgccgttaccataagtaatctgtccccacttctgctgtgcttcttttgttaccttgattgttgcttccttagatgttgttgagtcttcacctctcttagcaactactcttactgaatattcagaacctactgtaagtccctttatagtagcctctgtcttatctgctgcatctaatgatgtccagtttttgccatcatttgaatattcaacaacatatgatgtagcttctttaactgctgaccattctacagcaacacttccgttacctttgttgtaaatgctgcctatagcagatgttgctaatgggagtacaaaatctgctgtctttgtttctgcacctgtcttgtctgctccgccatcacgaactgccttgattgagaatgtatatttacctgatgcacttggagtaaatgtgacacttgctcctgttgtatcctttgcataactttctgaagctacttccttacctgcttcatctgtcatagtaactacaactttatcagcaccatcataaccaataaccattgtaaatggaactgttatcttaccatcctttgatgtcacatcaccaagtactggtgcagctactccgctccagtcagctcttgctggtctttctccacctgatgtctgtgtaactactgtctttaagattcttacacctctattattttctccatccttaggtgctatgattgaatatgttcctgctacaagattagtgtacttaatctctgtttctggctttgtacctgttacagccttgattccatcaatcttgtttcctgatgcatctactaatgcaaggtctgatgtattagtgcttcctgtacttgttgctgtaactacaacatctgctgttcctgttactgtaaatgtaagtgctccttcttctttatcatcagctccctttgcaagttctgcagaaaatgtactgctgtttcctcttgttacttttccagataatgtaaagtatccttctgtaccatacttacctgctgctatatccgctttcttttcagctgttgttatagctgtttctgctgatgcatcaaatgtataatctgatgtaactactgctgccgcaatttctgtaactaccgcactaagaactcttacgcctctattattttctccatccttaggtgctattattgaatatgttcctgctgcaagattagtgtacttaatctctgtttctggctttgtacctgttacagccttgattccatcaatcttgtttcctgatgcatctactaatgcaaggtctgatgtattagtgcttcctgtacttgttgctgtaactacaacatctgctgttcctgttactgtaaatgtaagtgctccttcttctttatcatcagctccctttgcaagttctgcagaaaatgtactgctgtttcctcttgttacttttccagataatgtaaagtatccttctgtaccatacttacctgctgctatatctgctttcttttcagctgttgttatagctgtttctgccgatgcatcaaatgtatacacattattagctgctgaaaccgccttagctgcgaatccagtaggaatcaatccaactaccatcaaagcagccataactaacgccattattctgcgttttgtctgtctcttcataacttacctcctaatatattacggtgtacccgttgtatccggcgaagtcacctcaaccgaactttatgtctagtatctcatttttgtccacaaaaatcaataattatttgggtattttccacattttcggcggtatagctagttttattttggatattttgtacaaaactgatgaaaataatataaaaaagctcttaaatttttgttgtataccggtacaccatgatttaagagcttttataataacatatttaattttgtaattatatgatgtaaggattgaaagtcgaaaaatcgtttatgcttactcttttatgcactttaaatattttcagcacaattcacagttttaatttatttatcttatacaaaatcaatataaaaagtattaaataaagcgtatgtcattattcatacacacgcttcataaatattatattcaatccttactgttattactgtcctgtcgcaccttaagatatattcttcctatctgctcttatttcttaagtatatcatgataccttatcctattctccttagctatatccaacatgtccattgcctcttcttctgtcaggcttagttttttcatcagctttactatattatctaactgattcttctctattccttgttctagaccttgctctaatccttgctctattcctttctctaatccttgctctattccttgctctattcctttctctagcccctcttccagagctcgttctaatatagcctcacttatattacacatatcactcacacacccttccagttctgttgtcattttcagtccatagccttctagctgctgcattttttctttcttctttgtactcgacagcagcacttccagcattgctatcaacttattcttagattcttccctgtctttgctatctcttattcttaagagatagcaccattcattataataaacccctattattat

SEQ ID NO: 475 - DNA, 432 bp, Unknown
  gut microbiota DNA sequence
aatagatatttgattgttattgaatgatttaataatcattcgggttatcagcatcgtaattgtgttttgaggatagatgccaatcattgattcgtaaaatgttttttatggctgaaagaacctcgaatatgtaacgtttttcagtgctggtacaatctgccattaataaatcaatgtcagtttgatattccgtaggattgtataacaagttcccatagagtaattcatcaatagtaatttcaagtgcgttgctaattttgattaaagattctaaactgggtttacgcttggcattttcaatatagcttatataaacagtagaaagatcagcaatttcagccagctcctcggcagataatcctcgttgtttgcgggtttctcttatacgtttgcctataagtgcataatttatttccatgtcctcacctcctt

SEQ ID NO: 476 - DNA, 592 bp, Unknown
  gut microbiota DNA sequence
gatatcgttattgaaacacatatcatctgtctcgtaagccgaaaaaaaaatacatatcattatcattcaacaagtcgtaattattgctcattttaaagctcctcattgttgtttacgttatcgtcaatataatctacttcattgccatcaacttctcctatcagaattttgtcaaaatcactttgatacagcttatcctgttttactctatatttttcaaactctgtaagtgcatgttcttctgctatctttgcagatatgctacctgcatttgttaatatttctttcttactcagtcttaaaatcccttcaaactgttcagcccaatcttccatagtcatcggaacttcttcctctgccctcagctctgctaaatccaggtatgcattgactattcttgccattgaagataactcttcttttgtcagatagttcttcgcaataaccacatcaaatctttgaattttaccatccggagcatccttccatgttgtcagccccatattttccttttcactatctgccctgcgataaattgtttctgcagcggtttctccatgaattgcccactttctgaactggatagctctcg

SEQ ID NO: 477 - DNA, 6324 bp, Unknown
  gut microbiota DNA sequence
tcagattataatgattggtattatatgtttttccatcagcggcagttattcgaaattttcgaataactgaattctcatctacttctctatccgtaaatattttttttaaatgataattaatcgtatttgtcccaacattatataatactcccatcattttctgggtaagccatacattttcatcaaaatatacagcattaacatcgctttctccagttgcagttataaatgtaagatactctgctgctgaagaacgaacaatgctaatttcacgcttgttgtctttcatcttgtcacctcaatttttaatcgactaaactgctttatgaagattcatatatctgtctctcgcatccggtatgcttctttcatccataccttttaacacaaaggtcagcttatatggatcaactgtgccatcctctgcctgctctccaactataaccttctcgaccatactttcaaataccactctgtcaaattcatcaagaacatctgcatccttcagcttggctctgatagccttcatcttatctgcaatgtttttctgtgataatgcacagtcggtgaatattgctctctcttcctctcatttatccagttttttgctaagctcactgtatttatcgtcataagcttctttagtaagtttatcatcgagatacatatcggtcaatttctttcttttcttctcaagactggcaatatccttttcaatgcgttttaacttctcggtgctgtcgtcttttgaaagtgtttcttctatcgaagagagaactgattcaagcacatcatcaaaatttttcgcaagaagcccaaacatttccacaaatgcattttcaatgattacctcatctatcgccttgctgtgtggacaattctatatccctttgttggttgctgttctgcacttccacacaggctttttatgctgtgtgtcctgatgatgggaacgccttgtcagattcgtaccacagaaaccgcatttgcacatactgcttaaagcatattttcttgcaaacttaattctttctgtttcagatacattctcgtttgtcctgtatctgcttttaagaatctcctgccaggaccatatgtataaaagaatgagtcgacatgccagcatgttgtaaaagacactctttttcagacatatgtgtctgaatggaacttccgataatttatcagttcttatcgcttaggcttttatatataataccaaatgcacgcttttgaaagtcatagtggggactgctagatacacatcagagacatctccgccctgatgcaatctagttagggggattttcccctaaaaccccgattatttactatatgccgtccctttttaacggcattttacattactgacctctctttgttccgtccttacaagaagtggcacaatcactccttctttctcaatacttttcatcagctcgcataattccgtatttacctccaccttaaacggatgattcttaaaatcatgcaactgatttatctccacattccgtatcgtctccataaaatcgcctttcttgaatacatcgaattgatctcacttgaaacccatctgatacaataaatttcagaaataaaaaagaccacccactttcaattttcttgaaaatgaacggtctttcacgcttctgttatttagttgaatgtgatattgttcagagccaagcagatttcctgcaaaagtgcgagtcaagcttgcttacgaatccatccgatgtagtgcaactattgtctctatatggccagtatttggaaacatatctatacagcagcccttttttacctcatacccgctctcctgcaacataaccagatcccttgcaagacttgtaggcttacaggaaatatacaccatagaatccacaccataatcaattatcttcttaagtgccttaggattgattccatctcttggtggatcaagaactataaaatctggtttatccttaatattatcaagtgcattaagtacatcgtctgctatgaattcacagttatcaagcccatttatgcctgcatttattttagctgcatcaactgcctcggatattatttcgacacctataactttttttgcaacaggtgctaaaatctgtgctatagtacctgttccactataaagatcaaagataaccttatccttagttgttccgacataatctcttgccttagaatacagaacttctgcaccaagcgagttagtctgaaagaatgaaaatgctgtaatcttaaactttagtccaagcagctcttcttcaatataatctcttccatatactatatctgtcttttcattgattacagcatctgcaacactgtcattataagtgtgtaaaaatcctacaatctcaccatccagcgataacgcttttaatctgtctgccaactcatccataggaatatcgttaaccgtagtcgttacaatatccactagaatctgacccgtttttactgcctttcttacaagcaaatgtctaaggtaaccttcatgcttcattttatgataatatgtaagcttcttctccaaagcataatcatatacacattttaatatttttctgtaatcattatccacaattttacattctgttactgtgactatgtcatacatactatttcttttatgcagtccaagtgctataggaccatcctttatttcatcaccaaacgaatattccatcttattacgatattcacttgatatcggacttccaattattccttcccagtcataatctgtctttataacaggatccagaatctttttaactgtggtttctttcatctttagctgttcatcataatttacagtctgatatacacatccaccacattttccaaaatgttcgcatctttcgtttgtttctgtatctgactgtctgacaacttcaagaagtcttccttcacattttccatgcttctttttattcaccataaatgtaactgtctgtcctggtatagaattctttacaaccgccttttcctttatcagttgtccatcttcctctatttcaactatgacatttcctttattaggaaaatcaacactttctacataccctgtatatataccaccttttttcatttagaatttcctttcatatatcacatgaattcatatatatgtatatttcttatccatacaggtaaaaagaccactgaccgattacataacctgccagtggtcttatatacattatattattctgactaactgatacgctgctgattaattctcaaagtctttatcagcttcatcttcatcatcaaaatcatcttcaaaatcatcatcatcgaaatcatcatcgaaatcatcaagataatctggtgtgaaatatctgtatatagcatatacgattgctgctaaagctgcaactgctccgattactgctaaaacaataacaacaacattatttttgttcttttcttctacatctttcttatgaagaagttcgttcagcttactagctgctataagttcttcaatcttatccttattcataacaaccgctcctttccagtcacataataaagtaaatatattgtatcataatcatttttatttgtcaccatatttaactacatcttcaatatcttatttagtaacttatttaattatatcttcttttttaatcttctttaatcacatatttaactaaatcttctttaatcttgcaaatcctgcaagcatcttttttaagccgaattcatcaaactttacagataccatatagtcacgttcaccatggtctatagatattaccctgcctttgccaaacttactatgttctacagtatcacctacagaataacctagtccgcctgatgattcttttgataagctttttcctgtatcttctgatgatgaatctttaatggttgttttttttaagtcaaatatatccataggaaattcttttccgaatccaaccttcttatttactcctgcattagctgtatctcgtatagctttctttgctgagccatatatagtattaccatatatagtattaccatatccactactcttatacattccacccggctttgaagtaccacctatctttactctgtcagactgcttatatgtagtatttccacttccatatctgctgagtgccgccttggcattagctcttatattatatgcaggctgttcttctgactcatcttttccaccataagatatttttcctttatatccggaactgttattctctatattaagatattcatctggtatctctttgatgaatcttgaaaccttattcatctgtgtttcacctcgtaccatacgcattttggcactactcagattaagtattttctcagctcttgttatacctacataacataatcttctctcttcctcaatctctgttggatcatctgatactatggtcatatagcttgggaacaatccgtcttccatacccgtcatatatactataggaaactcaagacctttagcactatgaagggtcataagcataacctgtttttctgattcattaagattatctatatctgctataagcgcaacctcttctaagaaaccacttagcgtaggtttttcgcctttttcctgacatccagtttcataactcactattttattaatgaattcatcaatattctcctgtcttgcttctatctcctctgcggtttcactttcagcaagactttctatatatcttgtatcctctaatactgtttctgccagttctttaagactcatgaactgctgtttagcctttaatgaacttataagcgtaacaaatggttctatctttcctgcgcctctttttatagtatctatattatctgcttcacataatgcctgccagaacgtataagcattctgatcggcatattcctggacacgttctatagtagttgcccctattcctcttttaggaacatttatgatacgtcttacagcctgtccatccatgccattatctatcgtcttaagataagcaagaatatccttgatttctttcctctgataaaagcttataccaccatatattctatatggtatatttttcatcatgagtttttcttcaagcactctcgactgggcatttgttctatataatattgcaatatcattataattccatccatctcttacgaatgaacttatactgtttaccacgccatccgcttcttcatatccattttcataaagtgtgtaattaactttctcaccctcaccattctcagtccacagacttttcgactttcttccaacattattctgtataacagcatttgctgcattaagtatggtctgagttgaacgataattctgctcaagcttaataacctttgttccctcaaatgtattctcaaaattaagaatattcgtaatattagctcctctgaacttatatattgactggtcatcatcaccaacaacacacagattaccatactttgctgcaagcatagacacaagtttaaactgtgaagtattcgtatcctgatactcatctaccataatatatctgaatctgtcctgataataattaagtacttctgcatcatgctcaaacaactcaaccgttttaaatataagatcatcaaaatcaagcgcattattaagctttagcgttttctgatattcaacgtatacattggctatccttttagcattataatccccaccagcatccagaaccatttcctctggtgtcataagctcatcctttgcatgcgatatagcattcataatagttctttctttaagcagctttgtatctatattaaatttcttacatatatctttaataacactcttttgatcatctgtatcatatattgtaaaattattagaatatcctattctgtctatatatcttcttaatatacgtacacaggttgaatgaaatgtacttacccatacctcacctgcaccatttcccacagttgcatctactctctctctcatttctcttgcagctttattcgtaaatgttatcgcaagtatattatatggtgctactccgcaatcatctataagataggctattctgttcgtaagcactcttgtcttaccagaaccagcaccagctattataagcagaggtccctctgtacgcttaacagcgcgcttctgcatatcatttaatccatctaaattcatacacaactcctgttttaactatatattgcacgaacatgtattcttgtcatacttatttagtatagcaaatattgtggaaataataaagtggaaatattgttgtttagcaaacattcggatggcgaactgacgacataatataagtgaaa

SEQ ID NO: 478 - DNA, 432 bp, Unknown
  gut microbiota DNA sequence
aaggaggtgaggacatggaaataaattatgcacttataggcaaacgtataagagaaacccgcaaacaacgaggattatctgccgaggagctggctgaaatcgctgatctttctactgtttatataagctatatagaaaatgccaagcgtaaacccagtttagaatctttaatcaaaattagcaatgcccttgaaattactattgatgaattactctatggaaacttgttatacaatcctacggaatatcaaactgatattgatttattaatggcagattgtaccagcactgaaaaacgttacatattcgaggttctttcagccataaagaatattttacgaatcaatgattggcatctatcctcaaaacacaattacgatgctgataacccgaatgattattaaatcattcaataacaatcaaatatctatt

SEQ ID NO: 479 - DNA, 1824 bp, Unknown
  gut microbiota DNA sequence
atactttaatacctcttactacaacacagctttaataacagacattctcatcagaaaccttctatattatcaagcataatcattttatgaattggataattagataacgtcatatatatttgagacttatgcatcatccatcttctatcctctctgatacttccatcacttattataaatgcgaatataacttcctgttgttcatcctttttaagcattttctttacattattatcttccctgtgcacacgctctcctatattgtgatatcccaatggatatatatccattgctatatttccataaaattctttggccagattaatttcattgtcgcttttattcaacacctctatgcttaatatgaaataatgtgtacttgtgtctttaatcggttctataccgtataaatcatatgctttctcctgatccatatattgagctgaattcacacggatattaatatttccatcatctacccattcattcatattgtatgtctcagactttgccttgggaaatctcgtattaatatctatatatccagcaagccatataattacaatcaatactgctgcaacaattataactgtcttttttgtcttctttactttctttatcttattcgccttattatcatcagagtacatcatcctttactcctctccacacatacacaaccagatccataactaatatggtgcatataaatatgacatacgtctgccagtatttaacagcaagctgatctatcctgaatagccgccatggtgctaacgcttttagttttcttgtaggcagccatcctgcagtagcattcatgaattcgcataatacagatggaaacaataatacaataaacgcattattaacatattgtgatataagcagtgaaactgtggcaataagtccggcacatataaactgcaatataaaactcagaatataatatatataaggatgcgaataaagtatatatgaccacataccgttagcattgcagctgataatataatcaagagctataaaagatggaagtactgctgatgttgccataagattaaccataagtggtattattgctgtcattccacctgtaataaatacagccatccatttagccagtaaataattgattttattggttcgggaataataattatgtactatacctttcttattatctgtataatatgttactgcataaggtattaccgcaagtaacggaatcaatcttacaaaaagtgtataataccatccatctcccatcgctatccatgtctgatgtacacatacaggtattgcaagtttatctttcataggtaatagtatctcagacaccgctggaataaccttttgtatatactgtattattgatattagcattccaatcataagagaaagccagaaaccagaacttctaaaagccctttccaactctattttcaacatctgtttcattttattatcactccatctgttattttgtaaaattctgcgaaggaattcaaagcattccatatataaattatgatttatcttaaatgtcaacatttttttagactgccatcgctaattgacttatattcatcgccttaagctattaataatgttttatcatcctgtgtacattgcagatatccttcactgattactttattttctttagctgatgtctgctgttcataaagaagagaattctgattgcatattatttaacattgacactctttctatcacaagcagctataaacaacatcgataatacacatacgataattacatattttttcagcattattccactcatattaataacctatt

SEQ ID NO: 480 - DNA, 1485 bp, Unknown
  gut microbiota DNA sequence
catattaatttatcaataatttccaaatgtaaaaagttgtattgtttgatgtaactttttgcaggtttgtgaattagttaacattattttacatatttttataccgtttatgctatatatattttataatattcaattcacttgttataaataatatttcttattgtaatttttatgccgcagttgtttcaaatataataattctagatatttaatatatcattaagtactattacttattttcataaaattaaacaaaaaaattgcagaatctattttcacaataaattccacaatctcaaatgctatattgctatcttttctgaaatcggtgttttcctatacagcctacatattttttcccatcttataatttcagttaatcacaacataattgtcaaaatgatatatcacattatcaacatctgatatggcagccatttcatgcacaactgccatatcaaatactgctacagatactataaattatactgtaaccttatttaattatatagaatctggctctaataatcaaaatatcatacatcatcgccgctcatcaaatcagcagttataaatataatacaaacatctattgcatcagatcaagctttaataatgccttatttaattcaaatcctttcttatttccattactatacattccatcaaattgtgttgtaatatatatactatcaaaaggcacttcctcaagaacaacatccttaaacaatatattattgtctgcacctttataagatgtatattcattcatccattcattggaaacaaaacgaatatcaataatttctttgctttcatgtggctgtaatgttattatattgctttttttcttattttcataattattttgcaatataaagtcattaaatccctctactcttctatattgaaatgtagaatccgcatcttttatagaataaagggtcagactagttgtataaaagttctgttcaaaatcgttttcgttagttatactcatgtctataataactatcttctgcgcaattccctttcttgtattaacttccccatccgcacagatttcattattatcatcaatgttcaatatataatctaacgctgcattatacatattctcatcagtcatatctttcaaggtattaaaattatctgttaacaaactctgatttatcttaaatgtcaacatttttttccgactgccattgctgattgcagtatattcatcgccttgagctattaataacggtttatcatcctgtgtacattgcacatatccttcactgattactttgttttctttagctgatgtctgctgttcataagaagaggattctgattgcatactatatatatcattaacattctttctatcacaagcagctataaacaacatcgataatacgcatacgataattacatattttttcagcattattccactcatattaataacctattgaatccggactccacacacct

SEQ ID NO: 481 - DNA, 1872 bp, Unknown
  gut microbiota DNA sequence
tcaacatattggaattactatttgataatattctaccaccatctaaaaaaggaattgccgcaaatttacaacaattcctttttctttttattatattttaaattttatccaaaacacattatatatctttttagtatgcacaaaacgcacttccactgttaaatctatttataataatctttatttttatcaagaagctctatcattttttcctttacatcttctggttctaacacttccacgttgccaagtcctataagccatcctaataatacatttgatttgaccgcacagaatgtcacaaccactttcttttcctcagctttttcattatgttcattatcagctgattctatatcctgttgacatattgcttcttcttttatatctatccattttccaaactggtctataaaagttcctacaaggctttcaggtattcttaccttgattcttctttcttggtcagtatacattcccattctttttgcaacatatgtatctgcattaaagtgcatgaataactcttttccttgtctatcagtttccattatttcaatattatccaacttatctactctgtagtgacgctccttacgtacaccatctttttcaaatgtatcatatccatatagataatacctgtcatttgcccatatcagtgtccatggattgattgaatattttccttctatattcttccttacaagctgtttatgattatcccatttcatataatcaaatataatctgcttatttttctttattgcctcctgaataatcctgacattctccaatattctgtcattctcggcttttgccacatttacacactgtatacttctatcaagctcttctccatcatatatacttcttaatgttttaagcttttttatcatattatcagctatgcctttttctataaaatttgaagcatatacggcatctgttatcaacttaagttcttctttatcaagaagtctcctatcaatataataccttgccgcctgacctttgcccctatgtatatctatccccatttcttcttcaagctgattcagatatcttgcaatactatctcttccacattcagcagtctcctctgccatataatctttaatatctgacatagataatggatgttctttatccgaatatttcataagcacctgatataatatcaatgcattattttttccttgtttccccattaatttcacatcctttttcatcttttttgtatgttcatcttatgcattaactcccctatattctacttaatatccataataaatttctcaagtttatcatgattattctttgccatttcgctattacggtctgctaatgcaacctggtttttaatatttttaagtgtctttgacaactgtgccatacacctgtcattatctccaccaccactaaatgtaaatactgcatctattttatcagctattccatatttttttataaatgtatttactggcgcggctggcattcctgcccatacaggtgtgcctaatataatttcatcataataatctatattatctggaacaccttttatctgtggttttctgccaaatgttgactgcattccaccaacaagcatctgccttactgtattttgaggcaatggcttaagtagctctatttcaaatattttagcaccaagctttcttgctatttctaccgctgcttcttttgtatttcctgataatgaataataaacaactgctttgctcataactatctcctttgcctgataaatgtaataatattattataaaagaaaagtaaatgtctgcttcgcagccgcattcttttcctttgcgctcattacatcataataacacacaaacagcattgttg

SEQ ID NO: 482 - DNA, 430 bp, Unknown
  gut microbiota DNA sequence
tatcaccgagcattgtacatttctcggcagaatttaaaaaactgttttgggaggaactgtcaaagggcaggcttccacgtgagattgtttcgactcttggaatagatccaaatatactaggggattccaggataaatggtttgaaaaccatgattggaaatgaagtaaaaaagggaaatggctttcgagatcttaacacctatgcacagggctgcaacggatatctttcggctgaaaatcggataaaatatttagaaatgcaactggcatataaaaatcaggagatagagttcctaaaaaaaattgtatctttaaatccggaggctccgaaataatgaaaataccagcccatgcaaagtatcagattatttatgatactttgcaaaaaaacgataatctattgaatgtagctgccatgtgcgaaattgca

SEQ ID NO: 483 - DNA, 466 bp, Unknown
  gut microbiota DNA sequence
gtattgaatccggttgctgtgaatggaccaatccttacaatccgaaagtttccagcggaagcaattacgatggaacagctgatccgtataggcagcgtaactgatgaagccgctaactttttgaaaaagctggtagcagcaaaatataatatttttgtcagtggtggaacaggagcaggaaagacaactttcctgaatgcgttgtcgaactatataccaaaaggagaacgcctgatcacgatcgaggataatgcagagttacagattcaaggagttcagaatctggtgcgcttagaagcacgcggaccgaatgcagaaggagaaggggctgtaaccatcagagatttgattaagtcagcacttcgtatgagaccggatcgaattgttgtaggagaagtaagaggagaagagacggtagatatgatctcttcagcaattatatgtactatataacaattatatatat

SEQ ID NO: 484 - DNA, 1251 bp, Unknown
  gut microbiota DNA sequence
ctcaccctttttctttcatatcaataaactgatacttgataccacgctccttgaaaaaacgctccgccttcttagtatcattacatttcttagtcccaaatatctatatattcataatcagtattcctttactatctcttcatctattccgtacatagccttaaaatgttcgagatctgccggactttttatcagcattacctcttctatcttacctgtatgtatatccttaaagcctgctacctgctcgccattacaaatgcttgctttgattacaggctttttgttttccttatcatatgactgttgagtttttttcttcttaaacagtcccattttgctcaccttccttcgcctgtgccatcagcacaagcttctcaaatgactgtgcaaaacgcttgtcatcttcacttgtccgcttctttgggtctccgcttccgctccggttcgcgcaaagccgatgtccaccggacatcgtgcgccccttaatatgattcttagaagaacctcgtcttgctttcttattaagatgtctttccataagcatccggtcaatattctcatctgtgtacaacttgccggattgatgaattgcatatacacccttgccaaatgccatagccgctacaccataatcctgagatacaacaatatctcccttatgacagatactaatcagcttataatctaccgcatcagctccaacgccaacaacaattacttcactgtaatcggaatataatacatggttcgtgtcacacagcaatgtggctggaatattatatttttcagcaatcgcctgaacaatgtccactacaggacatgcatctgcatctacaaatatctgcatatctttctcaaatccatttacctttaattgtaatttactggagttcttacctcgatgaggtttccacttggatcataaaatctcacaagcttctgtcctccttcaagtttcgtcagtttattaacataattcaaacagaaatcataggattcaagtttcttgatgaaaccttccatatcattttcttcaaagtacagttcggtcatattgttatgagatgttgtaggtatttgggtactgtcataccatacattaacatcctgcaataccagtccctcggacattattacattaccttcctgtttcaaaatgacctgtaatccaaataaatccttatagaatctgacggattcttctatatcatctacgatgatcaaaatgttctttaatctcatgcttat

SEQ ID NO: 485 - DNA, 1140 bp, Unknown
  gut microbiota DNA sequence
aggtcttccttcataaacaccggaatgccgagcttatgtgcctggtccgccagagaccatgcccattccggctccgtatgaatcttcctgctctgagctccggtcatggtgcccacaacgatccaattgattccggaaaggtcaactgtgccgggatcgtcgaataacggctcaaaggtaacatggtaatgttttgctctgacgtttttccgaagggcgtcgatacgccacagttctgctttcctcgtcaccgtaacgccaaaccatgcgttttccagatcggtatcaaaatccattaaatcaggtcgcttggtaaggaacaggaactgatgctgtggattttcacggatctttacaaatacctcgtctctccattccggcttccatccggagagatcgctcatcccagtaagaagaaagttctgtggacgtttcttttccatcatcttgagcttacccggaaagaattcagggtcagcaaagtcatcaatcatatgccagcgtttcacgttgttgcgggcatagcaatatacacaccccactgtacatccgatgacgatattcatgttttgaatctgatctttgatgcaaacactcatgatttctgccactcctcaagattctttctgatacggtcgaggcattcctcaaaccgggtaatttcttcctccgaaaaacctttgtagtaaatactgcccatttcatcagatacagaatcgtattcgtcctttaaggcatatgctttttcagtcagaaacaggagtgttttccttttgtccgtttcagactgaacgcgtcttatcagcccttgattttccattctttccagcatcgtagtaagagaagttaacgctaatccacatttgattgagagtgacctgattgagattccattttcctgccacagtacataaagaatacgcccttgggctccgttaaacgcatcaatattcttttcgctgagaatcttctcaaaaatccggtctccaagttgttttattttggtaacaagaaatccgccatttgttttcatgcaaaagctcctatatagtagtttgtaaaatcatactatataggagctttattgtcaagagcttgtatgtttgaatagaggcaaactggaagttgtttattaaacct

SEQ ID NO: 486 - DNA, 1607 bp, Unknown
  gut microbiota DNA sequence
gccctgtttcaccaccttgatttaattgaagcttctggcattgaacatagtgtgcaggactgcctgtagcttatatttgtcgtccgttcgtcaccaactaatattcgattaaacaacaatatttgtttgaaaggttgctatttataaaaataaaagatagaataaatgtaccaaagaaaggaatttataataaatatggctaacaatggaattgaattagaaagagacggatttaaaagccgtacaggatttattcttgcatgcataggttcagcagtaggaatgggcaatatatggagatttccatatatggtatcagcatggggaggtatgacatttcttattccctatgtaatatttgtagtattaatcagctctacgggtgttattgaagaaatggcactaggtcgtgcaacaaaaggtggtccgataaaagcctttggtgactgtgtgcagatgcgtacaggaaagagcggcaagacaggtaagagaaaagcaggagaagcaataggtgtaataccagtgcttggctcacttgcaatggctatgggttacacagttgttgttggctggatattcaggtatacatatcttgctttgtctggaaagttgtctggaatgggacaggatatgtctgcaataggtggtatgtttgacaacacagcaagtgcatttggtaataacatatggcttataattgccatggtagtaactgttgtgataatggcatttggtgttgccggtggcattgaaaaggctaataaggttatgatgccattactttttataatgtttgtaggacttggaatatatgtgttcacgcttcctggtgctggcgcaggatataagtatatatttacacttaatcctaagggacttcttgatataaagctttggatatatgcttttggacaggcatttttctcactttcaatagcaggaaacggaactgttatatatggttcatatttgagtgataaggaaaatatcgtatcatctgcgagaaacgtagcgctgtttgatacaattgctgcgatattggcagcaatggttatcattccaagtatggcggcaggcggtgctgaattatcttcaggcggtcctggacttatgtttatctaccttgtcaatgtatttaatggtatgccaggtggaaagcttgtaggaatagtattttatatatgcgtgctttttgcaggaatgagttctcttattaatctgtatgaagcacctgttgcaacattacaggaaaagttaaaactcaacagagtggcttcagtaggaattataggggcagcaggatgtttagctgcacttgttattcagggaatagtatcaggctggatggatgcggtatctatctatatctgcccactgggagctatgcttgcagctatcatgttcttctgggtggctgataataagtttgcgcttgatgcagttaacaaaggaactagcaagcctgtaggtaaatggtttattctactaggaaaatatgtacttgttccacttgcatttgtagcacttgttgctggtgcgatacttggtggaatagggtgatattgttgtttagcaaacattcggttggcgaactgacgacataatat

SEQ ID NO: 487 - DNA, 228 bp, Unknown
  gut microbiota DNA sequence
atgcacttgaagtttgattgtgatagttcttagtctttcccttagtcaaccagctagcttcgtacacggatgtacgaagcagcgaagccgcgccatggacggcgcgtctgagcggtagcgtcagttatcatagtttatatggaaagacttagaaatatccaatcaaagcttctggcattgaacatagtgtgcaggactgcctgtagcttatatttgtcgtccgttcgt

SEQ ID NO: 488 - DNA, 77137 bp, Unknown
  gut microbiota DNA sequence
gaagtgtggtgacatatggagctgatctgtactaataggtcgagggcttaaccgaaagaggttaaggtttggatagaacaaagagagttattcttgaaggaaagaatacggatgtaaatatagaatatttaatgtgcagttttgaaaaaataatcatgaaagaggtctagtacctcttttttttgtttttcagactattttgtttgttttgttttttagtttactaagctgcatatggtgtaggaagacaaattttatgaaatgaatttttattgtgagttttcaatcgtgagtttttatacaaatattaattgccataaataacattttttgctataatatagtgaaatagtacgtgtgttatggaggataaaatatatggaaactaatatattaatggaaagtggtactaatgaactggaagtgcttgagtttatggttggtggaaatcattatggaattaatgttgctaagattaaggaaatagttccatatagtaaagtgacgccagtacctaattcacatccttgtgtagaaggtgtttttatgccaagagaccttatgataacaatagtagatcttgccaaggttattaagtgtaaaccatcagaggatataacgaaggatatgtttattataactaacttcaacaagcttaatgttgcatttcatgttgcttctgttgtaggtattcacagagtatcatggacagatatcataaagcctgacagtactataagcagtgctgatagtggtattgctacaggcgtagtaaagatcaatgaccagcttattatcatccttgattttgaaagaatagtttctgatataagtcctgaaacaggactaaaggtttctgatatcgataaactcgaaggaagagcaagaaatgaatcacatatagtaatagctgaggactctccattacttatgaagcttatatcagattcacttattaagtcaggctatgataatttaacattatgtgccaatggacaggaggcatgggaatgtcttgtcaagatgaaagattccgattcaatggatgttgcatgtgttataacagatttagagatgccgcttatggatggccacagacttacaaagcttataaaaactgatgataagcttaaggatataccagttgttatattctcatcacttataaatgatcagatgagagctaaaggtgaagcattaggagctgatattcagttgtcaaaaccagaaattggtttattagttaatgaaatagacaagcttcttagaaaataaaatgtataattatcattttattatatgatgtaacttgtattttacatttatatcaatatatgtcgatgattttgattagttagatggtgttatccctttttataggtaacaccatctatgcttttgttaattcaaataatatagatgaggtagtatatggataataacaaagatttcggcacattggaaaagttatgtgaagatattcttaatgatatggatacatatgatagtatactgttaggttttggaactgagttattgaaatataaaaatgatgggatagatgatgtgttatcttgtctggcaaaatatcttgaacataaaaattattttataatatcatctgttaaagatgatatactaagaaattcagaattaaatcagaaaagaatagtctgcccttatttaggagaaacagataagacaaatgaagataagcaatgggatttatataataagtggttatcaggtacattagcaaaaaaattacttgttgtagaattaggagagggatttaataatcctaatcttattaaatggccatttgagagaatagttatgattaatgaaaaagctcgtttttacagaattcatagtatgttttatcaaataccaccagaaataaaggataagtctgttacatataaatatgatgcctatgaagtattgaaaacactggtaaatatgttcaagcattaaaaacacaaagcattaaaacgctggtaaatattgttaaatagacgactttatgttagtattctatatatattgataaaggtggtggaattgtggctgaaaatgaagaagattaccttgatggtcttttaaaatcaatgtctgaaaaggaaaatgcagagaagcaggcaaaagacgaggaagaggaagagattaaagaacaggttagagaggcggttgaaaagtctaatacgcctaatagcaagtttgaaaatatatacatggatgatccggtagagaatgatggtaagcaggtaagtgatgagcatgtggaaaaggttctgaaagatgtaatgactgttccacgaaagatggcagcaccaggtgttgatgaatcttatatagtagatgatgaacctgatacaacaaaatcggtttcatcagttacgcctgaggaagtggctaagcttgcaagggaaaaagaagagaaggaaaaggttgatgaatcagtcaagagttcaaatgcagataaagcacttgataagctgattgaggaaactcaaaaagatgaagcagctggctctaacttaagtaaagatgatgagcttgttaaggatatggatttatcagatggtgaaaaagacagactggtaaatatgaatcttgatgatttattaaatgatgttaacacagatgctggttctacaaacgaaagcggagtcagtgctgttaacgatttacttgcacagattaatcagggaagtgaccaggctgatgataaggcatctgataacatagcctctgatttagcagcgactggcgcagtggaaggcaataaagctgataacagctcagatattacatctgcgggtgttgatgttaaggagaagcttgaagaagaattaaagtcagttaataagaaaaaaagaaaaaaaggtattttatcagttattaaagatatattctttgaaagtcttgatgatgaaacagaagaagcagctgatactttagaaaagtcaggcagagcagctaagaaagaagccaaaatggcgaaaaaggcagctaaagctgataagaacgataagaataaagcaacggatgaagagcaggtacatgcagctaaaggaaaagatgaaaacgagcttctgatagaagaggtatttcatggtaaggatactcttgatgattcagctgcacctaagaaaggtctgtttgcaaagataaaatatagaatgcagcagttcaaagctaaacaggctaaagaaggtgaggctgaggaacagcaggaagagatagaaagacaggaaaagcaacagcaggttgcagctaaaaaggccaaggcagctgaaaagaagcagaaggcagctgaaaagaaaacagctaaaaaggaagcaactaaaaaagcaaaggctaagaagcctaagaaagaaaagaagccaaagaaacctaaggttaaacagccgcctaaacctggagatataatcagattcaaaccgaaatcaataattttgtttgttatgttaatagttggaatagtagtgcttgtacagatgtttggatatactattaactatagtggaaacattaatcttgctaaagattattatgctaatcaggaatatgacaaggcatataatagtttagatggaataaagctgtctggagatgatgagacgctttataaacaggcaaaggttgttatgtatgttcaaagacagtatgaatcatatgaaaattatgaaaaaatgaatatgcatacagaggcactaaatgctcttgtaaagggagttgacagatatcagacatacagaagtgaggcaaaagaattaggcgttgaggataagatgacagaagtgtataaacttatcattaaggcatttaaggataagtttaaaatgtctgaaacagaagcaatatcattagttgaattgtcaaagttggattttacaagttattattataagattgaagcatatggagaggcaataaaatgatttcagtgatcgattatgacgcaggtaacttaaagagtgttgaaaaggctcttatatcgcttggtgaagaagttgttgtatcaagggattcgagcgaaatattacaggcagataaggttattctaccaggagtgggttcatttggagatgcaatgaataatcttgatcgtttcggacttgtagatacgataaaaaaggttgttgataataagacaccatttcttggtatatgtcttggattgcagcttttgttcaaggaaagtgaagaaacaccaggagcagaaggtcttaatattctgcctggtagaatattaaaaataccagcagctgaaggaataaagattccacatatgggatggaattcactggatgttaagccgggtgcaaaactttttaagggactttcagataatccttatgtttattttgtccattcatattatcttaaagctgatgatgaagcaatcgtggctgcatctacagaatattcaactcatattcatgcttctgtagaaaaggataatgtgtttgcatgccagtttcatccagaaaagagtagtgaaacaggtcttagaatacttaagaattttgcagaattatagattggagagtacacataatgtttactaaaagaataataccttgtcttgattgcaaagatggaagagttgttaagggaactaattttgttgatcttaaggatgcaggagatcctgtagaggttgctgcaatgtatgataaatcaggagcagatgaactggtatttcttgatataacagcatcaagtgatggaagaaatacaacagtagagcttgtaagaaacgtagctgaaaaggtttttataccattcacagtaggcggtggaataaggacagttgaagatttcaaggtgcttttaagagaaggtgcagacaaaatatctgttaattcagcagcaatcatgaatccagaacttatttcccgggctgctgacaagtttggaagccagtgtgttgttgtagcgatagatgctaaaaagcaggaagatgggcattggagtatatataaaaatggtggaagagtagatatgcatatggatgccgttgagtgggctatgaaagctgagagtcttggtgctggtgagatactgcttacaagcatggattgtgatggtacaaaggcaggttatgatatagagcttactaatgcagttgcatcaaatgtgtcaattcctgttatagcatctggtggtgctggtaatatggagcatttttatgatgcatttacaaagggtaatgctgatgcagcccttgcagcctctttattccattataaagagatggaaataaaagaccttaagaaatatttgtctgataagggtattcctatgagattataatatattgtgttacaacacaaaagggataatcattacatcatataatacatgctgcaggaagtatatgaggaaaagaggaacataattatgtctatgataacaggtgactggcaggaagctttaagtgatgagtttagaaaggattattacaagaaattatatacatttgtaaaggatgaatataacagttgtgtggtatatcccccagcagatgatatattcaatgcatttcattttacaccacttaaaagtgtaaaggtgcttatacttggacaggatccatatcatgaggtgaatcaggctcatggtcttagcttttcagttcttccgggtaatcctatacctaagtcattacagaatatatataaagaattacagtctgatattgggtgctattatccaaacaatggtttccttaaaaagtgggctgaccagggagtacttatgttgaatactgtacttacggtaagagcacatgcagcattttcacataagggaagaggctgggagcagtttacagatgcagttatcaacgctgttaatgcacaggacagaccaatagtttatatgttatgggggaattcagcaaaggataaaattcctatgcttacgaatcctaagcatcttatattaacaagtgcacatccaagtccactatcggctaacagaggtttttttggatgcaggcatttcagcaaatgtaacgagtttcttgaaaatcatggagtcacaccaatagactggcagattgaaaatatataaaaatagtaacatatgaaaaaatccgcatcctgtattatttcgtcatgaaataatcaggatgcggatttttttgtatcaatatttgtttatttactcatcaatatcttcttcagatccagcaactgcgccgataactgaaatgataactacaacggcaaatattgaaactgcaacacctataataggtcctaaaaataataaaaagttcatatgcttatcctccgaatattcttttattattatacaacttttttatgataagtcaaaaacttatttgttaatattcttgttagcagtagcaagcataagtttgattctgttgagctggttaacttctgaagcacctgggtcataatcaaccgcaataatattagcctcagggaaagcagcacgtaattcttttataacacctttacctactatatggttaggcagacatgcaaatggctggcagcatactatattgccggcaccattatgtatcagttcaatcatctctccagtaagaagccatccctcgccagtctggtttccaagtgatacaagatcctttgcaagtgcagcagtatcctttatggatgaaggtgcatcaaaacgtttactttctgcaagtgcctggttaccagcttttctgaaccattcaagaatctttatgactgtattattaataaatgcagattttccagatgtaccgaggtatttatgcttaaagttagcattttctgcgcagtagagaagaaatcccataagatcaggaacaactgcctctgcaccttctgattcaagcagatcaacaagatagttgttggctgcaggaagaaacttaacaagaatctcaccaacaacaccaactcttggcttctttatatcaagtaactcaatgttatcaaagtctttaacgatagcacggaggttattgttaaagtctttcatttttaccttgtcctgtgtaatctgtttaatacatatttccttccagtgttcatgtagagcgttaacagagccaggaaccttttcataaggtcttgttctgtatacaacattcatgaatatatcgccatactcaatcgccatcatagcttttttaagcatcttaaggtcatacttaaaaccagagttagtttcaagcccctgtgcactaagagatattacaggtatatatcctaagttggctttctcaagagcacgtctgatgaatccaatgtagttagaggcacggcatccaccaccagtctgtgtaataatgattgctgtttttgaaagatcgtatttacccgaaaggacagcattcataatctggccgacaaccattagggaaggatagcaggcatcattatttacatatttaagccccatatcaactgatgatttgttatcgttatcaagtacctcgaaattatagccacatgaattgagtgctggctctaataagtcaaaatgtataggtgacatctgaggacatagaatagtgtagttctttctcatctcaggtgtgaattcaacacggttgtatgcagatgaaacaagagtgcgtttataattcttcttatcccttactttaagtgcagcgatgagagatcttatacgtatacgtgcagctccaaggttgttaacttcatctatttttaatactgtatatattttacctgatttagttaatatatcatttacagcatctgttgttacggcatcaagtccacagccaaaagagttaagctgtataagatcaaggttgtcctgtgtcttaacaaaacttgctgcagcatataatcttgaatgatacatccactgatccataacgataagaggacgttcaacatttccaagatgtgaaacactgtcttctgttaatacggcaatatcatatgagtttataagttcaggtataccatggttgatttcagggtcaatatgataaggccttcctgcaagaacgataccacgtttaccagtatcctttaaatacttgatgacttcttcaccctttttatgcatgtcctctctggactgcataagttctttccatgcatccaaaacagcagcttttatttcacccgatgggatatcagggaactcttcatgcaatcttttagccaggattgcttcgttttcaaaagaaataaaagggtttctgaaatctatattttcagttttgagttcttcaacattgttcttaatattttcagcataagaagtaacaataggacagttgtagtggttgttagtaccatctatttctttgtgttcatatggaacgcaaggataaaagatgaatttaacacctttctttataagccagcttatatgaccatgagcaagcttagcaggataacattctgattctgatggaatggattctatgcctagctcatatatctttcttgttgactgtggtgaaagaacaaccttataaccaagctttgtaaagaaggtgaaccagaaaggataattttcatacatgttaagtacccttggtatacctacaacacctcttacagccagatcagctgataaaggttcatagtcaaaaagtctgtggaacttataatcaaaaagattaggaaccttttctttattacgttcctttccaagtccacgctcgcatctgttaccagttataaaggaacgtccaccagagaatttgttaatagttaaatgacagctgttagtacatcctttacatcttgtaagagtagtttcgtaagtaagactgtttattttgtcaatagagagcatagatgattctgatataccatcatagcgttctcttgcaataagtgctgcaccaaaagcccccattatgcctgcgatatcaggtcttatggcatcaacacctgttatcttttcaaagcttctaagcacagcatcgttgtagaatgtaccaccctggacaacgatatgtttacctaaatcacctgggtcagctattttaataaccttgtataatgcatttttgatgacagagtaagcaagacctgctgatatatcagatacctcagccccttccttttgtgcctgttttactttagagttcatgaatacagtacatcttgtaccaaggtcaataggatgctttgcaaaaagagcagcctttgcgaaatcctgtacagaatagtttagtgacttggcaaatgtttcgataaatgaaccacagcctgatgaacatgcttcattaagctgtacagaatcaactgtctgattcttgattttaatacatttcatatcctgaccaccaatatctatgatacagtcaacatcaggatcaaaaaatgcagcagcatagaaatgtgatactgtctcaacttctccttcatccagcatgagagctgacttaataagggcttcaccgtaacctgtagagcatgcctgtacgattctggctttaggtggaagctgtgaatatatttcttttattgcctttattgtagtagcaagcggagaaccgttgttgcttgagtagaatgaataaagaagattaccatcttcatctacaagtgctaccttggttgtagtagaaccagcatcaatacccagataacagttaccttcataagaggatatgtccgcagttttaacatgatggacactatgtcttttgataaagtcgttataagcaagctggtctgcaaaaagtggttccatacgttcaacttcaaagtcaagctttatcttaccctgaagacgtttaattatgtcagatacatcaacgcatacgtttttgtcgtagttcatggcagaaccaacagcagcaaaaagatgtgaatgttctggtgcaatagtctgttcaggagtaaggcttaatgtacggatgaatgcctgttttaattctgaaaggaagtgaagagggccgcctaagaaagcaacgttaccccgtataggtttaccacatgcaagacctgaaatagtctggttaacaacggcctggaatatagaggctgctaagtcctgcttagttgcaccttcattgataagaggctgtatatcagacttggcaaatacaccacatcttgcagctataggatagatagatttatagcttttagcatattcattaagacccgctgcatctgtctgtaaaagagtagccatctggtcgataaaagagcctgtaccaccagcacatataccattcatacgctggtcaataccgttagtgaagtagataatctttgcatcctcaccaccaagctctatggcaacatcacattgtggagcgtagtcctgaagtgctgttgatacagcgacaacctcctgagtaaatggaacttcaagatgctttgcaagagtaagtccgcccgaacctgttataacaggatatacttcgaattcaccaagctttgttacagccttttcaagcagaccctgtaaagtttcctggatattggcaaaatgtctttcataatctgaaaataaaatattattattatcatcaagaattgcgatctttactgttgttgaaccaatatcaatacctaatctgtatttattcatattcattacggcagagccgtcctccttgttttagtatatattgatgtaaatgttaaagtattccaaaattacaatgtcgaaaaatgaaaaatcacatcgaataaattacaactgacatattatataagaaataacagaataattcaacaccataaatatgactgtttatataaaattaataatactaaaatgagaacttaattgacaaaggaaattattatttttatactttgtatatgttatatcattaattagtgatgtttttcacggaaatgaggagtttgatgaattggttttctaagtttgaaaggaaatattcaaagtatgcaataaagaatctcatggtctatataattatattgtatgctgttggatttgtatttgaagtgtttgcaccaggtgtttacagtgcatatctttcactcgatttttctaagatatttgctggacaggtatggcgtattgtcacatttataatacagccaccttcaacaagtattatttttgtattcttttcactttatttttattatcttataggtacagtgcttgagaatatatgggggtcattcaagtttaatgtatatttcttttcaggagtattgttaaatattgttgcagcccttataatatatcttatatttggtatcagctttaatatgagtacacattacatcaatcttgctttgtttatggcttttgccatggaacagccggatatggaggtgctgcttttctttatcatccctataaagataaagtggatggcactgcttgatgggattgtatttgcgataactatagtatgtggctttgcggtgccttctatggcagcagctggttcaagtgcaggctatgcaatgtggcagggactatataatgcaggtttgttatcaggaagcggtatgggatgttatgcaaatgctattgcagcacttgtttcaatgcttaactttatagtatttatgattgtgtcaagaaaaattccttataaatcttcaacacaaaagaattttaacaaggctatgtatacagcgaagaaagcagaaaagaacagaacagatgctaagagaacatcatttaatgaaaagctgtataacgccaatagcgagaagacaacatgggatagtgctaataaaccatataagcctgtaagaagcggacagcctaagcatagatgtgctgtgtgtggaagaactgaacttgatgacgaaagcctggtattcagattctgctctaagtgtgcaggaaactatgagtattgtaatgaacatttgtatacacatattcatattacagctaatgacaataagaatatgcgatagttaaattatttataaatatcgttatggctattgctatttttggggttattaagtataatcatttggattgttttgttttttattaattatttttatttattttggaggttagaatgaagaagactaagattatatgtactatgggtcctaacactaatgacagagagcttattaagcagcttgcattaaatggtatggatattgcaagattcaacttttctcatggagatcatgaagaacaggctggacgttttgcattagttaagagtgtaagggaagagattaacaagcctatagctacacttcttgatacaaagggaccagaaatcagaactggcgtacttaaggatgataagaaggttactcttaaggaaggacagaagtttactcttacaacaagagaggttgtaggtgatgaaaatattgacatgattacatatgcaggacttccagcagatgtagagaatggtaatactattcttattgatgatggtcttattgaacttagagtagaagaagttgttgatggtacagatattatatgtactgtaattaatggtggtgagcttggttctaagaagggcgttaatgttcctaacgtaagcattaagcttccaggtatcacagacaaagataaggatgatattatatttggtatagagcagggatttgattttatcgcagcttcatttgtaagaaatgcagcttgtatccaggagattaagcagcttttatgggagcatggttcagatattcctgttatcgctaagattgagaatgctgaaggtatagagaatcttgacgagattattaaggttgctgatggtatcatggtcgcaagaggtgacatgggtgttgagattccagcagaagatgttccacactaccagaaggaaatcatcaagaagtgtaacgcaacatacaagccagttataacagctacacagatgcttgattctatgattagaaatccacgtcctacaagagctgaggttactgatgttgctaatgctatatatgatggtacagatgtagttatgctttcaggagagactgctaatggtaagtatccacttgaagccttaaagatgatggctaagattgcagaaagaacagaaaaggatatcaagggcagagcttctgatatatctaaggttcatagcaagagaagcatatcaagtgcagtatgtaacgctactgtccagacagcagagaatcttaatgctaaggctattgtatgcccaactatttctggttttacagcaagacttacatctaagcttaagccaaacgctgagattatcggttgttcaccatatgataacgttcttagaaaaatgcagatatattggggagtaagacctttaaagactgcaacagaggtttctactgataagattattgagcatgcattagtagtatctgagcaggctggttttgtagaagaaggcgatacagttattgtgtctgctggtattgctacatcatcagatccttctgctaagagaggacttactaatactatgagagttgttactatctagtatatatgaattattatagttaatatagatgccagggttgaatcatcgttatttagctctggcattaatttgtttatgtttataggtgtgtaaagcataggtttgtaagtggatacggggttatacatatagggagtaaggatatggatataaagaagatactgatatggattcctgctattatcatggcaatgcttatattcggcttttcaaagcaggatggtgaagaatctacgggacttagttataaggcagcagatataatacttacagtatgtgataaggctgggatagttgattataatgataacaacagggatagcatgatagagtctgtacagtttccaataaggaaagcagctcacatgacagagtatgctgtactttcagttcttatcatgcttgcacttatagttgacggcttaaaaggtaccagacttccagtgatatcagcgattatagcaacagtatttgcagctacagatgagttccatcaaaggtttgtgccagggagatatggctgcttaagggatgtgcttatagatgctgcagggagtataatcggacttatgatagcatatgttatatataaaaatatgtgtaaacataaagaaaacaaatatatgcaatcaaaggaagcttaatgtagctgaaaatatgtgagtaatatataagcaatatatgagtaatatatgtgagttgtaaaattaatacttgcaaaattactaagtatatggtataagctttaataagcacataattatatataatgcattgatggaaacaagtaggtataacattaagcaacagaaaacagccggttgatgagaggcgtggtggatggttattctgaatacattctggagcagcaaactgaaaagcatgtaatgtttagtaggggcgacgtagtgatacacgttatagtatcaggatcatcagacccattaaggtaggcagcgtgagttgtttatgaataaaggtggtaacacggagcataggctttcgtcctttaacacggatgaaagatatgctcctttttgttgtcttaaagcactaatggcttgatggttaatggtagtatcataaatatcaaataataaacataataagaacaggagaaaagaaatggcagaaatgacagtttatgatgaattagttgcaagaggacttattgcacaggtgacagatgaagagttgatcaagaatcttattaataatggaaaggctacattctacattggatttgacccaacagcagacagccttcatgtaggtcacttcatggcactctgttttatgaagagacttcagatggcaggtaataagccaatagccttagttggtggtggaacaggtatgattggtgacccatcaggcaagacagatatgagaaagatgcttactccagaacagattgagcataactgcgagtgctttaagaagcagatgagcaagtttattgacttttcagatgacaaggcattgtttgtaaacaatgcagactggcttttaaagcttaactatgttgaccttttaagagaagtaggtgcttgcttctcagttaacaatatgttaagagcagagtgctataagcagagaatggaaagaggtcttacattccttgagtttaactatatgatcatgcagagctatgatttctatatgttataccagaaatatggatgtaatcttcagtttggtggagatgaccagtggagcaacatgctcggtggtacagagcttataagaagaaagcttggcaaggatgcttctgctatgactattacacttcttcttaactcagagggtaagaagatgggcaagacagtaagcggtgctgtatggcttgatccagcaaagacttcaccatatgagttctatcagtactggagaaatgtagcagatgcagatgtattaaagtgtatccgtatgcttacattcttaccacttgagcagattgatgagatggataagtgggaaggtgcacagcttaataaggctaaggaaatacttgcatatgagcttacaaagatggttcatggtgaggaagaagctaagaaggcagaagaaacagctaaggctatatttacatcaggtgatgctgctaatatggcagtagttaagcttgaagcagatgcatttacagatggcagcattgacattgtatccttaattcatgcagctggtcttgcagctactaagtcagaggcaagaagagttgttgcacagggtggtgcttctgttgcaggtgagaaagtatctgatatcgctgcaaagtttgataaggaagtttttgccggtgatggtgttgttgttaagaagggtaagaagtctttcataaaggtacaagcgtaagaatagtatgttatttttggaggcagccagtgaaaacttagctgcttcctgatattaaaagaacgaggataggcatgaaaaaaagtgaaattacctttataaggcttatgagtcttattggaattatggttctgaatcttatacttttgctggtatttgcaagagaacatgtatttcagaatatccttaataaaatgaatagtaatgtatatgctggacaatcacttgatacatcaatatataattattattactatgcaggacttgggaatatatataaaataatattcccagtcacaattcttttgttggcagctgcatctgtagctgtgtataaaaaagtaagtatggcaggaaggattgcagtagcggctaatatatgttcacttataaccggcatatatcttttgattgcaaagataggtgaaggctcagataaaatcatcagatttgtgaacagcttttacatggataagtcagagattggccagatagaaaagatacatcttatgagcagaatacctatagcgtatattctgattattattctttctttgcttgggcttgcaatggtaaagagcagtacaattaatcatattaagatatataatgaaaaaaatatgactaacaatgcggttatatatatatttcctgcacttagcgggtttattgtccttgagattataagaaatcttgtaatatcaaggcttgtgactgcatcaatggatgaaaatttaagaacagtggcagcgtatattaatgattattatataggaagcaaattcttcttttcctggtcatggcttatattgtttactatagttacatgtgttgcgattttgctaaagtctataaatacattaagcatgaaaagcaggatgatgattgaaatagcggtgccatcagttatagttataatagcttcattcatatactggatgaatccaccggcgttgtttggatatcttacgattgataatacaatatgtgatatgacagaggcagcatttacgtggtacctgataagatatgttgtatcagtgatttttgtatttgtacttatcgttcttactgttaatgacagacttgatataagagtggcaggtatagttatccttatgtcatgtgcagctggaataataatgattactctgttttataagataaaaggaacgttttctattatgtatgctgcgtgtgtcgtggcagatattgtaagtgtcatagtattggctgctatgtccagggttaaagggcataagctataggatgactaaatcaggagttaagtataatatgtaaaatgttattgcgtattatacttaactcctgatttttaagatgctgtattagccagatataagtctgatacctgatatatctgcaatggctataagtgaatagttcgtatagtaaacaacaaagcctggtttagcgccggcaggttttttaacctctttttttaatacatagtcaacttctaccttttcaaggtcacgtccctttgaatagtatgcagcaagggcagcagcttcttcaaaggtcttatctggcaattcttttccttctgttttgactataacatgggaacctggcatctgctttgcatgaaaccaccagtcaccaccagtggcgaatttgaaggtgagttcatcattctggatattattttttccaacatatatgtcaaagccatctgaggatacataatgcataggtttgttgtgtgtatttcctttgctttttgactttccacttcttttgatataaccagttactgcaagttcatccttgatgttattaaggtcgttttcagttgttgctatgtctatagcatttatgattgattcaagatacatgatttcatctttaatctcagcaataagtcgtgttccggcttcgtaagtccttttcagcttattatattttgcaaagtacttattagcgttttcaataggtgtcaatgtttcatcaagaggaatggttatttcttcattggtgtagtagttaagtgcattaaactgttttgcaccaggtgttatgccatatccgtaggtgtttataagttcaccatatatgcggaatttatcacgtttttcagtatctttgagctgcttttcctgtatgtcaagttttttgtaagagcgctcaagatgagtagtaactatacgtcttatatctgttgatttctgatgtatacgtgtgcggacatccttttcatgataatatgcaataagacatttgcttattgaatcaaaaggagtattgttatcatacatagtaagtctgacagccgcgaaatcagcaggatttccgttgtcatatacaatgttaggtgcataatggccttctttaacatcattcataatattgtcaaatgcattgtaaatacgttggctttcatcaatatcaagacaatttgcaggtttactgctgtctatatgagcccggaagcatatttcttctgcaatagatgtacttatacctgtatatgtctgacataatgcttttgaaagaggtttaggacagatgagtactgatgtactaaaacgttcgtaatcggtatccataggattatgcttgccagcagtatttggtatgaaataagtccttccaggaagtacttcacgaacagaactcatctgtgcagatacatgcttgatactgtcaagaatattgtttttatcatcacataatatgatgttactgtgcttgcccatgaattctgtgatgagatgacgtctgcaaagatcgcctaattcatccagatgttcaatctcaatgtctattattctttcaaaagagggctgtgttatggagattattcttccgttatttatatgctttcttagaagcataacaaaattcggtgcagttgcaggactaggcttgttgtcatctgttatatatgcaagcggcagtgatgcatttgaagataaaactaccctgaactgtccttggcctgtctttattgtaagaagaagttcatcactttcaggctgtgctattttgtaaagtctgcctccgagtattgtgttgtttaagtcatgtactatattggatatagtgattccgtcaaatgccataattgctccgtttctatgatttataaatcaatataatgatattgtttgttttactgttgttgatcatatgcttataataccatgtttataggaagctgtcgagtttgatatataggcatacaacaggggtgatatataagcatactgcagatccggttgtttttatgatgtctgaaaaatgattgggaaatgtaaaatacatgataaggttacttgtttagaatatgtaaaattggtataataagctataaaacataagtgagggaatcataatgataaaaagcatgactggttttggcagaagtgagattgccagtggtaaccgtaaaataatggttgagatgaagtctgtgaatcacagatttttagaagcaagtataaagatgcctaagaagctgaatgtgtttgaggcaagaataagggatgttataaaaaaatatgcttcgagaggtaagattgatgtatttataacttatgacgacagttcagaaaacaatgtcaatattaagtataatgcagcagttgctaaagaatatatggatatattcaggcagatggaggaagagtttgctatcaggaatgatatcacagtgggagcactctcaagatatccagaggttataactatggaggaagccaaagaagatgaagaagaactttggaatttcatacaggatgcggttaaagaagcctgtgagggatttgttaaaacaagaataacagagggtgagaatttaaagaatgatcttttacataagcttgatcacatggaagagctggttggctttatagaagaaagaagtcctcagatagtaagtgaatacagaaagaagcttgaaacaaagatggcagaggtgctggctgatacaagtatagatgaaaacaggatcgcagctgaggttatattgtatgcagataagatatgcgttgacgaggaaacagtaagattaagaagtcatattgcacatgcaagacaatgcctgtcagaggatggtggaataggacgaaagttagactttatagcacaggagatgaacagggaggctaatacaacactgtctaaggccaatgacatagagatatctaatgcagctattgatcttaaaacagagattgaaaaagtcagggaacagatacagaatattgagtagttactatttagtaaatattattaataaaaatattttaaaatacttgcatgaaatgaaagatttctgtataataacttgtacacttttgcgtaagtgtatatatttatatttggttcaggcatgtatgtgcgttgaagcaatatattgattggcttataaagtggatcacagataggagattagagatgaaagataaaggattactgcttgtgatatcaggattctcaggtgctggtaaaggaacagttgttaagagacttttagaacagcataacgattatgctttatcgatttcagcaacgacaagatcgccaagagagggcgagcaggacggaagagagtacttctttaaatcaaaagaagagtttgaaaagatgatagaagcatctgaacttatagaatatgcaaggtatgtggacaattattatggaacacctaaggcatatgtagaagaacagcttaaagaaggaaagaatgttatacttgagatagagatacagggggcgcttaacataaagagcatgttcccggatgcagtacttttattcattatgccacctagtgcaaaggaacttgaaagaaggcttgtgggtcgtggaacagaagatgaagctactatcagggcaagactttcaagagcaagtgaagaggcacagggggtagagaattataactatatagttatcaatgatgatgttgatgcctgtgttgaaactatagattctatagttaagagtgagaagagaaaggcagctaataacatcaatttaattaataatataaaagaagagcttaaggcttattcgaaaggagaataataatgatacatccatcatattcagaattaatggcagttgttaacagtgaggtagaagagggcgagcagccattagtacagagccgttactcaatagtaaaggctacagcagccagagctaaagaaataattgatgcaagatctatagaagagaaggtcagaaaagcacgtattgaagctgaaaatgctcctaaggaaaaggataaggatggcaaaaagggtgagccaaagccacttttaacaccagaagaagcaagaaagcttcagattggtacaccacttatcgataatgcagataatatgaagccactttcaatcgctgtagaagagctttacgaaggtaaggtaaagattgttggtaatggtgatgacagtgaggttatgtaagagtattgcataatacttatggctgtaatatcagataagaaatttaatattgtgacttgtagctgctcgaaagggcagctataattgtatataagttatataaagcttgtggagtaatttcaggcagattacagaaaagcaatgtcaggaaggaaaatagatatggctaattcatatgacgagaagaaacgtgtaataaattgtgaaagtgcagaaagatgcggaagctgtgcttatgccggtatgaagtatgataacgaactgaaggtgaagcagaattatatagataagctgtttaaagaagtatgtcctgtagatgagataacaggtatgtacagaccggtatattaccgcaataaggtgcatgcggttgtaggcgaggataagaatggaaatatcataacaggaacatatgaacagaacagccatgttatagttcccgtgtcagaatgtcttttggaggatagccagtgcagcaggataatagctacattaagagaactttttaagtcgtttaagtataagccatacaatgaggataagggtactgggtttataagacatatacttttaagaaaaggtttttcgacaaaggagattatgcttgtacttgtcacaagtgaggttgcatttccatctaaaacacattttctaaaggcacttaaggaaaaacatccagagattaatacaatcgtccagaatgtaaattcgtacaatacaagtatggtgcttggcccaagaaatattgtacttacaggtaaaggctacatagaggatgtgttatgtggttacagattcagaatcagtccatcatccttttatcagattaaccatcagcagacagaaaagctttataaggctgcaataaacatggcagagatcactaaaaaggacacagtcatagatgcctactgcggtataggaactataggaatagctgcatctggaaaggctggacatgttataggtgtggagctaaataaagatgcagtcaaggatgcagaagaaaatgctaagataaataatattaagaatataaggtttgtcaatgctgatgcgggcgaattcttggtagaatatgctgcaaagaaaaaggctgatgttgttataatggatccgccaagaagtggcagcagtgaggagttccttaatgctattcttaagataaagccagacagggttgtgtatgtttcgtgcaatccagatacacaaagaagagatgttgaggtgcttttaaaaggtggctataaggttaagggatgtaagccttttgatatgtttccttttacggataatacagaaaatgtgatagctttggtcagataaaaaatcctataagaaatcacaggagatatggtattttacttaagcttttatcattatatgacgatatacaaattgctaggagggcactttatttcaacggattgattcgaaataaagtgcctttttgcatatttattactaaataactgcttggaccgctataggaaagcagtgcggttgtgaatgacagagtgaccgcagaaaggataaggatgaaagtagacacaggatatgcatataactattatatgggcggtaaggctgctgcgaacacagcagctaataagacttttgacaaaaacatggcaaaggctggcaatatgccggtgataacttttgatgaagatggagcagaagagaatgttgctgcagataagtcaaaggaagcttcttcaacaaacataagggatatgagcaataaggaatgggataaactcatagaacatgttgacaaatttattgatgaattcaaagaggctgtcgagtatgaaaatgaagtaagcaaggaaaacaaagaaaagcttgaagaaactgctaaggatattatagaaaccttaaatgataacgaaatgacacgtaaagagcttactaaagaacaggaacttgcattaacaggaagcacaagtacaggtgtaagcagtacggatggagtaacagaatgtgcttctgccgaggatattggcgatgctaagacgacatggacagttacagtgtttacagaggatggcataacatgtacacagtttaaggatggcgtaaaaacagagctttggagaatgagttataaacataagggtgattatgaaaagattacagattttctaaacagctttgacaaaaattctgatttaaagtttgcaagctctaaaagcttctgggaagattttcttgatggcaaaataagcgatgaagaactaagaaagctatattagagcggttgtgttacgaaagaatataaaacacaacgaaatataatatatatgagaagcataatataataaaaataaatggatgataacgggtttttctgacggattcgttttcatccatttttgtattatttatgataatttgctcgtgattgccaggtaaacctaaaaagtatcaacagataatcgcctattgacatagtaggcgaataggtatattattttgttacgctttattgagaataatttacattatatctgttcagtttaatattaaggaatgtatataattattagtcttaagtaaaagttactatatgtagtagaaaggaatatttagttatggttatttcttctaaaggcaggtatgccttgagagttatggtatatctggcagttaatcacagcgatgattatattcctcttaaagaaatatcacagaaggaggatttgtcgcagaagtatcttgaaacaatcaccagaatgttatctaaagctcatcttatagaagcagcaagtggacatggtggtggctacaggcttacaaggaatccttcagagtattcgataagtgaaatacttaatcttactgaggggtcgcttgcaccagttgcatgtcttaaggatgaacagaatacatgtgaacgttcaagtgcatgttacacacttcctatatgggaaggacttgctaagctgattaatgattattttgacaatatgacacttgaagatgtagcaaaggctgccatcagggaacaaaatgatgttacagaggctgtaagcaaataattagcaggttgtaaatattataagtaaaacatgaatggttaaaataagaaaggaaactatattatgtcagacaagaatttattaaatataaaagatttatatgtagatgtagaggataaggagattcttcatggagttaatctttctgttggaaagggagaaacccatgtacttatgggtcctaacggaacaggtaaatcaacacttgggtatgcaattatgggtaatccaagatatacagtaaaaaaaggtgagatatggtttgatggaaagaatataactaacgaagctgttaatgaacgttctaaagatggaatattcttatctttccagaatcctcttgaggttccaggcgtaactttaagttcatttataagaaatgcacttgaattaaagactggtaagagaacacgttttatggaatttaagaaagaacttgaaaagactatggagcttcttaatatggataagtcttatgcagaaagagaccttaatgttggtttctcaggtggtgagaagaagaaggctgaaatattacagcttcttatgttaaagccatcgcttgcaattcttgatgaaacagactcaggacttgatgtagatgctgtaagaacagtttcagcgggtatcgaggaataccagaagagatgtgacggaagtcttcttatcatcacacacagtactaagattcttgaatctttatcggttgattatacacacgttatgatagaaggtaagataattaacacaggcgatgcttcattagttgacaagattaacacagaaggtttcgcagagtacgaaaactaatacgcagcgcgtgcagttgtagttgtttaactgcagatggatatatatgaaatgttaaagaaaaagagaggagttccttaaaactatgaaagagaaaacatatgttcaggacatagaaaggaatatatatgatttcaaggatgaggaaaaggatgcataccgaatcaatgcaggtcttacaccagagatagttgaaaagctttcaaaggaaaagaatgatccagcatggatgcagaatttccgtcttgaatctttacagatatataacaatatgaaggtgccagactggggtccatcaatagaaggccttaatatggataacattgttacgtatgtaagacctaatacggatatgaagacaaaatggtcagatgtacctgatgatataaagaatacatttgaaagacttggtattccacaggctgaaagaaagtcacttgccggtgtcggggcacagtatgactcagagcttgtataccacaatgtaagggaagatgttgcaaagcttggtgttgtatacacagatatggaaagtgcacttaagggtgaatatgcagatatggtaagaacacattttatgaagcttgttaagccagctgaccataaatttgcagcactccatggtgctgtgtggtcaggcggttcgtttgtatatgttccaaagggagtatcagttgaaattccacttcagtcatatttcagacttaatgcaccaggtgctggccagtttgagcacacgcttattatagtagatgagggtgccaatcttcactttattgaaggctgttcagcacctaagtataatgttgccaatctgcatgcaggatgtgttgaattgtttgtaggcagaaatgcaaagcttagatattcaactatagagaactggtctaagaatatgtataaccttaacactaagagagctgttgtagaagaaggtggaacaatagagtgggtatctggttcatttggttcacatgtttcttatctttatcctatgagtattcttaagggagaaggctcaagaatggaattcacaggaataacatttgcaggtaaggggcagaatcttgatacgggtgcaaaggtggttcatgcggctaagaacacaagttcttatatcaatacaaaatctatatcaaaggatggcggtataagtaccttcagatcatcggtagttgtaaacaagcaggcagaaaatgctaaagcagcagtttcatgtcagtcacttatgcttgattcgatatcacgttcagatactataccagctatggatatcagaacaagaaaagcaaatgtaggtcatgaggcacagataggaagtataagtgatgaggctgtattctacctaatgtcacgtggtatgacagaggaggatgcaagggcatgtatcgtaagtggctttgctgataatgtatctaaggaacttcctcttgagtatgctattgagatgaacaatcttataaggcttgagatgaaagggagtatcggttaattgatatataaatatgtgtgatattcggatatacacaggaatggagagtaagatgagtaatgttagtgaattaaagataaatgcgcttccatctaagacatggtactggcttaatctgaatgatacaagggtggcatgggatagtaagactgttccatgtaatattgaaacagatggatatgctgatgcattttatgatgcacagagtaatgattatgcagatatcagtgcagcagtaaaaacaggcgctacagatgccgctgatgttttatttgcagatgaaaatatcacatctttagtgataaatgcagataagaaagcggataataaagtgatatatcttaatatagatgattctgttgctgtagaaaacaaagtgaatcaggcaggaaagcttgttgttaatgtagaggataatgtaacatttacaataatagaaacatttacaggctcagaggaagtggctggtaatacagcattcagaactcttatagatgctggaaaaaacagtcatgtaaagcttgtacaggtgttcttacagccaaaggagcaggatgtgctttgcgatgttggaagcaggtgtgcagatgaagcaggttttaagcttgtacagctgtttcttggagaaggcagtctttatgatggcataagaacagatcttaatggaaataagtcggattttatgtgtgatataggatattttggcgttgctaaacagaatattgacataaatcttatagttaaccacattggtaagaagacaaactgcgggataagcgttgatggagcactaaaggatgctgctaaaaaggtatttaagggaactattgactttaagaatggttcgtctggttctacaggtgctgaaactgaaaatgtgttattgctgggtgaagatgttgtaaataagactattcctgttattctttgcgcagaggaggatgtcaatggctcacatggtgcaactattggtgagcttgatccacaaaccttattctattttgcagcaagaggtatagattcagaggcggcagaagatattatgactaagggaagactggaagtcgtagcaagaaagatagaagatgaaaaaactgagaagcttgctaatgaacagctttgcaaggtgcttggtgaaaatgccgtccaaagattatagaatggagataaatatgagtcgcaattacagggatgattttccacttataaaaaataatgacagaatatatatagataatgctgctacgtcacagaaacctgaatgcgtgattaaagcagaagctgagttttacgaaaaaaataatgctaatccattaagaggcttttatcctcttagtatagctgcaacaaaagaatatgaagatgcaagagaaactgtaagggagtttattaatgcaggttctacaaaggagataatatttacaagaaatacaacggaaggtattaatcttgttgcatatagttacgctctaaataaccttaaagccggagatgagatagcagtttctattatggagcatcatagcaatatgcttccatggcagatggcagcgagaatgacaggagcaaagcttgtgtatcttgaatgtgaaaaagatggaacactttcagatgaaacattggcagcaggtattaatgagcatactaaaatagtagcggttggtcatgtgtcaaatgtacttggctgtgttaatcctgtaaaaaaaatcgcagctatggcgcatacagcaggtgctattatggttgttgatgcagcacagagtgcacctcatatgaagattgatgttaaggatatggatgcggattttcttgcattttcaggtcataagcttatgggacctatgggaataggtgttctttatggaaagcaggagcttttagagaagatggaaccttttatgactggtggagaaatgatagattctgttacaagagaaggcgctgtgtatgcacaacttccacataagtttgaagctggtacagtaaatgcagcaggtgcagctggacttgctgcagcaatcaggtatattaatgaagttggctttgattatattgaagaaagagaaaaaacacttacgcgtatagctatggaaggacttaaagaatatgaacatattcatgttattggttctgagaatcctgataaccatacaggtatagtagcatttactatagataatgtgcatcctcatgatgtcagtgaaatattatcttcggatggaatagatgtaagggcaggacatcattgcgcacagccgcttcttacacatttgaaggtatataatgctacaagagcaagctttatgttctacaatacagaggatgaagtacgtgcatttgttaagagtgctattaatgtaagaaggagaatgggttatgatgaatagaggcttttataacgagattctgacagagcataatataagaccagagttcaagcatgatcttccagatgctaatatagtactggaaggagttaatcctaactgtggtgatgatatatggcttaagttaaaagtggagaatggcataatagaggatggagcctttgtgggagatggatgtgctatatcgcaggcttcagcagacattatgcttggcatgattataggaaagagcaaggatgaagcattaaagcttggaaatctttttcttaagatgataaagggagaggcaactgatgaagagatagatgagcttgatgaagcatcagcacttaaagatatatcgcatatgcctgcaagagtaaaatgtgctgttcttggatggcatacccttgatgaagcattaaaaaaggctatggatgattacaagtaaatatttataaaagctgtttgaaactgaaaatgtttataaaaaaatacatgctaaactattgccaaaaatatacccgggggggggtaaaatgtttagagcaataaagttagcattaagtgttatatccactggatttacttggagaatgtgatgcatacaaatgagggggattaatttactttgtgatgacttttattgtaaaaacaatagaagagaggtactataagaatgagaaagttttttactaaaaagcttgcattaactgttacagttgcttcattactagctgttcaggtatcaggagttgcagcagcaacattttctgattatgtgaacaattatgtaactgcaagtgattctacacaaactgatgtaacaacaccatctgatttaacaggatcagactcaacaagttcagatgtaacaacaccatcagattcaacaggttcagatgtaaaaccagaaaagccaggtaaggatgatactgataagggtaatacagaaaatgtaacaacaccatcagactcaacaaattctgatactacaggtggtaataatgcaggtacaccagcttcaacaggctcagatgtaattggaaatcttccacagggagatcattcacttccaggtacagttgcaaaagacgaaatagtaaagtctgatgttgttaatgatgtacttaacaatgaagttacttcatcaacagagactaaggtagatattgtaagtgatgcagcacctacactttcagctgatttattctcagcagtaaaggctaacaacaaagatatcacagttggagttgttaattcacaggattatcttttatattcatggacatttaaggcagcaacacttaataacacagataagaatgttgatcttacattaaatgtttctgatactaagaatgatgatatagtagcattaacaggtgcagatgaattagtatatcttaactttgcatatcatggagaacttcctggaacagctacattacatacttatgtaggcaagtggttccagaatggggatgtagtatatctctattactataacgaagaacttaatagagttgaggtagttggagataacgaggggttaaaggttgttgatggatatgttgattttgatataaatcactgctcaacatacttcctttcaggccatacagcagatgaagtaaaggctgttaaccctgcaacaggagaacttgctggaacacctataaaaacaggtgatcatgcaaacgtaatgttatatgtattattatctttagcagcagtttcagctatgggattagttgttgtatttggtaagaagagagcaaactaaaaattcaaatatcacaatatttaataataaaaccagtgttatattgtctatagcactggttttttgtataatatatacataagaataaggagatggatggaggaagtatggaaataactgataaaattaattatgttctgggaaaaacagtagtgtatatgttgttgataatatatccgtttgttatgcataacaagttaaatgatgttacgttaacaaggtttttcttctttattattgtttcatatgtaggttttttggttctatgtattaattcactggtaagttttatattaaaaagagttagcgataagaaaaaatatgatgatgacaatgttgatattattaatattcaggaaggtgcgtatagtgctgaaagtcagagcataagtaaagtgtatgatataaaagataagataaaaaatatggatttatggaaaaaattaatatttttatttctttttgtatgtattatgtcatatttgttttctccatataaaagtgttgcatttctaggacacggaggaagatatacgggacttgttttttatggtgcatgtgtttgtatgtattatgttgtttcaacatgttacagatttgaaaaaagagatattacatacgtattatgttctacaatattggttaatgtgtgggcagtgcttaattacgcgggcatggatccattctacatatacaaggatgttccagctgccataaaaacggtgtacatatcttcgcttggtaatatagatatatatggaatgtatgttaatatgatgcttgcacttgccatgttttcgtttgtatatgaggaaagtacagcaggtaagcttttttatggtatttgtgcactgctaggaatgatgggttcattggcatcagacagcgatatggcagttgcaggcatgttttttgcatttgtgattcttatatattttgcaatatcagattataacagattaataaggtattttatgctcgctgtagaattgtttattgcaggacgtatacttggggttatatatatatttaatcggtttaatacgaggattataaaaagtgttggcagtattattgtttacaagaatgtatttgtagtgtttccagttgtctgtttcatagctatatttattatccagctgcttcacgacaaatctgatttgttcgccaataaaaaactgattgataaaataaaaaaaatatatgtaatcatatgtgttgtatttgcagcagctgcatgtctgatggttattatatgtacagctgtacagagaggtccgcttgctattactgatgactggggctcaggacgtggatacatatggaaaaactcgctggatggatttaaaaaccttccattcataaataaaatattcggtgcaggagaggcttctacagcatgggttttaagtgattattctgctgctgccaacaacatatttaacagaggaagagtagacaatgctcacaatatatggattaatatgcttataacacttggtattgccggtcttatagtatatgttttacttcttgtagcagcaatcagcaatataaagaggcaccttaaaggttcaagtgaagcctgccatatgaacaaatcaagatatatgcttgcaggtgcaggtcttgctgttatggtatattcaatccagggaacggctgaaatgctggaggttattacatttccaatatttttctgtctgttagcaatgctgaattgcagcacgaaaaataaaaacacagaaaaataggaattaaataaaaaagaaacagatatataaatatctggcagattagtattttgtaaggagagtgtaaggatattatggcaaaatatattatggctttagatcaggggacaacaagttcaagatgtattctttttgataaggctggaaacatatgcagtatggcacagaaagagtttgaacagatatatccaagaccagggtgggttgaacataatcctatggaaatatggtcttcacagtacgcagttatatctgaagctatggcattacttggtgctaaagcaaaggatatagctggaattggaataactaatcagagagaaacaacaatcgtatgggataaagaaacaggagaacctgtatataatgctatagtatggcagtgcagaagaacagcaaaggatgtaaaagcacttataagagatggttatggtgaagtcataaaggcaaagacgggacttgttccagatgcgtactttagcgctactaagatagcctggattctgaataatgtagaaggtgcaaggaaaagagcagaagaaggaaaactgctttttggtacggttgacacatggcttatatggaagcttacaggtggagccatacatgtaacagattataccaatgcatcaagaacaatgctttttgatatacataagctatgctgggataaagagcttattaataagcttaatatacctgaatcaatgcttcctgaggtaaaaccatcgagctgtatatatggatatacagacagttcagtcatagcaggcagtatacctatagctggtgcagctggtgaccagcaggcagcactttttggacagtgctgttttgatgctggtgaagtaaagaatacatatggaactggctgctttcttcttatgaatactggaaaggaaccggttatatcagaacacggacttataacaactattgcagctagtaccaacgactgtgtaaagtacgcacttgaaggcagtgtgtttacaggtggagctgttatacagtggcttagggatgaaatgcgtatgattaagaattcttcgcaatcggagaattatgcaagaatggttgaggatactaatggcgtatatatagttccggcattctcaggattaggtgcaccatactggaatccatatgcgagaggcacaatagtaggagttacaaggggagcaggcaaggaacattttattagagcatcattagaatctatagcttaccagacatatgatgtacttaaagctatggaaagcgataccggacatgttgtaagtgaattaaaggttgatggaggtgcaagtgctaacgattttcttatggaatttcagtcagatatactggatgcatctatcagaagaccaagatgcatagaaacaacagcacttggagctgcttatcttgcggggttatcagttggcttttttaagaatgaagatgagataaaagataactggcagcttgatactacatttgaaagcagcatatcacctgctaaaagagacagccttcttatgggttggagaagagctgttaaatgcgctattaattatacagaagaataaaaatatattttgcgatatttatgatattggaggaaacttgattggataataatgtagggaaggcagctaaagttatagaacaggttaataaagttatacttggaaaagacaggaaggtcaaggagattatgacagcatttcttgctggtggacatatacttcttgaggatataccaggagtcggtaaaacaactctagcaactgcattttcaaaagctatgaagctggactgtaaaagagttcagttcacacctgatgttatgccatcagatcttactggatattctgtatacagaagtgatcttggacagttcgtatatcagccaggcagtgtattttgtaacctgctgcttgctgatgagataaacagaacatcacccaaaacacagtcagccctccttgaggtcatggaggaaagaaaggtatcagttgagggaataacaagagatgttcctgatccttttatagtaatagcaacgcagaatccatatggcaatgcaggtacgcagagtcttccagaggcacagatggacaggtttatgataacgatgtctataggatatcctgattttgaaagtgagatggatatggcaatgtcaattggaaaaacaggacggacagatatggtggagccggttataacagcagaagatgttaaggaaatgcaggaagagatatatgatgtatatatgaataaaagcatatataagtacataattgaacttgttacagcaaccagggaatcagaatatatagaaagaggtgcaagcccaagagcaacaattgcactcgtaaaaatgtcaaaggcttgggcatggcttaatggaagagattatgttattccttctgatgtaggtacacagtttgagtatgtgatttcacacagaatagtacctgatatgtcagcacgtatggaaaagttgtcaaaatcagacataataaataatattgtaaagtctgtaaaaaggccggttgttggagaaaagagcgtaaactgaggatgaaagaatatgatgtctaaagtattattaatcttttttgttgttatttcgtggtatgttgcaggaatggtccattcatttgcattgatgttatatgcagtatgccttactttttttatgcttgctatgcattttgttacaagtatatataaaaaaagagtgtcatttgcgtttgcttctgattatgcaagtgcggttgaaggcagagattatcttgtcagggttaatataaataataatcatggtctgccagtaagtaaaatcagacttgatattgaagtgtcatatggttttaatggaaataaaacaaaatatatgcttacaaagaaaatatatggaagctgtcataagaaaaaagattctataaattttacaataaggatgccttatgcagggccggcatgtgtatatattaagcgtgtatatttttatgattatacaggtgtgttcagaagaaaggctgtaactgacagtcatatgaatatagctgtgctgccgtatattgaggatggcagtatttatatggaatatgctgcatctgcagctgaggcttcccaggatttatatgttaacagaagtggaaattcagttgatgatataagacagataagagaatatcagacaggcgattcctacaggcatatacactggaatctaagtgctaaaacagggagccttcttgttaaagaattctcgcaggagacagatatagaagtcaatgtgtttgcaaaggtgtttatagatgatttatatgattataagaaaatgggagatttttatgacaagcttgccaatgagacaatgtggcttattaacgataaaagtataattaatcttttgtggtatgattatgaatatgatacgtttattaaacatcgtgtgaataacagaaaggattgcgaagatgtgctgtatgctctttttctgtatcacgaaaaatgcaggattaataataaaaaaacaggcatgaataaagagcttccatctgcatataaagaaggaaacatagttgtggtagatactagtcttaaggtgagtgttaatggcagtataaaagtataagttatagcggaatggagaacagtatgaaaacagatatcagtataacggtcaaacggacagaagatagtggctacagaggaaacatgtatcttggttttgctgcgcttttttgtggcgttctttctgttcttctgtttataagtggatttaatgctataggatatacgggggaacttgtgtatctgtctgcgtttttgttatcttttatattctgttatgtgtattacaataaaccacaattgtcagttgtattatgcgtaatgatttttataggtatatttattgcggtaataactggactggatgatttgcagctacaggcgtattcagtatttacggctttcagtgaggggagagcggctgtcaggaatataactaagcttatgtgtgtgtttacaccattgctagttggtgtgttttatctttttgagatagtttttaaggtgcattttgttttgtcatttgttatggtttcttttttactggcttcaccttttcttaaaatatccatatcagtctttaacatttttattatgcttgtataccagattttgttttatctgatgaataatctggataaaaagaaaagaaaaactctgtattcatcacatacagtaaacagcagaaaaaacattatgggaaaatgtacagtcatgtgtgctgcattgctttttgcatcatttgttctatcagctgttattatgaatacaatatctgagccagtatataattcggtaagcggaatagaagaggtggtttataaggtatcaagtatagccagtaacagagcctctgatatcagcatgaatggaagtataagtacaggaaacaattatcagactggggcagaacagattaaacttacaacacaaagaaagccggaagaggatgtatatcttataggttacagaggaggagagtatacaggtaataactggaataaggctgatgatgtacagatatgtaatgaactggataagaaaaagggaaatacatatgccagatatagttcaatatatagtacatctgaggtgtttggaaacctgtattatcttggcaattatattatgaaaagtaatggactggctgtttcaaaggataaagacaggagacttcagcttgatatagcttatacaagtgataaaaataatataatgctggagccatattgcagtaacctgtatctggcacagaaaaactcttatgatgagtatagtgttatgtattatgaacaaaaggatatggtttctttatgggattcagataatataactgatttaacgaagaaatcaaggatggatgattacataaatgtgcagtctaattataaaactgcaatgaaatcttactatacgcagtattcagatgatattacgccacagctggcttcgtatgttaaggataatcccctttcatcacttgaagaaaaaacaacatttatattatatacacttatgagtaatacaagctacacaaggactcctgggattatgcttggaaatactgatgtggcagataagtttctttttgagtctaaaaaaggatattgtgtccattatgcaacagctgcaacacttatgtaccgtatgtacggaattcctgcaaggtatgtaacagggtttaaggtgtctgctgactgttttaaagaaaatgctgatgggcagtggagtacagcagttacagattcagcacagcatgcgtggacagaaatttttatagataattatggatgggtaccggttgatgttacgccagcagcagatggaactatgagggtttcttatcctggatataatatggaaatatttaaccagataatgcagcagaataactggacagctgatatgccaagtataaatgatatatcaaaggaaaaaacagaatatgtaagaacttggcagggtgctgttaaagcagctataaagagatttttaaggcttgtatggagaataattaaaatactgttgctgttcatagctgtaattagtgtagcagcttcgcctttatggttaagattaagaagaaatataatacttaaaagacagaacaagaaaaaagcagtttctatatataaaagactgatgtgtatgctccatacgacaggctatgtgacagagtatgatggcacggaggaggactttgctgatgtgcttatagcagaatttgcagaggattataaagaggatatggcagatataaaaagggcagtagatgtatcagtacaatcggagttttctttacatagggcagcatcttctgatacgcaatgcgttcttaatgtgtacaataagatatcagatattatatataacaggcttagatggtgggagaaaatagtatttagatatgtatattgtttttagacttgactattcttaatatttatactattctaatgaaaagcttgaaatatatttcattggaggtaatatatatgcaattagcaatgataacaatacagcaggttttggttttgtttgtattaatatttgcgggttttatatgtgtgaaggcaggtgcggtaaaaatagaaggcaagaaggcattttctgatctgcttgtttattttgttgtaccatgtatgattattaattcatacctgacagattttgattctgatatattcaggaatatattgtatgcactttggctgagtgtacttcttatagctataggtatagctgttacttttatattatcgatgcgtattaaagatgataatcttccagttgtaagattcggatgtatgttttctaatgcggcttatatgggttttccgttgattcaggctttgtttggcagtgaagggcttatatatgcaagtgcatttgttacagtgtttaatatattgttatggacacttggatattcagttgtaagccggacaattagctggaagatggttgtaaaaaagatatttacgactccggcgacacttgctgtttttgccggaatcataatatttgttttaagaattccaatgccatcagtgcttcatcaggccataagtgcagcaggtgcagttaacactccgttatcaatgtttataacaggcatgattattgcagcaagtgatattaagaaaatgtttgcaaataaacttgtgtatttttcaataattgtaaggatgataattattcctgcaatatgtattgcggtttttgagttgttaaatattcatggaatggttgccaatattgtaatcatacttgaggcgtgtccttgtgcggctatcacatctgtttttgctgtacagtttaactatgatgatgatgtagcagcagcctcagttgttttaacaacgcttgttagtatagtaacacttcctatagtggcgtttgttataacaactttataacaattaattgttttttaatataatgccagtaattgtgaggttattggcatttattttttttgttttttatgttattatgatgtacgtgtcaaaaagtcacaaagcggttgtgattggataaatgaacattttaggacggagaaatatatgaaaattttatttgtttcgcttggctgtgataagaatctggttgatacagagaatatgcttggaatattaaaaaataaaggctttgagtttacagatgatgaatgggatgcagatataatagctgtcaatacctgttgcttcataggagatgccaagcaggaaagtattaatacgatattagagatggcagagcataagaaggatgcaaagtgtaaagtgcttgtagcagcaggctgccttgcacataggtatcaggatgagattataaaagaaattccagaggttgatgcatttgtcggcacatcttcatatgataagatagctgatatgattacttctgttcttgaggaaaagggtataactaattttgtagaggatgcagacagaatgccgatggttaaagaggacagaatagttacaacaccaggttattatgaatacttaaagatagctgagggctgtgataagagatgtacatattgtataataccaaaggtaagaggaagctacagaagctttccggttgaatatcttgtcggtcaggcagaaaagcttgttgcaggcggagtaagagagcttattctggttgctcaggagacaacgctttacggagttgatctgtatggaaagaaatcactacctatgcttctgcatgagttatccaaaataaaagacttaaaatggataagaattctttactgttatcctgaggagattgatgatgagcttatagaagctatcaagaatgaaccaaaggtgtgtcattatcttgatatgcctatacagcatgcaagtgataatgtcctgaaacgaatgggcagaagaactaataagaaggaacttatagacataacagcaaggttaagacgtgagattccggatattgctttaaggacaacactcattacaggttttccaggtgaaacttatgaagaacaccaggaggtgatggagtttattgacgaatgtgaattcgacaggcttggagtatttacgtattcaagagaagaggatactccggcagcatcaatgcctgatcagatagatgaagcggtgaaagaagaatacagagatgagataatgcagcttcagcaggaaatatcagctgacaggtcagctgatatggttggaagtatacttgaggttatgatagaaggatacattgctgaggataatacttatgttggacgttcatataaggatgcacctaatgttgatggacttgtttttgtggaatgtgacagggaactgatgtcaggtgattttgttaatgtacttattacaggctcaacggagtatgatcttataggaaaaatagttgaagaataaattattatctgaaagtaaagggaggacgagaagttgaatttacctaataaattaacaatacttagaacaattatgattccggtatttcttatatttctttatataccaggacttggtatgacaggagatgttttggcagctgcaatattcgtgttagcaagttttactgacttactagatggaaaaatagcaagaaaatataatctggtaaccaattttggtaagtttatggacccgcttgctgataagcttttagtatgttcagcacttattgcactggtggatcttgacagaattcctgcatgggttgtaattataattattgcaagagagtttattataagtggtttcagacttatagcatcagacaatggtgttgttatagctgcaagctactggggaaagtttaagacaacttttcagatgataatgattatacttcttattcttaatattgattatccatatagcaatattgttaatatggttatcatgtatatagctcttgcgcttacaattatttcgcttcttgattatataattaagaattataaggtatttatagatggctctaataaatagtcatactaatgatgtaaatagtctggatgtaaaagtcatttctgttatcagaaatggcttttatcttcatgtggagttagatattctgatcatagtatcttatgttattatgttacatatttaatggctgcaacacagtaagaatggaggttttatatttatgaatatagaggaaaaggtagtaaaaaagcttaacgaaaagaatatgcttcttacaacagcggaatcatgcaccgcaggtatgattgcatcagcaattgttaatgtaagtggagcatctaatgtgttccatcaagggtatataacatattgcgatgaggcaaaaaacagtatgcttaatgtaaaaaaagaaactttaaagttatatacggctgtaagtccacagactgcatgtgaaatggcgcttggcgcactttctatatcggatgctgacatagcggtttcagttacaggagttgctgggccttcgatggaagatggaaagcctgtaggacttgtatatataggtgttgcatcaaaaagagcatctggttatgcagctacgtttgatgaggcttcaagaataactgatattaaaaaatatgaagaggcataccagcattgcaaagatcaggaagtactgtatgccgtagataacaatatcgttattgtccggaaaaacatgtttgaaggtgacagaggtgcaatacgcgaaaaagcatgtaaagaggctcttgatatgatttatacatatattaaagctgtagatatatattaaaacatggaaaaatatatctttactttcttatatgtatatggtacgatgaggatatccaatatgttacataaatatttaaaatgatattcgaataaatgttcgaaaaagcttgacaaaatacatggagtataatattatcataataagcgaacagatgttcaagatgatggaggtatatataatttggttaatgaagataagttaaaggcgctggatgcggctatttctaatattgaaaaacagtttggtaagggttcggttatgaagctgggtgattcaacagcgaacatgaatgttgaatgtatacctacaggttcattaagtcttgatatagcattaggtcttggcggagtgccaaagggaagggtagtagagatatatggacctgaatcttcaggtaagactactgtcgcacttcatatggtggctgaagttcagaaaagaggcggtatagctggttttattgatgctgaacatgctttggatcctgtatatgcaagaaatataggagtagatattgataatctttatatatcacagccagatagtggtgaacaggcattagagatatgtgagactatggtaagatcaggagctattgatatagttattgtcgattcagtagcagcacttgtaccaaaggctgagatagatggagatatgggagattcacatgttggacttcaggcaagacttatgtcacaggcattaagaaagcttacaccagttgttagtaagaacaattgtgttgttatatttataaaccagttaagagaaaaagtcggggttatgtttggtaatcctgaaacaacaacaggtggaagggctcttaagttctatgcttcagtaagaatggatgtaagaaagatagagacattaaagtctggaggagaggttgttggtaacaggacaagagttaaggttgtcaagaataaagtggcacctcctttcagggaagctgagtttgatattatgtttggtaaaggaatatcaacagaaggagatcttattgaccttgcttctaacgttgggattatccagaagagcggtgcatggttttcatataatggagagaagataggacagggaagagagaatgcaaaacagtatcttatcaataatccagatataagaaatgaagttgatgagaaggtaagagcacattatggtataggtgataatccagatagtgataaagaagagacagttacagaagagtctaagacaaagtcatctaaaaaggaaaatactgaggaagtttaatgaagacagaggaaacagataagtgtgttacctctattcaggaagtagattctaaacgcaggcgggtatttataaattacgagcctgcgtttgttttgtatatatctgagattagaagatttaatataaagaaagatgcatatatttcgttagaagattacgaggatattattgatatattaaataaaagatcaaagatacgtgcgatgtctttactgaaggatagagattatacaagaaagaaattgtttgaaaaacttaaagctaatggttatccggatgaatgtatagaaaaagcagttcaatatgtttcttcatatggatatatagatgataaaagatatgcagttaattatactatatcccatatgacatcaaaatcacgaagagttatagaacaaagccttatgttaaaaggtgtagatgcagatataatatcatgtgcgcttgatgaatgttatgatgagatgtgcaatccggatataggaaatcctgaacttgatattataataaaacagcttcatagtaagtaccacaataaggatttgaataattatgaacagagacagaaagtaaaggcctcattgtataggaagggttttatgacagataatattaataaagcacttgatattgtggtcaatgaagaaaaagagtactaattatgcgaaagttaagaggttctaaccttgacattatgatgattaaagtataatattagtatgttgtatattttgtacaatgaaaacttaataaggaggtgctcctgtgttaattccgatagttgtcgcaattcttgttacacttgcagtagtcgcacctattacatggtttatatcaggcaaagccattgctaaaagcaatgatgaaaaaattggcaatgctaatgagagagccagagagataatagacgaagctttaaagacagcagagacaaagaagaaagaggcactcttagaggttaaagaggaatctttaagaactaagaatgaacttgagaaagagacaaaggaaagacgtgctgaaatacaaaagtacgagaagcgagtcctttctaaagaagaaactcttgatagaaagatcgatgcagtcgagaaacgtgacttaagtattaccagaaaagaggaagaacttggtaagttaaagcagaaagttgacgaacttgaaaagaaaagacagcaggaacttgaaagaatctctggattgacctccgaacaagcaaaagaatatctattaaaaactgttgaagatgaagttaaacatgatactgctgtaatggttaaaacattagaaagcagggcgaaagaggaagcagataaaaaggcaaaggaattggttgtcaatgctatacagcgttgtgctgctgatcatgttgccgaaacaactatatcagttgtacagcttcctaacgatgaaatgaaaggtcgtattataggtagagagggtcgtaacataagaactcttgaaactctcacaggtgtagaacttattattgatgatacacctgaggcagtcgttttatcaggctttgatccaattagaagagagattgcaagaatcgctcttgaaaaactcataattgatggacgtattcatccagcaagaattgaggaaatggttgaaaaagcacagaaagaagtcgaaacattaattaaagaagaaggtgaagctgcaacccttgaggttggtgtccatggaattcatccagaattagttcgtttacttggtaagttaaggtatagaactagttatggtcagaatgtattaaagcattctattgaagtagcccagattactggattattagccggcgaattaggacttgatgtaaagatggcaaagagagctggcttattacatgatataggtaaagctgtcgaccatgaaatggaaggctcacatattcagttaggtgttgatctttgtagaagatataaggaatcaccacttgttattaatgcagtagaagctcatcatggtgacgttgaaccggaaagcttaatagcatgtcttgtacaggctgctgatacaatatcagctgcaagacctggcgctagaagagaaacgttagaaacttacacaaacagattaaaacaattagaagatattaccaactcatataagggagttgagaaatcttttgctattcaggcaggtagagaggttcgagtaatggttgttcctgaagttatcaatgattcagatatggtattacttgcaagagatatttcaaaacagattgaagatcagatggaatatccaggtcagattaaggttagtatcgtaagagaatcaagggtagtggattacgctaagtagaataatctatttagacaagctcgaattaaagaaacatacgaaaggcttaaacatttaaggttttaagcctttctttttttatgtttatatatttaaatcagagatgctgtgccctatttttgacgctatttttaaatcaaccaactgtccgccatagacggaaaaatgtaaatgtatgaaagatatactcaagttagacttaataaaattaagtaactacttaattttgttaataatatttttaaaaatccctaaaatattaataaacttaatcgtaaaaattgcatttattgtaaaaaagcttgcttaaattataagttcatagtatagtaataaagacctttgaaaattaatggaggataataatatgcagtatagtgaaatgagtaaagaacaattattacagttaaaggctgagcttgatgaaagatataaagaagctaaggctaaggggctgaatcttaatatgtcaagaggaaagccatcacctagtcagcttaatgtaacgatggacatgcttgatgttattaacagttcttcggattttaaggctgaggatggaacagattgtagaaattatggtgttcttgatggtcttacagaagccaagaagcttatggctgatatgatgggaacaacatctgaacacattattatatatggaaacgcaagtcttaatattatgtatgatcaggtttcaagatcatatgcacatggagttatgggaagcacaccttggtgcaagcttgataaggttaagtggctctgtccagtaccaggctatgacagacactttgctattacagagagctttggtatagagatgattaatattcctatgacagagaatggccctgatatggatatgattgaaaagcttgtaagtgaagatgaatcaataaagggtatatggtgtgttcctaaatattctaatccacagggttatacttattctgatgaaacagtaaagagaatggcagcattaaagccagctgctaaggattttagaatattctgggataatgcatatgttattcaccatctttatgatgataaacaggatgaaatacttgatattatatcagaatgtgaaaaagcaggtaatgctgatatggtatatgaattcgcatctacatctaaggttacattcccaggttctggtgtggcagcacttgcttcatcagctgctaaccttgcagatattaagaaatatcttacaatccagacaataggatatgataagcttaaccagttaagacatgtaagatattttaagaatcttgatggacttaaggcacatatgaagaagcatgcagatttcttaagacctaagtttgaagcaacattaaaggtacttgatgatgaacttacaggacttggaataggtacatggtcagaaccaagaggcggttattttatatcatttgatgctcttcctggctgtgcgaaggctatagtttccatgtgtaaagaggctggtgtagtgcttactaacgcaggtgcaacattcccttatggtaaggatcctcgtgatagcaatataagaatagctccttcattccctactccagaggaaatgtcagaagcagctgagcttttcgtgttatgtgttaagcttgtaagtgttgataagcttcttgaaagcaagtagtcagaggctgattaatatgtaggcagattattaaggaggttgttatggctaaattcggttttattggaatgggtaatatgggatacgcaatgctcaaaggtcttctttcagtatatacgccatctgatattatattcacatgccctgatttagaaaagtgtaagagaataagtcaggaaacaggagtaagatatgcggaaagcaatgcagaatgtgctaataatgcacagtacgttgttcttgcagtaaagccacaggtatacaatgtggtattaaagaatattaataatgttatacgtgaagacagtgttgttatatcaatagcaccgggtataagtatagataatatcaagtcacagcttggtataaatgcaagagtagtccgtgccatgccaaacactcctgcgcttgttggagaaggcatgactggtgttgcttatgataaggagaatttctcatttgaagaaagagaggttatagacagcttctttaattcttttggcaaggttgtatatgtttcagaaaatcagatgaatgccatagtatgtgcaagcggaagttctccagcatatgtatatatgtttattgaggcacttgctgatagtgcggtaaaatatggcattaaaagagaagatgcatataagcttgttgcacagacagtacttggttctgcaaagatggtgcttgaaacaggagagcatccaggtgttttaaaggataaggtatgctcacctggaggtacaacaatagcagctgttgcggcgctggaggaacataacttcagaagttcattaataaaggctacagatgcatgctatgacaagtgtaccaatatcaaataaaatgatgtgaaagaatggaacactgaatggaacacattaaaagaataaaaagagaacgggcttataagggctcaatacttgagttttataaggatactatggttacacctgatgggaaagtgacttattgggatcatatagaacataaaggagctgctgctgttgtaccggttcttgatgatggcaggattgtgcttgtgcgccagtacaggaattctcctgatgaagaaacacttgagatacctgcgggaggtcttgaagcagatgaaccgacagagcttgcggcgataagggagcttgaagaagaaacgggttataaggcagaacgaaaaaacgtcaaaaaactgatatcagtgtatacagcagttgcattctgcaacgagattatagatatatatgttgcagataagcttataaggacatgtcagaatcttgatgatgaggagagtattaatgtagagatatatactcttgatgagataaaacgtatgatatttgacggaacaatcaaggattctaaaacagtgtcagcgatgatggcttattcagacatgatttcacgtatataaccatctgcctgataatgtcagttactatttacaatccatagtaaacgataaaaataaaacaaaacaaaacatatcagaaaagattccagcatataatagcctgaccagataaaaggaggttgttatggctgggattttttttagacgaatttttggacaatacagatattatatagttatacttttaggagctgtagtaggatcactgatggcaaatcttgttatagatgatataacagataaaataggaatgttcaatgaagattttaataatgcaattatgagcgtcagccttgataaaacattatatttaagatatatattaaagctgcgtttaaaagaatatatatgttttatgcttgtgctttttactccggctgctatagcaggaatatatatatttatgctttttgccgggataagttcaggtcttatgataagcgtatgcattatgaatatggggataaaaggaatgtttatatatgcagtatgccttataccgcagtatataatatatgcaattgccgtttttttaatggtgtcatatattgaaaaacgactgattaatattaaaaaaacggtaattgtcatatttatatcactgatatttctgatagcgggaatcttatatgaagcttatataagtccatttataataaggtggttatttgagcatatcagctattgtatataaaagcttttcagattcttcccatccaaggcatggatcagttatagatttgccatatataccttcaccgaccttctgtgagcctggttcgatatagctttcaatcataacacccttaacaagatcctttacatcttctgaatgattgcggctatgaatcacttcctttgtgatacgtatctgttcaatatattttttggcagaattactgtgattagcatcaactatgcaggctggattaagtaaatcccttgttttatacatggaagccagtctgataaggtcttcatagtgatagttaggaatattctgaccatgcttatttacagcgcctcttaatatagtatgtgccagaggattgccaggagtctttacttcccagtttctatatataaatgactgattagcctgtgctgcaacaactgaatttaacataacagagaaatcaccgcttgttgggtttttcataccggcaggaacatccattccactggctgtaagtctgtgctgctgatcttcaactgaacgggcaccaactgcaacatatgacaatacatctgaaaggaaccagtagttttcagggtagagcatttcatcagcaggcataagctctgtttcttccataactcttatatgcattttccttatagctataagaccagcaagaaggtctggctttttctcagggtctggctggtggagcatacctttatagcctgtaccggttgttcttggcttgtttgtatacactcttggtataataagaactttatcagctattttttcctggacttttttaagtcttaatgtataatcaaggactgcatcttcgttgtcagctgaacatggtcctatgatagcaagaaacttatctgatctgccagttatcacatctgcaatttctttatctctttgtgttttcagagctgcaacgtttttaggaacaggaagttcatttttaacttctgttggtgtaggcagcttacgtatgaattcaaaactcattgtatttctccttaataaatctttatgccaataaatcatagcatataattataaaaaatgttagtatattcttatatatattaaaaatatttgcggtaattgtaaactgtggctgatatgtataagatagaagaggtggctggttatgagaatgttcgatgttataagtaaaaaaaagtatggagaagttcttagtaaagaagaaatagaatatgtcgtgcaggaatatactaaaggtacgatacctgattatcagatgtcagcatttcttatggctgtatattttaaaggaatgagttatgaagagaccttcctccttactatggctatggcagatagtggcgacaggcttgatctgtcagctgttaatgggattaatgtggataaacatagtacaggcggagtcggagacaaaacaacacttgtgcttgctcctatggttgcagcatgcggaggcaaggtggcaaagatgagtggaagaggacttggcaacactggcggaactatagataagcttgaaagtataccgggatttagaacatcactttcaaaagaggaatttatcaaaaatataaacgaaaccggattggcgcttacaggacagactggcaatcttgcaccggctgataaaaaaatatatgcattaagggatgtgactgctgttgtagacagtataccacttatagcaagcagtataatgagtaagaaaatagcatcaggtgctaaggcgattgtccttgatgtcaaggttggcaatggagcatttatgaaaaatatggacgatgcagttaagcttgctaagcagatggttaagataggtgaaagtgcaggcagaaatacgattgcagtcatatcagatatgaacgaacctctcggatatgctgttggtaacgctcttgaagtgaaggaggctgttgatacgttaaaaggacatggaccagcagacctcgttgagctttgcatggaacttggtgcacagatgcttatagcctcagatataacgcatgacaggaataaagcttatgaaatgcttagtagtgtgatagaagatggaagtgcatatgataaatttattgagtttgttaaacggcagggtggggatattagtatatttgatgactataagagcttgaaaaaggcagattatacagtcgatataacagcagataaagaaggctatgtacatcatatacagtcagaacttataggtgaagcatcaatgattcttggtggaggacgacagaataaggaagataaaatagatcattatgtaggtgttgtgctttcaaagaaggtaggagatgctgtgaaagaaggagatgcgatagcaacgatatatgcgaatgacaaaaagaaaattgatgatgcaaaagcattaattgtcaaagcatttgatattaataatcaaattgttgatacatatatgcttattaagagaattattagttgtaaaaatgtttaaatgatgttattattatatccaaaaggataattgatgtaagtggcagaatttttttgtctctgatatcataattatataagagaaaaggagaattgagtaagatggaagtaagaccaggagctaatcctgctgatgtcaagaattatgacacagacagattaagacatgactttttaattcagaatttattcgttgctgatgagattaagacaatctatagccagattgacagaatcatagttggagctgcaacaccagttaacaaagaacttgttcttgaggcaggtgcagaattaagagctaagtatttccttgaaagaagagagatgggtatcatcaatatcggtggtaacggaacagttactgttgatggcaaggaatataattttaagtataaagatggcatgtacataggtatgggtgctaaggatatttcatttaagagtgaagatcctaagaatccagctaagttttatcttaacagtgcaccagcacataagacatatcctacagtatttattgatccagctaaggatattttacctgagaacaagaaagaacttggatgtcttgaaagtgcaaaccatagaactattaacaagtatattcttcctggacaggttgaaagctgtcagttagagatgggtatgacttgtcttgaaccaggtagcgtatggaacacaatgccatgtcatacacatgacagaagaatggaagtatatctttactttgaggttccagaagatgcagttgtattccattatatgggagagccaacagaaacaagacatatcgttatgagaaacgaagaagctgttatatcaccaagctggtctattcattcagcttcagctactcatgcttatacattcatctggggtatggttggtgaaaaccaggatttcgatgatatggatgatgttgatatgaaggaccttagataatcaggacgtatctaaaaggtgctgatgactataatatttttgttagaatgattctcatagaatataatgcataataaacatgttatacatttaaattctggagttcattgatatatattaagagaaaaggagattttaaaatgtcagtaaatttttcacttgaaggaaaagttgctttagttacaggtgcttcttatggtatcggtttcgctattgctagcggaatggctaaggctggcgcaacaatcgtatttaacgatattaagcaggaattagtagataagggattagcagcttataaggaagctggtatcgatgctcatggttatgtttgtgacgtaactaacgaagaacaggttaatgctatggtagctcagattgctaaggatgtagctcctatcgatattcttgttaacaacgctggtattattaagagaattccaatgtgcgatatgacagctgctgaattcagacaggttatcgacgttgaccttaatgcaccatttatcgtatctaaggcagttattccatcaatgatcgaaagaggccacggtaagattattaacatctgctctatgatgtcagagttaggccgtgaaacagtatcagcttacgctgctgctaagggtggtcttaagatgctcacaagaaatatctgttctgagtatggtcagtacaatatccagtgtaatggtattggacctggttatattgagacacctcagacagctccattaagagaaagacaggctgatggttctagacacccattcgatcagttcatctgcgctaagacacctgctaacagatggttaaagccagaagaattagctggtccagctgtattccttgcttcagaagcttcagatgccgttaacggacatattctttatgttgatggtggtatccttgcttacatcggaaagcagccacagtaattcataagtgttgggtaaataaagaataacctatggtataatgagcgcaaaagaaagggaagcggctgcgaagcagacatttacttttcttgcgccattaacgaatcaacagtcatgcaaagcatgactaaagagcgcgaaagctgggacaagtaaccttgttccagcttttttttaatataaattcgtaaaatatataaaataaataaaaatacaagatttgactatcaaaatatccccttttatgatacaattactataaaagttttacaaatatgagaggagaacattttaatgaaacttgaagtaagaaatcttacaaagtcttttgaagataaccaggtcttacatggcgtttcttttgaagttgaaagtggcagcgcacttggactcttaggaagaaatggcgctggcaagacaactaccataagaattattatggatgttttcaaagcggatttgggagaggtatatcttgatggaaagccttttaatcctaaaaagcatcttataggatatcttccggaagaacgcgggctatatcctaagaaaacagttcttgaacagatagtatatcttacaagactcagaggaatatcaaagaaagaggctgtgaataatgccaataagtggttaaaacgacttgagattgatgaatatactaacagaaagttagaaacattgtcaaagggcaatcagcagaaggtacagcttgcctcaacgcttgcgtgtgaaccagagatagttatacttgatgagccatttagtggactggatcccgtgaattcaaagatacttcaggaagtcgtgacagaagtcattaatgagggtagaatagttatattttcaagtcatcagatgagctatgttgaggagttctgccgtgatatagctataatagataaggggaatatagcactttctggcaatcttaaagatataaaaaagaaatatggtgagaaccagcttgttatatcagatgttaacaaagatctggatactttgtcggatatagtaaaagaaaagctttcagatattatagctgaaacaggaagaacaagagaagatattattattaaaaatataagtgctgcatcaagggcagatatattaaagagaatagttgattgtggtatagatgttgaacattttgaaacatataagccatcacttaatgatatatttgtttcacttgtaggggatgaagcagacaatgataataaaaagaataatattgaaggaggtgcgcattgatgaaaaagttaggtgtagttcttcaatatgagattatgacttatcttaagaataagtcatatgtaataagtacaatcattatagctgtgatagctgctgccattatgtttgtgccaagattttttgatataagttcaataacaggtgttgataaaggaactgaggaaaatacagaaaacgatgcagatgacaaatcagataatacagatgaagataaggatataatgcttatatatgatgagtcgggtgcattgtctgacatacgtatgcttcaggcagcctttgatgatatgaaagttgaaaaggaagtatcagaggctgcattaaaagataagatatccagggaagaagcaaagaaaggctttatagttcacagccttacagattatgagtacattgtatataataaaagtatgacagatagcactaatatgcagtttgaacaggtgcttacagcacttaaccagatggtgtattgtagtactaataatcttgattatgaagagatgatgacagcctttaatccacagattaacagtgaaacagttgtacttggcaaggatatgggcgctaattatatgtattgttatatacttatcattataatatttatgataattatattctatggggtcatggttgcaacttcagttacacaggaaaagtcaaacaggactatagaagtacttgtaacaagtgcagatactaagattctgttttttggtaaggtacttgcaggaactatagcggcactgtgccaggcaggcgttcttatgcttgctgttgttggtgcatataagattaaccagagtgtatggggtggtatacttgatatgcttcttgatattcctgctgatgtgattgttacatatgcattattcggacttggaggagtacttttttatacatttatatatggtgcatttggtgcacttgtatctaagacagaggaccttaataaaagtgttggaagtatccagatgatcataatggttgtgtattttgttacacttttacagctgggcaatattgatggtacagctatgaaggtgctttcatacctgccattcagttcatatagtgcaatgtttgcccgtgttgccatgggaaatgtggcagtgtgggagattgttgtttcattcataatacttgttggtggtataatagctgttggtatagcaggctcagctatctatagaatgggaacacttagatatggtaatccgattaagataactacggcaataaagagcctttgtaaaaagaaaaataaataagattatgataagaccgttagataatattagtatctaacggtcttatgcttataaaatgcttaaaatttctataataaaaatgttaatagcatgaactagacaagtgacgattataatttaacagtttccccacctggtatctcaacaatatgcttgttgtttacagcaacccatacagaacaagcactagggttgtatatgtattcattgtcagcaaacatctgaagtctgtcaaaggcttcattataatcgacaatttctatgttggtagcataccatatatcatcgcggtgtcctatcatttcagagaattcttctataactgaccagttgtcatttctgtcgaattcaaagctgtgaccccatacatacatcatataaagatactgcgttttagtaagagccataaagcgtttgccgaattcaacaaggttgtggttatgatggcatgtaggtatccagttcatataatctgacggcatggaaaaaccattttcatcacctaagagaataggcccttcacagcagtctgcatattcaatggctgattttacagcagcatattgatctgcagctggtcttatatattttattcccagatccgcagcaatggaagtaataagcttattgcctgctccattaggtagagccatgccacgtacgggtcttttaataatcttttctatagctgttttatcttcaaggatttctcttgtgatttcgtagcttccacaacggttcatagttgggtgcgtgcatgtatgaagtgcaatttcgtggtttttatataaagaactccactcatcagaatccagtcgtatatccatatccgtaagttgagaatttacattaaaggttgcacggattccatttttattgaatatatctaccagacgtctgtcctgtattttgccatcatcgtagcttaaagtaagaactttgaatttaccgcctggaaaacacttataaattctattcataataatctccattcttgcgctgcttctttgcgcatctcaagtttgtgcgaagcacaaatcttgcgtgtgaaaatcttatttttcacactatccttcattctgatataactataataagttatatctatgtgtaaaactacacattcttttttagtatacaataatttgattgtgatgtcatcagaattgaattaaaatacacaaaaaatacaagaaatgcctgataatataagacactttacgaacatacttacatttattaatatctttatcgcttattatgttatattgtttaacagcttcattgtttatatatacagtcacagtgccaatgacatcattttttttaacaggagccataatactgtcaggtatattgtattctattttaacttcatcatcagatttaacatatgcactatattttttatctataacaacattgatatcatctgatgtgccattagttacttttacattaaaggtttttatattgtcaagaagcacctgtttttcaaagttgtttcttgcataatcaagcagtacttttgaatcagtccatttataagacttgttatttggccatccgcatgcaaggagtgctactataaatgttttattctcatctttgtaggcacatacataacaatatcctgcatctgcagtaaagccggtttttcctgatattatattatcatacatggataagaatgcatttgcattagtaacagaatatcttttaccatcaagattgctaaagctgtgggagctgcttttggttatttctataaaatcaggatttttgatacagtatgacatcatgacagaaagatcataggcagttgtctggtgtataccattctcatctgaagcatcaaggccattaggagttacaaaatgtgtgttagtacaacccgcctctaaagcttttttattcataagatcagtaaatatccttacaagaaccttgctttgctctttactgatattttttaaaaatgaagaattattactataatcgggtataaaagatatatcatatatcaattcattcctttctttatctgaaagattacatatgtagtagtaagctgcattttcagcaataataactgcggtatcattatgtgatcttaacatcagtgaaaaatacaggtcttttattgtgaattgttccccttttattgcatttaactgtacatcaggcatagatgcagcatattcagaggttgttgctatatagtcatcggcacatatgttaagagctgtaataagggtgatgattttggttgtgcttgcattgggtgctttaatatcagcttctttaccgtaaagcagacggttattgtcagcatcaataagtgctgcataacgtgcatgcaaagatatattgtttttaggactgctgctggctgcaagctgtgttttgcttacagcagtaattttatgtggaacagcagggcttaaacaggaagagtaaacaggagatattaaaaagaatatatattcaaaaagtataacaataaatgtcagcgatgatagaatatattttaaaggtttcaagccggacctccatatatgaatttttaaatatatttagcttttaaatgtatatacatttgttttgctattatgataaaattatagtaaaatgtaagggataaaaggttatttatatcttatggatatcaatattttacgaatatccaatagtgactgcaaagttatgcagcaggcagcaaatatcagttatgaagaggtgcatatgagttatatagaatttcaaaacgtaaagaaaatatacaaaatgggtgacgttaagattaaagcacttaatggagcagactttagtatagagaaaggagagtttgctgttattgcaggtgcaagtggtgcaggtaaaagtacaattcttaatcttatgggtgggatggatacagccacgacaggtaaaataatagtagataaagaaaatgtttctaaatttagtgctaaaaagcttactacatacagaagatatgatataggttttgtgttccagttttataatcttgtacaaaatcttacagtcagggagaatgttgaacttgcaacacagatatgtaagaatccgcttgatatagatgaggttatagaggcggtaggacttaaagacagaagctctaattttccatcccagttgtcgggtggtgaacagcagagagttgccattgcaagggcactggcaaagaatccgaaactgcttttatgcgatgaaccaacaggagcacttgattataatactgggaagcagatattgaagcttttacaggatacatgcagaaaacgtggtgttacagtagtggtgataacacataatcttgcacttacagcgatgggagataaggttataaaagttaaaaatggtatagttgacagtgtaactgtgaatgagaatccacttccggtagagcagatagagtggtaatgaaatattaattatgaatataaacacaaagcttgcatgttacggaaaggtagttttataagatgagaaaggcagtatttaaagattttataagaaacataaaaggatcgcttgggagattctttgctattatggctatagtagcgataggtgtagctttttttgcaggagtaactgcatcatcaggagatatgaagcattcatcggattcgtattatgatgagtataatatgaacgatataaggatattgtcatcaataggatttacttcacaggatatagaggcagtcagtaaggtttacggagtaaaggctgtatacaaaactaatacgcatgatgtactcgttgattatgatggcagagagaatgttgcacatatatcaggtattccggttggaaaagcatcggatgatgacagctatattaaccagcttaggataaaagaaggccgcctcccacaaaatgataaggaatgtgttgttaagtatgaagatacacgtaagtctatgcaggttggcgatgttatcagttttaagtcaggaacagaggatgatatcaatgacacatttaaggatacagagtatacggtagttggtatagtgtatacaccatgttatgtatcatatgatttaggttcgtctggcataggtaacggtcatattaattattgtatatatgtaggtgatgatgaattcaaaaacaactactatacggaatgttatgcggttatagatggcgcaaaggatatggatacttactcagatgagtataagaagctgattgataagtatgcagatgatataaaggctatatcaaaagaaaggcttgacataagaaagcagacagttatagatgagtatacaagggcaaaggcagacaagaaggaagaactgttagaaacgatcaagaaaaatgtagaggattctattacagaacaatatcaggcttattatcctggtatggatgtatcctcaatgatagcaccttacgttaagacagcatatgaaaaggcagtagcacaatttgattttgatgcagttaatgcagaatatgataagaaaatgaatgaaacacttgcagatagtgattcatgggaatggtatgtacttacaagggaatcgtcatattcattcagggattatgaatcaagtgcaaacagaatgaaggctatagcaactgtttttccgttgttcttcataatagtagctggtcttgtgtgtcttacaactatgacacgtatggtagaagaagaaagagggcttataggaacatataaggcacttggatatggaaaagcaacgattgcacttaagtatgtgatatatgcatttcttgcttcattaacaggtgcagttataggctgtgcagcaggtcttagattatttccatacattatatatgaatcatggaatattatatatcagatgcctgctataaagtatgcaagtcatacgatactatctgttgtagcagtagcaagtcttattcttgtgactcttatagcaacattatattcatgctataacgaattatctgaggttccatcggcactcatgagaccaaaggcaccaaagaatggtaaaaagattcttcttgagcatacatttatatggaagcatttatcttttacgaaaaaggttaccatgagaaatatatttctgtacaagaagcgtttctttatgacagttataggaatagctggatgtggtgcacttataacggcaggttttggtataaaagacagtgtgcaaagtattattgataatcagtatggacagataatacattatgataatatacttgtatttaataaaaatgcagatagtgatgccagaaataatttatctgataagatttcatcagatgagtattataagtcctcacttatggattatgcctatacggcagaggttaaaataccaggaagtgcagatgattatagtacggagataacagttgtaaacgatacatcagcgtatatggattatgttaccttcaggacaagaagaagtaagaaaactatagagcttgatgattcaggagttataataagtgagaagcttgctaaagacctgaatgttaaagaaggagataacgttcttatacatgatgaagataataagcaggcaacggtgaaggtatcaggtgttatggaaatgtatataaataactatatttttatgacgtctgagtactacagccaggtgtttggatatacaccggataataacaggatacttggaatattaacttctgatggagatgatatacaatctgttataggagacagatatttaacagataataacgtgaaatcccttacgtttgttaaagctaatataacgagatttgagaatatgatacaatcgcttgatcttgtaacatgggttttaataatatcagccggaatgctggcatttgtagttttatataatcttacaaatgttaatatatcagagcgtatacgagaaattgcgactattaaagtccttggcttctatgacagagaggttggggagtatgtttacagggagaatataattcttacacttattggaggagtttttggacttcttcttggaatggcactgcatgcttatattatgacaactattgaacttgatggtgttatgtttggaactaagattaatataagttcatttttaatatcgtatggaataactatattgttctcattacttattaatatttttatgtatccatcacttaagaaaatacctatggtagaatcacttaaatcagttgaatgatcatgatatgaataatcagaagacaaccttcatatactgtgaaaaacagtatatggaggttgtttttttatgggtgatataagtcagataataagaatcctcccaaaagatctggtattgggacttgatctaaagaggctgaggtttgataagattaacgaaataagaataagggtgggacgttacatagctcttatatatgataataaagaggtgataagcagaataaaagccagtaaagaacatataagaaaaataatcgaactagctgctgattattctgtatatgcatatgaacaaagcttcagacagggctatattacaatagaaggtggacatagaataggaattgcaggacatgcaatagtagaaaacaataatataagaaattttaattatataacatttctgtgtataagagttgcacatcaggtgccaggctgcagtgataaggttatggattttatatatgcaggaggcttggaaaacacacttataatatcacctccaggatgcggtaagacaacattgctacgtgatgttgtacgtaatatatctgacaatgcagaattatccatgaatataagtcttattgatgaaaggcaggagatagctggctgctttatgggagagccacagaatgatataggcgcaagaacagatgtttttgatggatgccccaaagattcaggcatgcttatggctatacgtgccatgtctccggaaatgatagctgttgatgaaataggcagtaaatatgatgcccaggctatcagatattgtatcgcatgcggctgcataataataggaactgtacatggatattcaatagaagatgtccttaataagccttatgtaagggagcttataggaaaagatggttttaataaaataataataatgtccaaaaggcatggaaaggggacaatagagaaatgtataaactatcgggagcagtgcttataatttcaatgacgacatattatggtttttatcttgtcagccggttaaaagaaagaataaatgtgatagatgcatttatatattcctttgattatatcaggtcgcagataagatatggtctgaccccatttcctgtaatatgtcgggaattatcgcagaacataaataataatatagtaagcagtacatacaaaaatatatacataaagctgactgatataagcaggacaggcggttcttttgatgagatatggctgcttgaaatggacaaactgataaaatcaggatttgctaaaaaggaagaaatagatgctttaaaagaactacgatgtataaacatatatatagataaacagatgcagataacatgtataaatactgtcagtgataaattaaaaaatatatattgcaggctgcagcaggaagtgagggctaaatcaaggatataccaggtgttgggagttatgtcgggtgttatcatagctattattttaatatgagcataaagtgaaatgataatatatacaggaaaggcaggtatatgaatacagatataatttttaaaatcgctgcagtaggagtaattgtttcaattcttaaccagatattaaaacatagtggcagggatgaccaggcgtttcttacaagccttgccggaatacttatcgtactttattgggtaataccttatattgttgaattgttttcgtcaatgcagaagctgtttgatatataaagcctgcgtaagaagggatagtgtaaataatgcttcagatattaatagttgttgtatgcgttgttattagctgctttcttataaaaaaagaagcaccagcatttgtttctattattgtacttataacgggtgtatttatttcaatatatatgttgcggattttttctgttattacaggatatataaatgttcttattaacaatatagatatagaaaagggctatataaagattgttataaagataaccggtttatcaatagcaacgcagtttgtttctgatatatgcagggataacggttttaatgcgatggcatcacagcttgagttgatgtgcagaatatcaatagtgatgcttggcatgcctgttattattgcacttcttgaaatggtgaatagatgtttaaaataaaacgtagcttatttatgtgtacgatagtgtttgtactgatattgttgtatgggagtgcttttataaagaataaatctcctgcagtatgccatgcagcgcaatgtcaggatgaggaaaatgtaatttctgatgattatatagtttctgatgattataaagatatagacaggattgttaagagcgaaactggaataaatatttcatatggaaaaataatgcggtctattctggatgataaggatgattctggttatgtaaaaaagttattaatatatatatctgatgttgtatactcggaaaagaaaaacgttgcacatgtgctggcattatgcatagcatcagcacttatcagggttatgacgccgctttttaatgaaaagcagcttaaagaaacagcggcaggagtaataagtatttcgttgataacaatgcttttatcagtctttatgggtgcttataatcttgcaagggattctgttgaagcattgattaatatatataaaactatatgcatgacattttttcctgctgtttgtgcagctggacttccactcagtgcagccgggtactatcagatagttatatggatgatgacggctgctgatataggcataaaaaatatattaatgaatgccaacagaatatatgtatgtgtgtctttatgtgacagtattgattcagaaccacattttttaagattatgtaattgtatgcaaaaagtaataaagtggtgtggatatacaatgcttactttttttatgggacttaatgggataaaaagtatacttaatccattaaaagataatataaatacttcatatatttataaagcagtaagcataataccaggaataggagatgcagcctcagtattatcacagacagttattgcttcatcttcgcttataaaaaatacaatgggaatagcggcggttgttgtgttgacagtatgcatgctgtttccagttgttaagcttgtgacattatcatgtatattccatgcgatagcagcagttatggaaccggttgctgataaacgtattataaaggctgtagccgcattaggaaccgctataagcagtcttacttaccttgttgttatatcacttgttctttttgtactgacaatagtaatgatatgtgcagcaacaagctgattgtggaattatttttttaaaggagttgaggcagatatagaggcagtatatttatggcttaggcaggtaatagttttttatataatatcaacattgtttgttaatgctgttgcatctgataagtataaagaatatataagaatagtcacaaggatgatactgattcttattataatatcgccactaacaggattttggagcaatggaagccttattaagaacaggctctcgatgatatgtaaagattatatggaaataagtaaaaaaacatctgacatatcagaagattttagttacacaatagaagatgcattatcgcagacagtagaactaaaggtcaaagaaatattaaaggataataatatagcttatgacagcataaaagttaatataagcagaaatgccggtcttagcggtaatgaaagaatggctgtatcatcagtggttattaatacaaaaaatataaaaaaaacggatattgaaaatatcggacatgaaatatcagatgaaacaggaatagaatgcagcaatatctgtatcaaatgatatgctggcaggcgtggcagcatattttaaaaggagtgtgggagtataaaagctgattataaaaaaatattgaataaatttggaacagataaaatattaatagtaatactagcaggtgtattgcttatggctgcagcatttccatcaggccattcatcggcttctaaggaaagtagtacaacagccattgaaagtgagagtatgagtacagatatgtatgaggaatatgtagaaaaacggcttgaaaagatacttgcagatgtcgatggggttggaaaagtcaaggtcatgctaagcatcaggaattcaacagaaaaagtactggcaaaagatgaaacatattcagagagcgaaaaaaaagaggcttctgatgggagcagcaatcaaaccaatgatacacaaaatataagcacgcatatattttatgatacttctgatggcagcagaccatatgttgttatggaaaatatgcctgttattgatggcgcgattattgtatgtgaaggtggtgataacaaggagcttgtgaatgatataactaatgcggtatatggacttttgaatgttccagtacataaaataaaagtaatgaaaatgtcatagataaatgcgtatatatgtatgcagaaacaaagattccggtaaaatatttagttggaggtttgttgtgaaaagaataaaaaagaatcaggttataataactgcactcgcaataatgatagcagtagcaggatatatcaattatgctgggaatataacagatataatatcagttagtggaagaggcagcacaggaagcgttgatacagctagtgaaagtaaagacagtgaaatacaggtgccagatgaagagcctgatgatgaaagcatgcttgaaccagggagtgttattcttacatcgggaggtgttgcatcaggtgttatatcagaggcaaagctaaacagggagcagatacgtgcaaagaatacagaaaatcttacaaatattgtaaatgatgccaatcttgacaaatcttctaaaaccgctgctgttaatgaactggctaagatagctgattattcagaaaaggaaatggcaattgaaatactgcttgaagcaaaaggttttaatgatgttgttgcctctgtatctgatacaggcgtagatattgttgttaacaaacagtcgcttgaaacaagtcagaaggcacagattgaggatatagcaaaaagaaagacaggaatgacttctgacaagataaatataaatgtaataaaataatgtgtggattttacaattcatatgatattctgctggtataaaacaagattgtaaaaatatggaatattgaatgtgatttaagaagttgcatttatttataatatttattataatagatgaaaagataacgttgattgacagtcaggaggatattatgacaaaagagtttgaagatagaggcaatacttatactatacatgaaagcaaggatataggagaagtaagggtggctgatgaagttgttgctatcatagctggtcttgctgccacagaggtagatggtgttgaaagcatggcaggtaacataactaatgaacttgtaagcaagcttggaatgaagaatctttcaaaaggtgttaaggttcatgtgggagagcaggatgttgttgttaatcttgcacttaacataaaatatggctgtgagatacctaaggtatcaagtgcagtacaggataaggtaaagacagcgattgaaactatgacaggacttaatgtgtcagaggttaatattaagattgctggtgtgaatattgacaattaaagtacagtgatatttaaaagactgtcctttaagggcagtcttttttaaaaatttattaagaatatacaattgattttgtgtcagttgtatacagagaggacttatatgacaagatcagatatgagagaacacacatttaagatattattccgtgtgccgttccatgacaagaatgaattaagagaacagatagattattattttgatgagtttccggatgttaaggaaaaagaatatgaatatatcagaaaaaaggcacttcttgtatcagagttaagcgatgacattgatgcaaagataaacgaggtttcggagggctggccggtagaaagattgggaaaggctgagcttgcgattatgcgacttgcagtttatgagatgttatatgatgaggatataccagttaatgttgctattaacgaagcagttgaacttgctaagaagtatggttctgatgataatgctgcatcctttgttaacggggtgcttgctaagcttgtatagtatgatacaatgagcgcaagagagccagaaagctgctagcagatatctggcgaacggcgaatgacgattacgatagctgcgatagcagcggagagtagcgaagctacgaatcgtgatataagaataaagaaatgaggattaatatggcacaggtgtatagtgttaaacagattaattcttatattaagaatatgatgcggcaggattttctgcttaaccgcatacaggttaagggggaaatatctaactgcaaatatacggacaagaatggctgcatatttttcacacttaaggatgaagattcaactatatcagttgttatgtatggttctgatgcgtataagctcgacttcagactgaaggatggcatgtcggtagttgttgatggcagaatagacgtatatgtaaataggggtgaataccagttatatgcaaagactgtatcgcaaagtggtatgggagaactgtttaagcaatacgaacagttgaaacaatactatgaggatatgggatactttgctcctgaatataaaagaactattcctaaatatgctaaaagaataggtatagtaacagccagaacaggagcagctatcaaggatataataaagaatgcttatgaaagaaatccatatgttgaattatacctgtattcagtccttgttcagggtaaagaggcaaagtatagcatagccaaaggacttaagtatgttgatagtatgggatatgactgtattatagtcggacgtggcggtggctcaatagaggatttatgggcttttaatgaacctgaagttgtagaagctgtttttaattgcaaaacaccagtcatatcagcagtaggacatgagattgactttacaataacagattttgtggctgatttcagagcaccgacaccatctgctgcagctgttaaggcagtttttgatataagacagcttgaagcggttattgatggttataatgacaggcttatgtatgatatgggtaaaactataacagattacaggaatcgttccgaaaggatgttactttctcttaaagcttttaatccacttgtcagactcaataataaaaagcagcaacttattcatatgagagagaagctggatgttagtatgcaaggcacattaaataaagctaagcacaggcttttgcttttatcagcaagactggatggtgtaagtccattaaaaaagcttgaacaaggatatgcttttgttgaaaatgataaagaagaacatataagttcaatagcggaggttaaacaagctgatgtactatctatacatgtaaaggatggtattataaataccgtggtgaaagatgttaaaaagttttaatatatgaatatagcgaggtattagtgtgaaaaataagatttttcacacgcaagatttgtgcttcgcacaaacttgagatgcgcaaagaagcagcgcaagaatggagtattaatatggctaagtcaccatcaattgaggatacatttgaaaagcttgataatattcttagtgagatggaaagtggagaacttactatgaatgaatcatttaagaagtacaaggaaggtatagagcttgtaaaaaaatgtaattccatgcttgataaggtggaaaaggaaatggttattctaaatgatgataacgattcggagatgatagaaaatgattgattttaagaaagaacttttagaaagaacagcacgcatagataagattgttaattcatatcttccagagataagtggcagagcagaatatattaaatcagccatggattatagtgtacaggcaggtggtaaaagaatccgcccgatgataatgcttgaaacatacagattatgtggtggaacagatgaaaagtgtgtatatccttttatggcagcacttgaaatgatacatacatattcgcttgtccatgatgatcttccagctatggataacgatgattacagaaggggcaagcttacaacacataaaaaatatggtgaggatttcgggatacttgcaggagatggtcttttaaatcttgcatatgaaactatgtttaacgctataaagaatatttcgtcagattatgctgatatagaaaatgcaaaaaagatggcactatattcacaggcggcagcggttatagcatctaaggcaggtgttgatggaatggttggaggccagtcgcttgatgtatatcttacagataagcctatggataaagaacagcttgattatatattcaggttaaaaacaggcgcacttattgaagcagcatttatggcaggtgggattcttgccggatgtgacgaaaaaacacagggattattatgtaaagcaggatataatgtcgggtttgcttttcagatcaaggatgacatccttgatgttacaagcacacaggaagtgttaggaaagccggttttaagtgatgagcggaataataaaacgacttatgtaacattgtatggattagaaaaagcagaaaaagatacttatgacatgtcaaaagaggcgatgggtataataaagtcaataggacataacgagtatcttgaggaacttataaatatgcttatacacagaaataagtagaaatggtgagaggatagctatgatactagagaagatcaataagcctaatgatattaaaaagctttctccaattgaatataatcagctcgcagctgagataagagagttccttatacaaaagataagtgtaacaggtgggcatcttgcatctaatctgggggttgttgaacttactatggccttgcatgtcgtatttaatctgccgcaggataagcttatatgggatgttggccatcagtcttatacccataagatacttacaggacgtaagaaccagtttgatgagcttagaaagttcggtggtatgagtggttttcctaaaagaaatgaaagtgactatgatgcatttgacactggtcacagttcaacatctatttcagctggattaggactggctgaggcaagagatataaaacatggcaattatagtgttgtctctgttataggtgatggtgcacttacaggcggcatggcatatgaagcattaaataatgcatcacatgttaaaggaaattttgttataatacttaacgataatacgatgtcgatatcaaagaatgttggcggcgtttctaatatgctcagcgaaatacgttcatcagattcttattatgaccttaaggaaaatataggaaatgtactatataaattaccaaagggtgataagattgtcggggctattaaaaagacaaaatccaatctgaaacaggttatattacatgattctatgtttgaaagtatgggcatatattatctgggtccggtagatggacatgatatggataagcttataaagatacttaatgtcgctaaaagaataaaaggaccagtgcttgtccatgtagttacacagaaagggcgcggatataaaccggcagaacgtaatccaagcaagtttcatggtataggtccttttgacataaagacaggctgtgaaattaaccagctggatgtgccaacatattcaaaagtcttttcggaagcaatatgtgagatagcaaagaatgatcgtatggttgcagccataacagcagccatgcctgatggtgttggtcttactaagttttcaaaatggtttcctgacagattttttgatgttggaattgcagaggcacatgctgttacttttgcagccggacttgcagcaggtgggttaaaaccagtatttgcggtctattcatcatttttacaaagggcatatgaccagatacttcatgatgtatgtatacaacagcttcatgttgtgtttgcaattgacagagcaggactggtaggaagtgatggtgaaactcatcagggaatatttgatatatcttttctttcttcgattcctaacatgacgatatgcgcacctaagaatgatattgagttaaaagaaatgcttaagtttgcagtagaggattttgatggccctattgcaataagatatccaagaggaagtgcctgtcttttatttcatgagttcaaggcgcctgttgtatatggacattctgagataatgtatgttggaaatgacatgtatcagggagaaagtttaaaagaaagcctgcatactgtaaagtatgatatcgcacttcttgcacttggaagcatggtcataacggctgataatgtaaggaaaagccttatagaacagggatatacagttactcttgtaaatgcacgttttgtaaagccagttgataaggatatgctggattatgtatgccataatcacaggcttatagttacgttggaggaaaatgtatcatctggtggatttggtagaacagtctgtcagtatataagtgattcagaatatgaaaactctgttcttagtatatcgctccctgatgactatattgaacatggaagtgttgatatattaagacatgaaacaggtattgatgaagaaactataatcaggcggattaatgataaatatatacagaattacagtgaaaagtaaaaaatgataagttagaatacagcataatcaaattgcacagaaatggagagaagtatgagcaaggaaagattggatgtcttactggtaaacagaggtcttgcagaatcaagagaaaaagctaaagctattattatgtccggaaatgtatacgtagaaggacaaaaagaggataaggctggctcaaccttcgtagatacagctaatatagaagtaagaggcagtacattaaaatatgtaagccgtggtggactaaaacttgaaaaagcaatggaaaattttgatgttacaatcaaaggaaaaatatgtatggatgtaggctcctcaacaggcgggtttactgattgtatgcttcagaatggagcagttaaagtatattcagttgatgtaggacatgggcagcttgcatggaaactgcgtaacgatgagagagttgtatgcatggaaaaaactaacatacgatatgttacaccagaagatgttgctgataagatagacttttcaagcatagatgtatcgtttatctctcttactaaggtgctgcttccggttaagaatctgcttacagatgatggacagatagtgtgccttataaaaccgcagtttgaagctggaagagaaaaggttggaaaacatggtgttgtaagggataagtcagttcacgaagaagtaataaagatggttattgattatgcaatatcaataggattcgaggtcctcaatcttgaattttctccagtaaaaggaccagaaggtaatattgaatatcttttacatcttcagaagcatacagaaggaacatatgaaaatgttccttttgaaataaaaaatatagtagacaaagcgcatgaaacattgtaatatatattcatagttaactttaagcgctttataatatagaggtatcgatgagaagattttatatagttactaatcggtcaaaggatgcagaacttaagtatacatacagcattattgcatacttaaaagaacatggtgcagagggcatatatgatgaagattcagctgcggttgaaggaacaaagtattgttatacgaatgcagaagttatgccggatgacgttgactgtattatagtacttggtggtgatggaacattaatacaggcggcaagggatcttaatgaaagaaatataccattacttggtgtgaacataggaacattaggatatcttactgatacagatatgaataatgtatatgatacgctcaataaccttattgatgataaatatgaagttgatacacgtatgatgcttgatggtaagatttaccgtgatgataaggttatatatgaggatgttgcactgaatgatgttgtactaagcaggagaggtattctcagggttattgattttgatatatatgttaatggggagtatcttaactcttttgctgcagatggagttattgtttcaactgctacaggttcgacagcctatagtttatcggcaggtggacctattgtgcagccgaatgcaaggcttattatgattacaccgatatgtgcgcatacacttacacaaagaagtattatctttggacaggatgacgaaattgttatccagataaatgataataaaaaattatcagaggaaagagtggctacttatgatggagaaagctattgtaatgttgtcacaggagacagagtggtaataacacgttcagataagactgcaagacttataaagacaagcaggatatcttttcttgaacgaataagaaataaaatgtgattgtatgtagttgatacttatcacaaagtggtaagattggagaattgttgtgagaacagacagacacaagaaaatattagaattaattaacaataacaatataggaacgcaggaagagcttgcagatgcgcttaacaaggctgggtataatgttacacaggcaactgtttcaagagatataagagcgttgaatcttacaaaggtatctgttgatggtgtgagccagaagtatactacattgacagctggcaacccagtaaccaacgataagtacatacgtgtattaaaagaaggttttattgatatggatatggcgcagaatatacttgttataagaacagtttctggtatggccatggcagtatgtgcagcacttgatgcacttaagcttgatgagattgttggttcaatagctggtgacgataccatcatgtgtgccgtaagaacagtcaaggatacaactattgttatgaacaagttaagaaagcttataaagatataagtatcgttatgtttgctgccacttaagaatatggaggcaggttggaggaatatgcttactaatttacatgttaagaatcttgcattaatagaagaggaaaatgttgattttgaggaaggacttaacatattatcaggagagactggtgcaggaaagtctattattcttggttctattaatgcagcacttggtgctaaaacttcaccggattttataaggactggtgcagaatacggattagccgaactgatgtttgatataggcgataaaaaaacattagataagataaaagaacttggggttcttgatatagaagatggtgaacttcttatatcaagaaaaataactccaacacgttcacagattaaggtgaatggtcagaattttacagcagcccagacacagaagctggcaagatatcttatagacatgcatgggcagcatgataatcagattcttatggatgattcagcacatattaatgttgttgatgaatattgcctcgatgatatctccgctcttaaggagatgatgaagaacgattaccagcactatgtagaatgtaagaatgaactaagcgaaatggacaaagataatgatgaaaggcaaagagaaatatcatttcttgagtatgaagtcaacgaaataacagctgcaggattaaaaaaaggcgaggacgaagaacttgaagcacaattcaagaagcttaacaaccggcagaagataatgaatgaattatctggtgctgatatgctgcttaattcaggagaagataatatcagtgatatgctgggaatggttgttaaggcacttgttaatgcagcagagtatgatgagtcacttaaaaatccattagaaatgttacaggatgttgagagccttattatggatgtatcgcatgatataagcacatatattgatgatagtgattatgatgatgctgcactcaacgacatacagtacagacttgatacagttaatgagcttaagaataagtatggcggaactattgagaatgtttttacatcgcttaaacaaaaagaaaaaaagcttgatgaatattataattatgatgaaatcttaaagaaaagacaggaagcttatgaaaatgcttataaaaaagcactgcagacagctgaaatgttaagtgatacaagaaaaaaggctgcagacagacttacaacagaattcatagagtctttaaaaaatcttaattttcttgatgtgagattcagaatagattttgaaaaaagcaataatattacttctaatgggtatgacttggtcagatttatgatatcaacgaatccaggacaggatttacgtccactttcaaagatagcctcaggtggcgaactttcacgtataatgcttgcaataaaaacggtcatggcgggtgatgacagcaaaacacttatatttgatgagatagatgctggaataagcggaagaacagcacagatggtttctaatcagcttgcaagacttt

SEQ ID NO: 489 - DNA, 5439 bp, Unknown
  gut microbiota DNA sequence
acatcttccacagattgcttctatggcagatgcacattatactatagagaaaacagttcatgataataaaacatatagtcagatatcaagagttgataaagaagacagcatatatgagctggcgcgtatgttatcaggaagtgaggttacagcttcggtacttgccaatgcaagagaattaaaaaagacttcagaagcttttaaagataatatgatgatgtagaagcttatgataatacctgagatattactcagatacatttaacatattttcaatatatataccatatccgctttttgaatcatctattagaacatgagtcacagcaccaataagtcttccatcctgtattataggacatcctgacataccctggactattccgttggtcatgtcaataagcttgtcagaggttactttgaaggatatgttttttgaattactgtttccaagagaagttatttctatatcatagtcttcatacttattattacggtagaatcttatataagctcggcctttgtgggtcatataacgatatccaacattcataagctgaaggttgtgcctttgacatactgaagcatcgattgttccatatatgccatagtcactgtttttactgatggtacctataggctgtgagtttttataatcaataattccctgaagctcaccaggtgttccatcctgtccttttactattgaaatgatatgagtgttatatattttaccgccactgatatccataacttttccagtagagttatctgttattccgtggcctaatgcaccaaaatgatatgactggtcaatatatgttaatgtaccgattccctgagcatcatcttttatccataatccaagcttgtacatattatcagaagctaaaactggtgttacagatacattagatatataaccattgcgcattatttccaggttgaggctgtttccttcagaataagcgataatatctgaaaaatcttttttggaatttattttctcgttattaacggataatatataatcgccttttgtcagaatatcagcgcaaggattaaccgctccataatatacagaatctattgagtcggttttaacaactaaaataccattactttttagatataatccagcctggaagccacaaggataaacctgttgttcatttaccacatttacatgtacagtttttaaaaatattaatccgaatagttttaaatccatattataattagcgggttcgcctgatataaatgtaacttcctgattaaaatcagcacttaattcattaccagctctattgactgatgagttatagacactaccagtaacaggtactgataaattaaaggttgtattactttgttctgtgatatatatattttcaggaaaatttctcttaatataaccggtatatgttacaacgcataataaaagtgttgtgaatattgatgaaataaatatatatttaaaaataagttttctcttatacatactaatcctcatttctgtgcactgcttttgcacataactggtttttgtcttataaatattatttgcagaaatacttattttatataaagactgaatggttaaatatagtaaatagttttgtcgtattttgtcgatagttgcgatgtgttttaattgctaaggaattattataatagtataattattactgcgaatgtagatgagatatttgtgaattaacatataaatactaatcgcaaaaagcatttacagatgtattaataatattgtacaaggtgaggggaaaatatgaattcattaaaggtagttatagcggatgataacgaaaaaatggtagacgttataaaagaagttattaatgatgagcctgacatggaagtggttggaacggctgctaatggagaagaaacaataaatataataaaaaatacttctcctgatgtggttcttcttgatattatcatgccacagctggatgggataagtgtcatgcaaagaatcagagatgacaagacatgtgtctcgcctgcatttatcgtcataagtgcagttggaatggaggatgtcacagaggatgcatttgataaaggggcagcatattatattatgaagccttttgataatgaaatgcttattaaccgtattaaatatgtcggaaaggtacataacgcaccagcagataataaaaggaatatcgtgattaaggatacagttaatcataaaaaatatgttcttgaaaatgagataacaggcatgatacatgaaataggagtgcctgcacatataaagggttatcaatatctgagagaatcaattacactcgcagtcaatgatccggatattataaacagtataacaaagattctatatccaactatagcaaaaaaatttgaaacaacgccaagcagagttgagcgtgcaataagacatgctattgaagtggcatggaacagaggcaatcctgacgtgcttaataatctttttggttatacaataagtaatggcaagggaaaaccaactaattctgagtttatagcacttattgccgacaatatccgtcttacacatccgatatgatgaaagttattctttgaaatatcaatatgaaaaatgtgaaaaaatgttgaatttagtgcttaaatcatagatttttccttgaaatattacaactcctatattataatattaacgtatttgtaaaaatgttttaacataattgtaataaataggagtttatatgtatagaagagctttaaaaacagttgcagcagcagcacttataacatcaatcatgggaacatctgtatttgcagatgatcttactacattaaagagtcagcagcaggaggcacagcagaaagttgatgacctgacacagcagttagcatatcttttaagtgagatagataatcttgaacaggatatggctgatctggctgatgaagtagatagaaccaatgttgaacttgaggaagcagaaagagtacagaaaaagcagtttgaggatactaagttaagaattcagtatatgtatgaagatcagtctgcatctatgactgaggtctttcttactgcagctgatatgagcgatgttatcaacaaagcaagctatatgcagcaggtatatgagtatgatcgtaacaagcttgaagagatggctgatacagcacgttccattgctgattataagtcaacacttgataagaagcaggcatcacttgatgagaagcagaaagagcttactaataaacaggcaacattatatacagcactggataaggctaagtcagataaggaagatgccgatgctaagtatcaggaggctgctgatcttgcagaaagagcggccagacagagaagggctgcatctgcggctgctaacgcttctaaggtgacaacagtttcatctgttccaacaacagctaacaataattcagcagttgcttcaaagattgtatcaactgcatatcagtatattggagtaccttatagaagtggtggatcttcaccaagtggatttgattgttcaggattcacatcatacgtaatggcacagtgtggaatcggtggagtacctcgttcatctggttcacaggcatatggtggtgcatctgtatctggaggtattagtgcagcacagccaggcgatatcatatgttatccaggtcatgttggtatatatatcggtggtggtcagatgattcatgcatctgttcctggagattatgtaaaagtttcatctgttaatattggaatgagtattacagctgtaagaagatattggtaaaatgtatagcatatattgaataaaatattacattgatagtatgtaatttgttcaatatatgctataatattaatcagatatatataagttaccagaataatttttgatatatgttatttatataacatatagaaaggggattatatgaagaatgttttgtttattgcttcggaagcagtaccttttattaaaacaggaggattagctgatgtagttggttcactgccaaagtactttaacaaggatgagtttgatgtccgtgttatgattccaaagtatacatgtataccatgggaatatagggaaaagatggtatataaaacacatttctatattgatcttgcatggcgtacacagtatgtaggcgtttttgaaatggagtatgacggagttatattttattttattgataatgaattttattttggaggtccaaagccatatagctggattcatgaagatattgaaaagtttgcattctttagcaaggcagcgctttcagctattccagtcataggatttaagccagatattatacattgtaatgactggcagacaggacttattccggtttatcttcatgaaagatttgcaggtggagatttctatcatggcgttaaatctattatgacaatacataatcttaaattccagggtatatgggatcttaagaaggttaaagatatcacaggtcttgatgacagttacttcacttctgacaagcttgaggcatatgatgatgctaactaccttaaaggtggcatagtgtatgccgataaggtgacaacagtcagtgagacatacgctgaagaaattaagactcctttttatggagagaatcttgatggacttatgaatgcaagggctaatgcactttgcggaatagtaaatggtattgattatgaggtatataatcctaagacagatacttcactggcagctaattatgaccagataactttccgtaaggaaaagtggaagaataaagttgctttacagaaagaacttggtcttacacaggataaaggtaaattcatgataggcatagtttcaagacttacagatcagaagggacttgatcttatagcttatgtcatggacgagttatgtgctgatgatatacagcttgttgtacttggtacgggtgatgaaaagtatgagaatatgttcagacattatgattggaaatataatgacagagtatcagctaatatatactactcagaggaaatgtcacataagatatatgcggcatgtgatgcatttcttatgccatcactgtttgaaccatgcggacttagccagcttatgtcattaagatatggaacagttcctattgttagggaaacaggtggacttaaggatacagtagaaccttataatgaatacgaaagcacaggtacaggtttctcgtttgctaattataatgcacatgagatgcttagtatagttaattatgctaaaagcgtatactataatcataagagagagtggaataagattgttgacagaggcatgaaaaaagatttctcatggaagagttctgcaaagaagtatgaggaactttataattctttataatatgatgaaacataagaactaaccacttgacttaaagtgatataatatgctattatatcacttgtctgcg

SEQ ID NO: 490 - DNA, 201 bp, Unknown
  gut microbiota DNA sequence
tcaaaacacaattacgatgctgataacccgaatgattattaaatcattcaataacaatcaaatatctatttctacataaaccatccgttaatcacttaaccgatggtttatgtctttttcaatccaaaaattctatgatagttatatcaactataaaggatgtcgctattgatgaaagaaagtgaagaacgaagcagtaat

SEQ ID NO: 491 - DNA, 217 bp, Unknown
  gut microbiota DNA sequence
ttgtataaagagaagtatatcatatgtatatagcaaaaagaagattgtcgattgatgggagaaaaaggcgataagttgtaattgaacaacagcgaaaaaagggttatcatttatgtattaaaaattatgtctgggaggaaaatacatggcagataaagaggaaatcaaaacactggaggaattagaggaaaaaggaagagtactgcgggagtacaaa

SEQ ID NO: 492 - DNA, 7194 bp, Unknown
  gut microbiota DNA sequence
gctttaaagcatatatattcacacagcggcataactatatacaatatatgccagaatcagctgtataacaagtatagctggcactcctattctgaacttattatgtttagttttatgtctcactatgtacatagcagacagtgcccccacagaaccacctatagccgccagcagtataagcgttctttctggaatcctccaggcatgatgtactgccttatatttgtccagtgcatagactgcaaatgtaaatatattaataaatacaagccatgcctcaattacctttaataaatccatatctgaccttctctttctttgtcatcttagcaatcatactgctgcttattccgagcttattaatcaaatcaactatcttcattttttaaccctgctatcttcgtcaaaacgaaaacagcagggttaatcctgattaaaattctattatatattacatcctttattcaacgtcttcaaactgcgaattataaagtccggcatagaagccaccctttgcaagcagctcttcgtgatttccctgttctacgatatctccatccttcataacaagaataatatctgcatccttaatagtagaaagcctgtgtgctataacaaagcttgttcttcccttcataaggttatccatagcattctgtatctgtatctctgttcttgtatcaactgaagatgttgcttcatcaagaataagaataggattatcagccagtatcgctcttgcgatagtaagtaactgtttctgtccctgtgatacattgcttgcatcctcattaagttccatattataaccacctggaagtgtttctatgaaatggtgtgcatgcgcagccttagcagcggcaataacctcttcatcagaagcctccagcttaccatatcttatattttccataatggtatccttatacagccatgtatcctgtaataccataccgaaagcatctcttagctctcgtctgttgaaatcctttatgttatgtccatctatttttatttcacctgcattaacatcatagaatctcataagaagcttaaccatagttgtcttaccagcacctgtcggacctactattgcaaccttctggcctggtttaaccttagcacagaaatctttgataataacctgatcctccttataaccgaatcttacatggtcgaattctacttctcccctgatattatctgttgaaacaggattctttactatctgttcctcttcctcttcgttaaggaattcaaatactctttcagatgctgctgccattgactgtacctgattaataacctgtgcaatctgtgttattggctgtgtaaaattccttacatactgtataaatgcctgaatatcaccaatcgttataacaccatttatagcaagaagtccacctgaaagtgcaacacctgcataaccaagattgccaacaaatgccataataggctgcatcattcctgagaagaactgtgacttccaggctgatgaatataaaacattattagtcctgttgaattcatctaccatatccttctctttattgaaggactttacaaccatatgtccaccatatgtttcctctatctgaccatttatatgtcccagatattcctgctgtgtcttaaagtaattctgtgacttctttataacaaatgatataagcccaactgatattggaagtatgacaatagcaataatagtcataagtggtgaaatacttaacatcatgataagtacaccaatcatagttgctgttgatgttataatcgttgttatgctctgattaagtcccataccaagagtatcaacatcattagttattcttgaaagaacctctccatatgtcctgctctcgaagtacttcattggcatacggtttattttctctgatatttccttacgaagcctgtaacatatcttctgtgaaatgcctgtcataatccagccctggacaaaattaaatattgcgctgcagacatataagccgagtacaatcaaaagaatctttcctatatagccaaagtcaataccacctgtacctgctattttcctcataagaccttctgaaagacctgttgttgcctttccaagtacctttggtcctgctacattgaatatcgttgaggctgctgccataatcataactataaatatagctatcttatagcttcctacatactttatgagcttacctattgagcccttgaaatccttagccttctcagctggcatcatacccctgcccggtccacctggtcttctatgtctgggagtctgcttatatgaattattgtctgccataattatgcttcctcctttccatctgatatagtgtttacatctgatatattatgctcggcattatatgaagcttcttcatctgacttattgagcttttcgcccacagctactgaattctcaagctcgctggctgatagctgcgacctggcaatctgctggtatacctcacaattcttcataagctcttcgtgtgtgcccttacctacaatcctgccctcatccataacaagtatctgctctgcatgaagaatagtacttattctctgtgcaacaatgattactgtactatctgtaacctttgaggcaagcgcttttcttaatgctgcatccgtctttaaatcaagtgctgaaaagctatcatcaaatataaatatccttggattccttgctatagctcttgctatagataatctctgcttctgtccacctgaaacattcgtaccaccctgtgcaataggtgcttcatactttcctgccttttcctctatgaactcagaagcctgtgcaatatctgctgcctgtttaacttcttcaatcgaagcattagctgcaccatacttaatattagattcaattgtgcctgagaaaagaactcccttctgtggaacatatccaagctcatctcttaaatcctgcatagatatatttcgtatatcttcaccatcaagcgtgatagaaccttctgtcacatcatataatcttggaataagattaacaagtgttgacttgccacagccggtacttcctataatagctgttgtctttcctggctctgccacgaaatctatgtctgaaagagcattttcagcagctcctggatacttaaagcttacatgactgaaggtaagtaagcccttatgttccttaagtatcttaggattcctgcaatcccttattgatgactgagtgttgattacctcatctatacggtctgccgccacaatcgctcttggaagcataatcgacatcatagtaagcataaggaatgacataactatctgcatagcatatgtgataaatgcagtcattgaaccaacctgcataacaccgctgtcaattctatgtgcagcaacccatactattcctactgaaagacaattcataataagcatcattaccggcatcataaatgtcataactctgttagtaaaaagcattgtccttgtaagctctttattcgcattatcgaatctttcttcttccttcttctctcttccaaatgcccttataactgataaacctgtaagtatttctcttgatactaagttaacattatcaacaagcttctgcatctgtttaaacttaggcatggcaattgacataagaagaagcacaaagccaactataacaagtactgcaagagcaataacccactccatgccagctcctgttgacataacctttaacacaccacctacaccaagtattggcgcatagagcaccattcttaatgtaagcacacaaaccatctgtatctgctgtacatcattcgttgtacgtgtaataagtgaggctgttgagaacttatcaagctccgcattagagaagcccataacattcttatatacctgtccccttaagtcacgtcctacacctgcaccgacacgcgatgcaaaaaatgcaactaagactgtacatattgcaatcataaatgccatacctatcatctttatgcctgaaagcagcagataatgtgtctgtatagccttcatatccataccagcctttgaatccatagacttagcatatgctctacccatagatgctacaagtgatgaacccatagtgtcaaatgttgatttaaaattatcacgcatagacacaagtgtatcctttgtcattctgccagtatcatacatagctttgaataccattctcatatctacacactcagttgaaaccatattgccattggcatcctctacatccttgtaaaaggattctaattcaatgcccattttctttccaatatctgataccggcacatcagcaagtgtttttacatcaacccccatctgtgctgccatctgttccttaaactgtgctgctgttactgaagacatctgattattaataataagtgacattgctaatgtatcatcatattcatccagctttttttcactcttctcagaaagaatatacatatctccatcctgttcataacagctttcccatatgtttatttcttcatctgtcataaacattttagcaatatcatattcatccttagttatcttttctggaatactatgccctatgccgccattctgaataccaacatcaataatatcagatgtatactgtggcaatgcaagatccccatttgcctgtaatataagcaatacaagtattataattactgacttccagtatggagcaatactttttaatattctgctcataaccgttcctttcttcctcaagatttcttttaggctttcttatataaccttataactgatattttaaaatgatagcattattgagaaaatatgtaaattaaggaaataaaaagcatttattaagactttgtaaaattgtatacaatttaaagcaaaatatatcttgtatacaacatttatatatgttatcatacaaaacgagcgttattcatatgaaaatgcatcagaaccaagtttattatcatcttactgatactttatattcactacaaagcataatggtgtgcgacctgtaaaggcgtgtaagcattacatatattgaattcaggtatctgtataatcagttatgatttcattttattgtataattcataacttattctgttagttctaaacattttctttgcatttccatttatagaacgctaataataataatgtctgaaagacaggctggatattacactaactccaccattttatcaggcgaaaaggagaatattatgagtaacattgaaacaaacaacacatcaatggcaaagaaaacatttaccactaagtatatggtagagcttgccgctatgatagccatcattatcatcatggccttcacaccacttggctacatcaagcttcctggtcttactattacattcctgacaattccagtcgctgtaggtgccataatacttggaccagttggtggtcttatatgtggtcttacattcggtttaacaagtctttatcaggctgtaaccggtggctcagtatttacatttgctttatttaatcttaatcctgtgtttactataatacttacaattgtaccaagagcacttgaaggtctgcttacaggtcttatcttcaaagttcttcacaacataaagagtgtccagaagatttcttattatatagcaagcctttgctgccctcttcttaacacattactctttatgagcacacttgtggcgcttttctacagaacagacttcatccagacttatgttgccaagtttggtgttggcaacccattctcattcgtagttgccttcgttggaacacagggtgctattgaggccgttgtatgctttgttgttgccagcatacttgcaagaacattatatgcagtacttgttaagaattcttaattattgttaggtaaagctgttttatatcagtctataaaaaatagaaagctgcgttggctattgccatacagctttctatttttacttttatactaatcgtctgatatatacaaaatatcattttctaagttttattaagctttactaagctttatttcagggattgctccgatttcttacgtgactgtttattttcatacatataataatctgccttatccaataacatctgtattgtacactcactatcagcatctgatattgcccatccacatgcatagtcaattggcatttggttgtcgcttctgtttaatctgtctttttccatgcttagctgctttaatatatcctcaatctccgctttgcttgtattgtagataactaccatgaattcatctccaccatatcttccaacgaaagcttcctgtggaataactctgcgtaaaagatgggcaaaattaaatataagctgatctccctttgaatgtccctttgtatcattaataatcttaagattatttaaatcaaacattaagcacgctgtatgctcggcaaccttttccttattgttaagaagctcctcacaggcatctttgtttggcaatcccgtatgggcatctgtatatgctctttgttctaacagtttgtttaatacagccattttcatggctgttaaagtctgtataataatcaatattacaagacatagcatgtcaagtactgacagcagctctatggtacgaattttaatagctatcctttctgaatagctttccgcagcggatactgtttcatctgccatcttaaaatatatttcactcatattaacaatatccgtattttgatagcccacttctcttactgctttgatttctttttttaattcttcccagtagtcacttagaatatataatttgtcattatattcattgtcacgtagatttacaagattgtattgtccatccttatacttcaaatcatcgagaatatcatcaagatatttaatcaattcatcattctgatttcccgtaatttccagctttacttcacgctgtgtagctccacgtacaagacctgcataatttattacacgggctgtcccctgcagcctgctgatattcaccataataaatatgataagaactatcagcagcaatattaaacagctttgtataatccctattatattcttgcttttcttatatgattgttcttctttctccataataacactccaataatattcaatttactgaatattatttccagttttatttgcacatcatatagttcttttttattataatataataatcatataaataag

SEQ ID NO: 493 - DNA, 4430 bp, Unknown
  gut microbiota DNA sequence
ctgattttcttctatctgcgaatcggacagattatttaactgcacctcttcgattttatcagaatgatgatcttatgaagcagattcaatcagtaattgcagcagatagcaataaaaaataaaatctcgtggggcatatcacttagtgcgacagtcccacgagaatacaagaattattctatttttatcaatctgctgctttcccatgttctgccagttccataacttccttccatgctggggagaacagataataacctatcattgcaaacattccaaagctgaaggaaattgggaaacacagcattacccaggttccatcaaaatatttgctgataatatatgcacttggaattctgactgcccaaagcataagaatattgacaatagtagtataacgtacctttccagttccatttacaatagatattatacagttgaagatagcgaaaaaccactgtgacagcagcataacaacaatatgtctgcttgcatacatcagtactatttcatctgatgaaaagaaacgtatcagaggtctatgtatcataatgaagaataatccaaagcttagagtaatcactcctgaacataatggaattctccagtgtccttccttgattctatcgtacttctttgcaccataattctgtcctgagaatgtggtggcagccgaagataatcctgtaattgctatattagcgcagcctgtgattcttcctgctactgcacctcctgccataaatatagcgccctgagagttgttaaatgtctgtaacgcaacatgtcctaatgaatatagcgaattattaagtccaacaggaaggcctatagccagaatattcttcatcattttccctgagaatcttctaggcaggaatgtaaactgaatctctggaaacatctttcttatataagtaatgcttacaagccatgaaataaacatagcaatacttgtagctagagctgcacctgccacatccatgccaaagcctgcaacaaacactaaatcaaacactatattggaaatacaagatacaacaagaaaccacaatgaagccttgctatccccaagtcctcttaatattccagcattcatgttatagccaagattaccaagcgtacctaagaatactaatcgcgtatagattagtgcagcatcccatacatcctgcggaacattcataaattcaagaatatacggtgctgcaaaccatccaagaattccaatcggaattcctataatatatataaaagttattgaagttccacatattgaaacaactttatccgattcctttgcaccggcatattgtgatataagaatggatacacctgttcctattcctaagaaaacacacaacaatacctcaaccggctgtgaacttgttccaaccgctgctaaggatgtatcaccacaatatttacctattacaagtgcatcgaccgttgtatataactgctgcaaaacatttcctataataataggtatagcaaacagtattatatttttcatgatatgacctgtcgtcatatcaatctttcctttacgtgattctgccataacttactccttattataaacaacccatctatttttgttatttataataatactgtaatcaagcagctttttctagtgatttattgtgcttagtacagaaaaagtatccactttatatttattttaattcctcaaacttttcctgcattgttttatttcctctggtaagctttttaatgctgacctcatccaccttattattagctattcttaactggttgtcagaacctaacagctctttttttaccttttcaagatgctgtattgtcttatcaatctcatcaacagctttatcaaaatgcgaatgtgcaatctcatagttcctgctgaagtcactcttaaaattcataagcttttcttcaaaatcagaaatatcaatattctggtttctgacaactgcaagctcctgtttatactccattgcattcatggcagcattcctgagtaaagttataatcggtataaagcactgtggtcttacgacatacatcttttcatatttataagaaacatcaacgattcctgcattaaacaactcattgtcactttcaagcattgaaacaagcaccgcatattcgcagttcttctgcttgcggtccttatccagctccttatagaaatcctcattcttatgcttagttgcagtctcatccatttcatttttcatttcaaacataatggatataagttcaacaccattttcatcagtctcacgatatatataatcgcccttgcttccgcttcttgaatcattatccttttcaaaatatgcattcctgaaagccgtagcccttaactggttaaactgtatctcacaatgctgctctaaggtttcaccaaccatctttgtagacatctttgttttaagatccctgtaataagcaatctgctcatccttctgctctaaaaggagctttcctttatccttttcatgtgtcagctggctttccagttctttcttttcttcttcaaccttcttaacagcctccattacagcaattgtttttttatcctcactactatctagctgtgcctgaagctgtactgccctgtctgttgccttttcaagctggctttttagtttctggatttctttatcgtattctttctgactcataagcttaatctcattttccttagcttccatctcaagcctatgtgtcatcatcatatgctcttttagttcggatatacgcttttcaatatctttttcaaattccttatcccttatctgctgtataattgaacttaactctgtatcgtctactgtaaatgcctgtccacaatgaggacactttaattctgccatataaaacctcctgtttagctgatattattacatatatatttccattgatgtactcttaagcattatacactattctgttatatgcacaaatactaaatatggtatgtaaagatactaaacaagctgtggacagacattaaataagcgactgtttatttttcaagctcacgtgaaagattaaccatctcaatagctccctctgcacactcaaagcccttattgccagcctttgtaccagcacgttctatagcctgctctatagtatctgttgtaagaacaccaaacataactggtatatctgaattaagtgatacactggctatcccctttgaaacctctgcacacacataatcataatggctcgttgctcctcttatgacagcaccaagacatattactgcatcatacttcccgctttttgccatctttgatgctataagtggaatctcaaatgctcctggaacccatgcaagatcaatattttcttcgcttacaccatgtcttacaagaccatcatgtgcaccacctataagcttcgatacgatgaattcgttaaatcttgctgccactattcctactcttgttccattgtctactaattttccttctaatactctcatgattttaatctccttttaaatttatatgatactagtatattttttataatttacagcatatgacccattctaattttctttgtcttaagatagaagctgtcatatggtgttgtttccattttaatcggaactctttcatttatctgcatgccaaagtctgacagctgatataccttatcaggattgttcgtaagaagtcttaatgttttagctccaagatcttttagtatctgtgcacctatgtaatactctctcatatcacctggaaagccaagtgctatattagcatcaagcgtatccataccttcatcctgaagtgcatatgcccttaacttattcacaagacctatgcctcttccttcctgcctcatatatagcagaatacctcttccttcttcattaatctgtgtcatggcagaagcaagctgctgtccacaatcacatttcagcgaaccaaatgcatctccagtaagacattctgaatgaacacggcacaaaagattattgccatcacctatgtcacccttaacaagcgcaacatgatgctcaccattcagcttattgatataacaatgtgctgtaaactcaccatatttagttggcatctttgtcacagccacacactcaacaagcttttcatttctttttctatactcctggatggcttttatagttataaatttcagattccatttttctgaaagctctataaggtcatccctcctcatcatagttccatcatccttcatgatctcgcagcacaatccacactcctttaagccagctatacgcataagatctactgtcgcttcggtatgtccgtttctttcaagaactccgtttttctttgcaaccagtggaaagttatgtcctggtcttctaaagtcctgtggaactgctgtgtcactcacaacacttcttgttgtataccctctct

SEQ ID NO: 494 - DNA, 210 bp, Unknown
  gut microbiota DNA sequence
ttacacctcctctgctcggatatgaccaagacgaaaatggagatcttgtaatcaatccacatgaagctaaaattgtgcagcttattttttatatgtatctgaatggaagcagtactcaacaaattgctgattctttgacagaactcggttgtaaaacaaaaaagaataatgatgtctggtcatccagtaccatactacaaatccttcaaa

SEQ ID NO: 495 - DNA, 216 bp, Unknown
  gut microbiota DNA sequence
atataattatggatggaaataccgaagatttacaaaagtttgttccccaagtgcattttgagcaaatacctattaaaaatttatgttcaaatcaagattatcaacgtaatctttccatcaaacacgttcagcgtgctgcagctaattttgacctttatcagataaaccctgtaaaagtaagtagacgtgatgggataaattatgtgttcaacggac

SEQ ID NO: 496 - DNA, 409 bp, Unknown
  gut microbiota DNA sequence
cgtaaaacacgatcaagagtgtgaaaaccatatttttcatagatattaattaaagtggatacagcacatatacctccggggcgagaggaagaagtaatagtgagatcatatgattcaacaaggtcacgaataataagttctctatcattaccagcttcaatattagccatgaatatttcataaggtaataacgatttgacatatttcatctgatttgcaaaaatatctgcttcttgggtgtaaacaagatcatcataaaccatacaccagacaggagtttctcttgatccagagacgagagcaacaatctctatagtgtgttgtccgttgaacacataatttatcccatcacgtctacttacttttacagggtttatctgataaaggtcaaaattagctgcagcacgct

SEQ ID NO: 497 - DNA, 1495 bp, Unknown
  gut microbiota DNA sequence
actttataatctgccagaagattcttatagacatttgaaaacattgcgacttcaattttttctccatgatatgcctttaaatctacagcatatgctccaccaagcttgatatcaaaattcttcttaccatcaatatcgtattcagtacgactttcatagatgtaatcagactgctttttctctgatttctcattcgaaagtaattcatctactgatatctggaagagagctgctattgccatcagatttgcaatatccggtgttcctgttccgttctcccatttcgacaccgcctgtcttgtcacattacatgcctcagcaatgtcatcctgtgtaagctgattcttttttctgtaaaacttaatattgtcacctatcaaaataagtacctccaattcaatttatacccaaaattataccgacaggtggctgaaagtaaagaaaacattggttgcaaacgcgcaactttgggatggttgctattcaatcttgctttttatttctataaagcatatatcttttctgtcccaagatgctcaaatggtctaaacagttctcttaaggaatctgacttcgaccaatcaatcttagaaacaaatgttccaaatgagcgcattgcatttttaggatttacctgattgagaagaaatttccatttccattcccatacacgccttctgctttgattccgtctgtgtcttttctttcacctcttccgcagcgtacactccctgttgtgttttctttgaaaaaaagacggacatacatgcccgccttctccatggttattttctcgtttcattttttaactatcgtttctatgaattcaaattttctctgcgtttctttacggtaataatcaatcccgttgcggaaagaattaatagtataaacagccatacactcggtgtgttgtccccggttttaggtgcagtcacatccttcttatcagttccactcgatggcttgtcatcagaggaatcgctattgttattgtcattctggttgttatcactgttatcagaggtatttgctttgatggtaaatgtggtgcttgcagaaccatccgtccaaaggatttcaactgtattggttcctgccgaaagtgtattcaggtaggaagctttcagtgtgataatggtagagccttcctttgcagtgtagttgctcctgtctatcaaatttccgtccaccttaactccggtaaacttggagaagtctccgttaccccggatggtgatattaccatcactgtcatgcgtccaactactgtttgctccatcaataatctgataggtgttattcggtgtgtcaggattatcggaaccgcccgcatcctgtacggtcaatgttgcggaattactctctacgtttcctgcgctgtttgaaacaacacacttatacttaaatccgttgcagcttatattgactgtggatgtggtatagctcgttgccgttgcaccgtcaatgtttacccatcctttcccatcatttc

SEQ ID NO: 498 - DNA, 11117 bp, Unknown
  gut microbiota DNA sequence
aaactttgggatactcccaggattagaaaatccggtcaggatacttgtcagtacctgaccggatgtctgcttttattttgcttttaaataagcggtcttgttaagatttagctgttttaaaaatcaaacttagttattaaccccatgatgaacatcttctgttgatgttgtaagtggaagaaatgtatatccgttagcaagaccccactgtatgatacgttcaacagcgttgacactgaagccttttatatcatgctgaagtacgacagatacattatggctcttcattccgtttacaacgttctggtatacttcttccgtgcttgttgttccaccggcatcaccgctggatacattccagtcaaaatatttgtatccctggtcagttacagcttttgtaagagttgtcataatgccactacagtactttaagctcacggtgttagaacttccaccagggaatcgtataagcttaggacgctgtcctgtctgtgcatatataatatcggacatttcgttaagatcagcaaaataagcatcaacacttgaatatattttcttataatcatgtgaagcactgtggatagcaactgtgtggccagcagcagcctctttggctatcatattttcataaccactgttaacatttgttacaaagaatgtaactttaacattgtatttgtcaagaatatctaataactgctgtgtatgtgcacctggtccatcatcaaaagtaagataaacgactttgtttccagatgaagttgtggctgtctgttttacagcttcaacagtaacagttctgtctatagaagtttcattgccgaacttatctgtaacagagtatgttattgtgtaggttcctgcacggtatgtagaaatattatctgatacagaaacactgtcagatatatcattaccatgggaatcttttgcagtacatcccggatcttcaaatctggtaccagcctttatagtaatatcagaatctccatttagtgtgatggtaggtgctatgccatcattatattctattgtacgttgtacagaggttttattgccagatgaatcgctgaccgtataggtgattacattcttgtcttcagttctttttatcttgctggtaatatcaccatcatagttatcggtggcagtaaaaccctcttcctgatatgtttcaccagttttaggataatatccgtcaatcttattgagttcgattataggagcctttgtatcaactatttttacctctcttgatttttggacagaaaaaataccttttttagctttataatgtatatgataggttcctaatttagatgaatctacgcttcctttaatagtaacattcaacggaacatttttggatgcaggagtgttgaaagctgctgttgcaccctgttctgtataagtatcaccatattctattgtctcttttggactgccatttaaattaatattaatattgaaaagtgaaagaaacaatataataaggaagagtaatgtgacaactattccagtaacagctatcacaagttttttgttcttcttaaagaattctttagtagccataggtttaatctcctaacttattattgtagctaaagtattatattacttttttgaaaaaaaattaacacttaattgaaaaaaacttaaaaaatcttaagaaaaatcttaagaaaaaatcgcatgtaatttaatcatataaatattgttatgttaataatataacaatgttgagcgtatagtgaattaattaaagaaatagtaaatgataaatctgaaattttatataaaatataaatcttttattaaaaaaatatcatatgtttgataaattacaaaaatacgtacaatagatttgacataatgactttacttttttgtcgaataatactaaaatattgataagagagatgtttatctcatatttcgattaggaggtatatataacaatggctagagaaaaacagtcaatggatggtaatacagccgctgcacacgtagcatatgcgtttacagaagtagctggtatttatcctatcactccttccagcccaatggcagacgttgttgaccagtggtcagcagctggaagaaagaatatttttggtaatacagtaaaggtaacagaaatgcagtctgaagcaggtgctgctggtacagtacatggttcacttgcagctggtgctcttacaacaacattcacagcttcacagggtcttttacttatgattcctaatatgtataagattgctgctgaacagcttccttgtgtatttgatgtatcagctcgtacagttgctacacagtcacttaacatttttggtgatcatagtgatgtttatgcatgtcgtcagacaggttttgctatgcttgctgagacaaatccacaggaagttatggacttaagcccagttgcacatcttgcagctattgatggcaaggttccattcatcaacttctttgatggtttccgtacatcacacgagattcagaagattgaaaagtgggattacgaagatcttaaggaaatgtgcccaatggacaaggttgaagagttccgtgctcatgcacttaaccctaacaagccagctatgcgtggttcacatgaaaacggagatgtattcttccagcatcgtgaagcatgtaacacagtatatgatgaacttccagaagtagtagaaaagtacatgaagaaggttaacgagaagcttggtactaactacgacttatttaactactatggtgcacctgatgcagacagagttatcgtagctatgggttctatcaacgacgttgcagaagaagttattgattacttaacagctaagggtgagaaggttggtcttgttaaagtaagactttaccgtccatggtcatctaaggcactcttaaaggttcttcctaagacagctaagaaggttgctgttcttgacagaactaaggaaccaggatcacttggtgagccactttaccttgatgttgctacaacacttcgtgaagcaggtcttaacgatatcacattagttggtggacgttatggtttaggttcaaaggatactcctccttcatcagtattcgctgtatataaggaattagagaaggatgagccaaagaacagattcacaatcggtattgttgatgatgttactaacctttcacttccagaggttaagccagctcctattacttcagctcctggtacagtagaatgtaagttctggggtcttggtggtgatggtacagtaggtgctaacaagaactctactaagatcatcggtgaccatacagataagtatattcaggcatacttccagtatgactctaagaagacaggtggtatcacaatcagccatttaagatttggtgataacccaatcagaagtccatactatatcaatcaggctgacttcgtagcatgtcataatccttcatatgttgttaagggttataagatggttcaggatgttaagccaggcggaatctttatgattaactgccagtggtcagatgaagaacttaatcagcatatgccagcagaagctaagcagtatattgctaagaataatatccagctttacacaatcaacgctattgataaagctattgaaatcggtatgggtaagagaactaacacaatcttacagtcagcattcttcaagcttgctaacgtaatgcctattgatgaagctgttgaatatatgaaggcagctgctaagaagtcatacagcaagaagggtgatgcagtagttgagatgaactataaggctatcgatgcaggtgttgatgcagtacataaggtagaagtaccagcagattgggcaacagcagttgatgataagaagccagttgaaagaacaggacgtcctgctacagttaagatggttaacgaacttcttgatcctatcggaaagatggatggtgacagccttccagtatctgcatttaaggatattgcagatggtcagtttgagacaggtgcttcagcatacgagaagagaggaacagccgttatggttcctgagtgggatccagcaagctgtgttcagtgtaacagctgtgcattcgtatgttcacatgctactatcagaccattcattcttgatgctaaggaacaggcagaagctccttcacagattaagcttgctgattctaagcatgcaacagacacaacaatgaagtacacaatgtcagtatctccattagattgtatgggatgtggcgaatgtgttactgtatgtcctaaggctggagaagctcttaagatggttccacaggaatcacaggcagaagagcagccagtattcgattatcttgtagctaacgtaggtaagaaggatattaagccagcattagtaaatacaccaatcggttctcagtataaccagccactccttgagttctcaggaagctgtgcaggttgtgcagaaacatcttatgctagattaattacacagttatttggtgagcagatgtatatttctaacgctacaggttgttcttcaatctggggtggtccagctgcaacatcaccatatacagtaaacaaggatacattaaagggaccagcatgggctaactcattattcgaggataacgcagaacatggttttggtatgtatcttggacagaaggttcttcgtgaccaggctattgccaagatcgaagaaatggctgcatctgataaggcaacagacagctttaaggcagcagcagctaagtaccttgagacaaagaatgatactaaggcaaacacaccagctacagaagctcttattgcagaacttgaaaaggcagcagcagatggatgcccaacagctccagaagtacttgctaagaaggattaccttgctaagaaatctgtatggatcttcggtggtgatggttgggcttacgatatcggtttcggtggtcttgaccatgtacttgcttcaggtgagaatgtaaatgttatggtattcgatacagaaatgtattctaatacaggtggacaggcttctaaggcttctaacatcggtgaagtttgccagttcgctgcagctggtaaggaaatcggcaagaagtcacttgctgaaatcgctatgagctatggctatgtatatgtagcacagattgctcttggtgctaacccagctcaggcattaaaggctatcgaagaagctgaaaactacaatggaccatcattaatcattggttatgctccttgcgaacttcacggtatcgctaagggtggtatgaaccactgccaggatgaaatgaagaaggctgttaaggctggatactggaacctcttctcattcaacccagcattaaaggctgaaggaaagaatccatttacattaacatctaaggctggtgatggatcatatcaggaattccttaacaatgaagcacgttatacacgtcttgttaagccattcccagaaagagctgaaagactctttgctaagtcagaagaagttgctaacgagagatttgagcacttacagagacttgttgagttatataagtaattcacattgcaaaataaacagaatatgattaatattaaggaatgaattgtcttttatatgacattgtagttccttgataaaagggaggctcctgatatatgctttgaaggtatatgtcaggagccttttacaatatatttgtcagctattttcaaagatggaagaatgagcggtaggaaagagaatgacaattggcttataatcaggaaatcgtaaaaaaataggattcatagttcacaatgaattgataattgtgtataataaaggtataaaaatgcgtgtaatattataatgatgccgtggtcaaaagctcccgacatcattataagaatataagaaaaatacaaacgatcgtgctgtaaaaggtatggaatggggtgattatatgagtaaaggcactttaaaaaagaaaaaggtggaaattataactgtatgcatatgtgttgtgctgatagcggctattcttgcaatacttattgtgtttaataagagcaaagattttgtttataataaacatcttgatgaagctgtgatcagcatagatgatgagaatattacattgaaggatttttcttactatatatatatagtggaaaagcagattaatgatatggctataaagtataatcctgatgaccctaatgatttctggaacacacattttaaaaattcacttgacagcgtgttcacaagggattatgctaaacaactggcaaaggatttatgtgagtatgattatataatggaaaaagagactgccgttcataatatatatgtaactgaaagtgaaaaagaatcaataaaagcagatgctaaggatacatatgatgatttttcacaaaaagctaaggacaacacaaggcttagtgaggaagatatatataatatattatgccgtagaaagcttgttgaaaagtatgctgtcagggcagcacaacaggttaagagtgatggctttgcaggagatagtgcatcattgcttgattatgatggagaatattataaagagataattaagtcaaagtataatgttacagagaataacaagctgcttgataagataaccatgggaagagttactgttaactgatatcgtgaatacatttagttttcgtaaaatgctgcttgtttaatgctggtttaataaaataatcatatacacatatttagttagatgttaagaacagaataagtgttgcgtaacgcagaaagaggttaataacagttaaatacaaattataaaactatataagtgaatatagagttttacaaggtgttagaatagaatattattaaaaggaattgatacaggaggaaacagatggtaaaagccataaaagtaatgttgataccaaacaacgtacaggaaactaagatgtttgagtacgcaggagcttcaagatttgcttataactgggctttggccagggaaaaagaaaattacgaaaaaggcggcagattcatttcagattcagaactcagaaaagaatttacaaagcttagacattctgatgaatatgcttggttattgaatatttcaaataatgtaaccaaacaggcaatcaaagatgcctgcaatgcgtataagaattttttcagaggtttgaaaaaaatcccaagattcaagtccagaaagagatcaatgccgaagttctatcaggacaatgttaagatacaattcagtaatacccacgttaaattggaaggtttttcttccagcagaaaagcaaataagcaaaaattgaactgggtaagacttgcagaacatggacgtatttcgacagatgctaaatatatgaatccgagaatatcttttgatggattgaactggtggatcagtgtatgtgtggaatttcctgattgcaaggaaatacttaatgatgatggagtcggaatagacttaggaatcaaagatctggctgtctgttctgatgctgttaaatataagaatattaataagagtcagaaagtaaagaaactagaaaaacagaaacgcagattacagcgtagtatctctcgttcttacgagaaaaataagaaaggggaaagttactgcaaaaccaataatgtaatcaaaaaggaaaaacttttattaaaacgaaatcacagattaacaaacatccgtaaaaactatttgaatcagactatatctgagatcgtaaatcgaaagccaagatttatctgtattgaagatctgaatgtcagcggaatgatgaaaaatagacatttatccaaagtagttcaggaacaaggattttttttgtttagaaaacagcttgaatacaaatgcagtgataaaggaatccagctaattgtggctgatcggttttatccatcatcaaagctttgcagctgttgtggaaaaatcaaagaagatctgaaattatctgacaggatttatagatgtgaatgtgggaatatgattgacagagatttccaggcatctataaatctgaaggcttatggagaaagatttgcaagctgacactgaaacgttaatgcaaatatatacggatacgttagttcggaatttacgcctatggagagtacaagaacttgtgagtagatagatattcatatcatcaaaagcatactcgctgaagtaggaatgaaacatagaagtttataactttttataagttttcagtaacggttgaagatgacaaaagatatgactaaggggtcacccttcaagctgattcttggatttgcatttcctatgcttttaggtatgctattccagcagttctataatcttgttgatactatgattgtgggtaagacgttaggtgtgtcagccctggcaggagttggagctacaggctcaataaactttatgataattggattttgtatgggtatatgcaatggattcgcaattcctgttgcacagcagtttggggcaggaaagtatagtgagcttagaaagtatgtttttaatggatatatatgcagtgcggtatttgcggttgttatgacagtgctttcagtagtattttgtgcacctatacttagattacttaatacaccagatgatatattcatgcatgcgtataattatattgttataatatttgctggaataccaacggtatttctatataatatcgtatcgggtataatacgttcacttggtgacagtaagacaccagtatattttcttgtattatcatcggttattaatatagcacttgatttcatacttattatatatgttaagatgggagtagcgggtgcaggtgttgcaactgttgtatcacagcttatatcaggtattggatgtactatatatatgtataaaaagtttgatatattaaaagcaactaaacaggaaaatgttgtaaggaaaagatatgttgttaacctttgctatataggtgttcctatgggacttcagtattccataacagctattggaagtactatacttcaggcagcagtaaatggtcttggttcgtcatatgtagcagccatgacagcaggctctaagatgtttaactttacttgttgtccttttgatgctcttggttctactatggcaacatatggtggacagaatgttggagctggaaagatagacaggcttggcaagggtataagagctgctatgataataggtgcggtgtacagtgtagtggcacttgtggttctgttctttacaacagattatatagcacttctttttgtagatgcagctgaggttgagattattagacttacaagaagattcataatagcatcagctctgttttatatacctcttacaggagtcaatgtttacagattctgtatacagggtatggggtattcagtatttgcaatactagccggagtgtttgagatgcttgcaagaacacttgttgctatattccttataccagttataggttttaacggggcatgtcttgctaatccggcagcatggattgcagcagatattttcttaatacctgcatttatgcattgctgcaataagcttaagataaggcatggaatgaaaaagagtgcataaagttggaataaaatcactaaaatcagacattctaatattactggtgaagttctaatattactggttaagataggaatgaaaggatgcctgcaatgagtgatttcagctgtaatgttaaagagaatattaaaaggttagaaactagtcttaatgtggaacgtaattttgatatacttcaaagagaagtaatgattgcgggacatagggctggtttcttttttatagatggattcgttcaggaagatatgatagagaaacttatgcagttcttctattcattgaaagaatcagacatgaccgatatagatgcattcctggaaaaaggtatgccttatacagaggtggaaaagagtggtaatatagattcagttataacacagtttctatctggagtatcaattatgacaatagatggttttgatgaatgtctgcttatagactgccggacttatccgatgcgttcggtatctgaaccctggaaggacagagtgttaagaggttcgagggatggattcgttgaaacgctggtgtctaatgcagcactgcttagaagaaggataagagatcctaagttctcgatggaattgttcggagtagggcggcgttcaaggtcggatgtagctgtatgttatatatctgattcagtagacaggaatacgcttgacagaatgagaaaacttatacagtctatagatgttgatgctcttacgatgaatatagagagtcttgcagagtgtatgtttacgcataagtggattaatccattcccaaagtttaagtattcggaaaggccggatacagctacagcagctattcttgacggtaatattgtgattatggtagacaattcccctgcggtcatgataattccagcatctatctttgatattatagaggaagcagatgattttaatttctcgcctatgataggttcatatcttaggattacaagatttttcttttctataattacatggatattaacaccgttatggttacttttcgtcaataatccggagtgggtgccggaatttatgaagtttattctcataacagatgatataacggttccagtgttgttgcagctgcttattcttgaacttgctgtagatggacttaagcttgcagctgttaatacgccaaccatgctgtcaacacctctgagtattgttgcaggtattgttgttggcgagtatgctgtaagttcaggatggtttaatccggaggcacttctttatatggcggttgtaactgttggaacctatggacagactaactttgaaatgggatatgctttcaagtttttaagagtgcttatgctcatactcacacaaatattcaatcttgctggatttatcacaggagttgtcatatctgtgctgatgatagcatttaacaggactataacaggaaaaagctatatatatccgcttattccatgggatgggaagatgcttaagaggaaggtgttcagggtgaggctgccgcatggttttaaatgatatgcataaataatacgtgcataaataatacggatgattattattgcaattttcaagaaaaatagtataataaatattgat

SEQ ID NO: 499 - DNA, 6419 bp, Unknown
  gut microbiota DNA sequence
gtttatatgtttattgtatatatgtatggcatttgtcattgtataattttaggagtatgttttagatttttgaattgacatttgttattagatataatattatgataatgttattaccattcaaaataacataacgggttaaaataaatttttaaactaaatgattacagttgcgtatggcaactaaaaaagaagttcaagggtatagccgttgaacttcttttttttgagactatattgtaatgccattgtatatggataaaaaatattgactatgtgataaaaagagagtattctttatataaagaattatagtaggaggagaatatgtataacataggattggatataggaactggttctgtaggctggtgcttaacggataataatggacatttgctaaaaataaataggaaaggtgacaatggtaaaacatatagaaatagcgcctggggagtgagattgtttgcatcagcagatacagcagctgattgcaggataaaaaggagcacaagaaggcgttataacagaaggcgagcgagaattatagagctaagaaagataatgtcagaaatgataatgccggttgaccctaatttttacgctagattagatgaagcatttctgtggaatgaggataagagcgataaagcaaaagcaccatttttattattcaatgataaagagctttatgatattaaatattataaaaaatatccaacaatatatcatttaagaaaatatttgctcgaaacaaaagagaaggctgacccaagatttatatatctggcattacatcatatgatgaaatatagaggacattttctgtttgagggacagtcatttgaggcaatagataatattaaagatacatttatagaattggaacagttgataaatgtatatgttaagggaaaagaggaaatagaagataataataagaataatgataagtatgaagcaataaaaatttgtttggcagataataaagtaaaaaataaagataaaaaagaaaatataacagatatatttattaaagcaggttacgataataaatattcaaaggaacttgcagcggcagttcttggttatgaatttaatgtaggaattattgttaatgataacagtttaacagatgaagatggtaaagcattgaaagctaaattcgcagatgccaaatatgaggagcaggaggaaaagttaagtgatacacttggggagagatattatatagttgaagcattgaaaaagatatattcgtggaaagtgcttcacagcatattaggtgatagtatgtttctttcatgtgctatggtagataaatatgaaaaacatggagaacagcttacagcattaaagaatttgttccataaatatataagtcaggatgaatatagtgaattctttcatcaggaaaagaataaagaaggcaaatatatagttaattatgccaattacataaaaggaataaaaaggctgaataatgaatcgaacaagaattctaatgcgaatcaacagctttatcaaagcataaagaaaatattaggcaagagggcggcagatgatgaagtttataagaatattttaactgaaatggaacaggaaacatttcttgagaagataaataatgttgataattccgcaataccatatcagttgaatttaatagaaatggataagatattaacgcagcagggggtatattacaaagaattaaaggacaataaagaaatattgcttaaaatgcttacttcaaaaattccatattatgtgggtccacttaataataacaataaaggaaatcgtaattttgcgtggatgacgaaaaaagctgggaaagaaaacgaaaaggtgtatccttggaatgttaaagatgttgtggatatagatgttacggcagaagattttattacgaggatgacgaattactgtacatatcttcctaatgaaaaagtgctgccaaaggagtcattgttatatcagagatatatgttattagaggagttatcacagataagaattgatggcaagaagcttagtaaagaagacagaaaagcaataatagatgatttatttattggtaagggaagggttaaggtaagcgataaagattttaaagagtatcttgataaagttaattatgttaaggttaatggcaagggatatgatgttacaggatatcagagtgatgatggctttgcttgtgcactaagtagttataataagttcagacgtatattaggatatgtagatgaacgaaatgaaaagatgatagaagatataatatattggcttactgtatttgaggataaagatatagttaaaagaaagataaataagcagtatgcagacaagtttagtgatgagcagttaaagaagatattaaagttaaaatttaagggctggggtcgttattctgctaagctgttaaatggcataaaaggtgacatgggaacaactattatcgaaatgcttgaagatgctgacgaacgatttgcatattgtgattattgtcctaattttatgcgaattattaataaggatgagaagataaagcaaataatagatgataacagatctatatatgatggaacaaaagatttattagatataatacaggatatgcatacatcaccagctaacaggcgtggtatatggcagacaatgaaggtgatcgaagagataattgaatatatgggtgaaaaaccacagcagatatatattgaatttgcaagggaagatgattttaaggccaagaataaaagaactgactcaagaaaaaaagctgttgataaggctctcaataaattaaaagaggaagtgattgatgaatataatgaaaatgtatacaaggaattaaaacaatatgaaaagcgtttagatgaagaaaaggtgtatctttactttatgcagaatgggaaatctttgtatacaggtgaagagttaaatcttaatgagccagaaaatcttgagatagaccatataattccatattcattatctgatgatgatagtctggataataaggcattggtattaaagaaagaaaatcagaataaaggcaataagatagtaaaagaagcctttccacaatcattttctgatagtgagatgatagattactggaagaacctgaaaaaagctaggttaatatcagagaagaaatttaataatcttcagaaaaataatgttgatgacatactgaccaaaggatttattaaccgacagcttgtagaaacaagacagattgtaaagtctgtagccaatcttatactcgattattataatgaacagattgatgtaatagaagtaaaagccaatctaagcgtaagtgtcaggaaaatgctgacatatgagaaaaaagataataacggattctgggtagaaaataatgataatagtatgttctataaaaacagacatatgaatgattatcatcacgcacacgatgcatatcttgcaaatattataggtatgtatatacagaagaattatccacagttacagaaagaacttaattattcacaatatagaaagatatggcgtaaatattatgaaaacgcaaagaataataacggagtaaactggtttgcaacgcttggcaaattcagcattaataataaagaaacagcctggtatggtgaagatatcatagcctatatgagaaaaatattctgttatagagacgttattatatctaaaaagttggaagaaaatactggagcattttatagtgaaactaaatatccaagagaggataaagcggatagtaagcttgtacctttaaaacagggtaataatatgcgtggtgctaataatcttaaagaacttgatacaagaaagtatggaggatataaaggtggtgaaaaagcctattttgtacttgtaaaatattgtatcgaaaaggcactaaagaagaaagttaaaaaagagtatcatatggaattcgttgaaatacctgtatatattgcaagagatattaaaaataaggatataaatctctatgattatgtgtgtgacattttaagtgaagcttataaaaatagtgttgtagatgttgaaatattgcgaaataaagttcctaaataccagatgataataggagaaaatggagaggaatattatcttgttggtgcgacagaggtgattaattcaaaacagtttgtccttggtggtgctaatcagcaatataacaggctgttaaattacataatgtatggtaaaaatgataaatggcagtatatacagacagagttactagatgagcagttgacaggactatatgatttgcttttatctaaaatcaaagatgaatataaaggcttttctaaagaggcaataaggatacatgaggataattcattttataaacttgatgtaaagaataagaaagaatttatagcagagatgattaagcttgttcagccagactccaactatccatatttaggaaagtattcaacaggattgtcagatagaatgggtcgaaagagcaaggagaaagttggtaaaaagattacgcttgtagataagtcagttacggggttatacgagaggagaacaacatttgagctggaggacgatagtagtacaaagtcacgctaagttaagttataagaatggatatatgatagtgcggggtgaagatgttaagatggtgcacctgagtgaaattaatacagttaggtataaaacataccaatgaatacaatccttataatctctcctgtgatttaatggagccgttcagagttttagtggacgaaattgtgtttaataacattgataaaacatttgattctgattataaaatgcagcttgtaaatgttctgaataagcggattaattattgtgggcgtgagtattatgttacaaatgctattcagatatatcttgataaaatgtttggtgcgatagaacagaaaagttttattacttcaatgatatatcaatttgaatgattagcagatttatgagagtgatggtgttttttgatttgcccacaataacagataaaaacaggcacgactatagaaaattcaggcagtttcttgttcaggaaggatttattatgatgcaggaatctgtgtatacaaagcttgttctaaacggaactatggttaatcttatgaagaataagataagaaagaataaaccacaggaaggtttggtagaaatgcttgttataactgaaaagcagtttagtggaattgaatatgtgtcaggtggtgaacaggaaaatattgttgatggagaggaaaggctgattattatatgataatgaagatattttcgctggaaaatgatataatattcacagaagaatatattaatgtacttcaaattcaggataaaaaattatttactaatgtcataaatagcctaaatgataatataaacaatattgaggatactaaagaacgtataattatattagataatgatacagagattaagattgaaaaagaagtgttgatgtttattgatgtgtttaatattgattttaatcaaaagaaaatacagagtgctttatataataaaatagagaaaatatataagcaggaatttgaaagaatgtcagagttccagacaatttttcaaaatttgctactgaatgtattagatgtattcaatgaatttccgtttgaattcaattataaggaaagtatcgggatacaagagtatttgaaactattagggcttaagatatcgaataataaagggaaaataacagatacaatattttcattgatagatgttgttgaatatctttcaatcgcaaaaatattaatatttgttaatcttaaattatatctgattgatggtgaattaaaggaaatatataaatatgcaatgtataaaaaggttaatatactgcttatagaaacaggagaagaaaaagaaccgcttgaaaatgaaaaaatattgtatatagatagtgattatgatgaaattatattgtataataaataaaaaagttactatttaaaatacgggtgcgtcgttaacacctgaaaaactttatttgaggttttaggagtatgttattttgaatggtaacaaaacaaaagatggtgtctatatagcaaagggaaagttttaggagtatgttattttgaatggtaacaaaactgagactacagagcagctgcagcatgagatgttttaggagtatgttattttgaatggtaacaaaacagaacgccgcgagaatattacagccaagtagttttaggagtatgttattttgaatggtaacaaaacatgagcagtattgcagaatcaacagagagtgttttaggagtatgttattttgaatggtaacaaaactgacggatatttttctgtaacaagtacgtagttttaggagtatgttattttgaatggtaacaaaactatgatacaaatgaatttgtatt

SEQ ID NO: 500 - DNA, 22247 bp, Unknown
  gut microbiota DNA sequence
ggagtatgttattttgaatggtaacaaaacaatgtgataaatgcggcacattttttataagttttaggagtatgttattttgaatggtaacaaaacagagccaaagtctatgatagatccacatacgttttaggagtacgttattttgaatggtaacaaaacgttgcgttatatattgtgatccaccctatagttttaggagtatgttatttttctgtaaacaaagattaatatggttaaagtgaaacaagtttatataaattttctaattaattctacttttattaatggtaattcctcataaatatgataaacttataactatcgaatataagtgttattattcttagtgtgagttatggaggaattatgagtaaggtaattggaatcgatcttggtacaactaatagctgcgtggcagttatagaaggtgattcgccaacagttattactaatagtgaagggtatagaacaacaccatcggttgttgcatttactaagaataaggaaagactggttggggatgctgcaagaagacaggcatcggttaactcagacagaaccatattttcaataaaaagacatatgggaactgattataagaaaaagatagatggcaaagcatatacgccacaggagttatcagcttatatacttatgaaactaaagaaggatgcagaaggatttcttggagaggaagtaacagatgctgtcattactgtgccagcatattttaatgatgcacaaagacaggctactaaggatgcaggaaagatagcggggcttaatgtgttaagaatcattaatgagccaacaagcgctgcacttgcatatggacttgataatggcaatcctcagaaagtgcttgtatatgaccttggtggaggtacctttgacgtatctgttatagatattggagataatgttatagaggttcttgcaacctccggagataatcatcttggaggggatgactttgattcccgcattgttgattatcttgttggtaggtttaaggatacagatggaattaatcttgcaaaagatccagcggctatgcagagattaagggaagaagctgaaaaggctaagaaagagctttcttctgcaatgaatgccaatattaatcttccatttatagctgttgcaaaggatggtccgcatcacatggatatgaatatcaccagacaaaagtttaatgagcttacagatgatctggttaacaagacagttattcctgttgagaatgcacttcgtgatgccgggcttagtaagaatgatattggtatggtacttcttgttggaggctccacaagaattcctgctgtttcggataaggtaagacagattatgggaaaagaaccatcaaggaatcttaatccggatgagtgtgttgcacttggagcagcagttcagggtggaaagcttggtaaccagcttaagccaggttcagcagcttcggagattatacttatggatgtaacaccgttgtcactttcaatagaaactgttggtggtatatcaagcaggcttatagaaagaaatacaactattcctacaaggcacagccagatattcacgacggctggcaatttccagacatcagttgaaatcaaggtgtttcagggtgagagaagatttacaagagataacaagcttcttggaaacttcaggcttaatggcattaagcgtgcgatggcaggagttccacagatagaggtgacttttgatatagatgccaatggtattgtaaatgtgtctgcaaaggatctaggaacgggaagagagcagtctataactataacttcaagctctaatatgtcagaggaagagattgagaaagctaagtgggaagcagaagtgtatggcgcacaggataagcagaatgaagagttttgtaattcgcgtatcgaagctgagaataccttaagacgtgcagagggcgagtacagccagaacaagaaggcatgggataaggctaagaaaaaggctgttaaggaagctatgaatatcttaaagaagcttatattaaagactaagccagagaagatggatgcacaggccgcggctgcgatggatgaagctagaaataatcttgaaaatgttttgaataattaatagaaatctgatattatctatagagtattgttttatggatgatatcagatttttgtatgtgattatgaattttatacatctatagaattatcgttgacatgattatgtatattagtacagaataggagatatataaggtggcagcaggttcgacatatggaaatatttttaagataatgacttggggtgaatcacatggagaaggtcttggtgtggttgtagatggatgcccagctggtattcctttatgtgaagaggatattcagaagttccttgatagaagaaagccgggacaatctaagtttacaactccaagaaaagaagatgataaggtgagtatattgtcaggtgtatttgaaggcaaaacgacaggaacgcctatatcgatgatggtacataataagacacagcgttcgtctgattattcagaaatagcccagtattacagacctggacatgctgattatacatttgatgagaagtatggcttcagagattacagaggtggtggaagaagctcaggaagagaaacaataggcagagtggcagcaggagcaatcgctattaaggtgttagagactcttaagataagcgtatgtgcttacgcaacaaggataggtggcataagcatagattatgataagttcgatatcagggaacgcgatgaaaatgcatttaatatgccggatgcggaggctgcctgtaaggtggaggaatacgcaacgaagaagcttgaggaaaaagattctattggtggaataatagagtgtgttgtgactggtatgatgccaggtgtgggtgatcctgtgtttgataagctggatgctaatcttgcaaaggcgattatgtcaataggcgcagttaagggctttgaaataggagatggcttcgcagcggctgatagtacaggaagcaccaacaatgacagctttacagtaatggatggcaaggttgtcaagaagactaatcatagtggtggagtgcttggaggcatgagtgatggttctgatataatattcagggcagcagtcaagccaacaccttccatagcttcaatgcagcagacggttaataagtctggcgaggatatcagtatatctataaaaggcagacatgatcctatgatagttccaagagcggtagttgttgttgaagctatgacagcattaacgcttgtagatatgatattaggaaatatgacatcaagaatagacaggatagttgatttctataaaagatagataaatgtttcatatagaaaaatgtttgtcatttatatggagtatagaataattataaaatgatgtgagtgtcaaaagtataataaaaataaaagagaaatcatagaaaaatcagaaggaaaagacaaatatgtataaaatattaaaaacagacggaagagccaaaagggcggaattcacaacagttcatggaactgtgcagacaccggtatttatgaatgttggaacagttgcagctattaagggtgctgttgctacaacagatttgcaggagataggtacacagatagagttatcgaacacatatcatcttcatgttagaccaggtgataagcttattaaagagctaggaggtcttcataagtttatgaactggaataagcctatacttacagactcaggcggatttcaggtgttttcacttgctggacttagaaagataaaggaagagggcgttaccttccagtcacatatagacggacataggatatttatgggaccagaggagagcatgcagatacagtccaatcttggctcgacaatagctatggcattcgatgagtgtgctccggcaaaggcagatagaaagtatattattaattcagtagagagaactacaagatggcttgagcgctgcaagagggagatgaatagacttaattcacttgaggataccattaataagcatcagatgctttttggtattaatcagggcgcgatatatgacgatatcagagttgaccatgctaagagaatatcagagcttgagctggatggatatgcagttggtggacttgccgtaggtgaatcacatgaggaaatgtatcatgtgcttgataaagttgttccatatcttccacaacataagccaacatatcttatgggagttggtacaccagcgaatatattggagggagtagacagaggaatagatttctttgattgcgtatacccatcaagaaatggaagacatggacatgtgtatacaaagcttggtaagattaatcttttcaatgcaaagtatgaaaaagacacagcacctatcgaagaaggctgtcagtgtcctgcatgcaggaactattcaagagcgtatatcagacatttgcttaaggctaaagaaatgttaggcatgagactttgcgttcttcataatctgtatttttataatcatcttatggaagatatcagggttgcaatagatgccggtaattataagagctttaaggatgaaaggctatatcttcttaaaacatatgataagaaagaggattaataattattatttagtataaattgcttatttgtgcgagtacaaacgtaatttatacttttgacacttacatcataaaattataaaaatgctataaatttcaatttaaacatagacacgaagcataaattacgatattataacaatattgagcctgtacacaggcaagtaattaggaggatttaataatgggtcagattggtattattattgtgtatgtaatagcacttggtgctttaatgtacttctttgcaattaagccacagaagaaacagcagagggaacagcagcagcttatggattcaatggctattggcgattatgttcttacaacaagtggtttctatggtgttatccttgatataacagaggatgatgtaatcgtggaattcggtaacaacaagaactgccgtattacaatgcagaagaaggctattgcccaggttgagaagccagcttctacagaagaataataattaataaatgcaagaaactctggacaggtaatgccatcaggctgatatctgtccagagttttttattatgcccctacttgaaaaatgcactattatggagtaaaatactaaacaatagcctgaacttgcgatatattcgggtaggggctttagtacaagaaggaaaggcaggaattaacatggattgtagaataacattaattccaggagatggaatcggaccagaaatagtaacagaggctgttaaggtgttagatgctgtggcagctaagtatggtcacaagttcgattatacgaagattttaatgggaggctgctctattgatgagtgcggagtacctcttacagatgaggcagtagccgtcgctaaggcttcagatgcggtgcttctaggtgcagtaggtggtaacgtgggtaactcaagatggtatgacgtggcacctaacctaagaccagaggcaggtctattaaagattcgtaaggacttagagttattcgctaatattcgtcctgcttatttatataatgaattaaaggcagcctgccctcttaaggaggaaattatcggcgatggctttgatatggttattatgagagagcttactggaggtctttactttggaaagagacatacagaggaagtcgatggacttatgacggctgttgatactcttacatataatgaagaagagataagaagaatagctattaaaggctttgagatagctatgaagagaagaaagaaagtaacaagtgttgataaggcaaatgttttagattcttcaagattatggagaaagattgtacatgaggttgctaaagattatccagaggttgaacttgaggatatgcttgtagataattgtgctatgcagcttgttatgaatcctggacagtttgatgttattcttacagagaatatgtttggagatatactttcagatgaggcaagtatgataacaggttctattggtatgttatcatcagcaagtcttggtaaaacaaagctgggcttatatgaaccaagccatggttcagcacctgatatagcaggaaagaatatagctaatcctatagctacaattctttcagcagcaatgatgttaagatattcacttgaccttgataaggaagctgatgccatagaagcggcagttgcggcagtacttaaggaaggctacaggacaacagatatatattcagagggctgcactaaggttggaacagatgagatgggcgaccttatagccaagagagtgtaatatatgtacttataaaagaaattgatttgcgaggagaatgattatggtaagtgataacgctagaagtggtatgcagcaggcacctgctagaagtttgtttaatgcacttggcttcacagcagaagagatgaagaagcctatgattggtattgttagttcatataatgagattgtaccaggtcatatgaatatagataagattgttaatgcagttaagctaggagtagctgaggctggcggtgttccagtagtattcccagcgattgcagtatgtgatggtattgctatgggacatgtcggtatgaagtactctttagtgacaagagatttaattgctgattcaacagaatgcatggctattgcacatcagtttgacggacttgtaatggtgcctaactgtgataagaatgttccaggacttcttatggcagcagcaagacttaatcttccaacagtatttgtttcaggtggtcctatgcttgcaggacatgttaagggaaagaagagaagtctttcatctatgttcgaggcagttggttcatatgcagcaggaactatgactgaagaggacgtacttgaattcgaagaaaaggtatgtccaacttgtggttcatgctcaggaatgtatacagctaattcgatgaattgtcttacagaagcacttggtatgggacttcgtggcaatggtactattccagcagtatattcagaaagaatcaagcttgcaaagcatgctggtatggcagttatggatatggttaacaagggtattactgcaagagatatcattacaaaggattctattatgaatgcacttactgtcgatatggcacttggctgctctactaacagtatgcttcaccttccagccattgcacatgaaataggttttgattttgatattaagtttgctaatcctataagtgagaagacacctaatctttgccatcttgcaccagcaggtcctacatatatggaagatcttaacgaagcaggaggcgtatatgctgttatgaaggagcttgctgatataggactccttaacacagattgtatgacggtatcaggaaagactattggtgagtgtatcgcaacagcctataatagggatgaagaggttataagaccggttgataagccatatagtaaaacaggaggtcttgctgttctttcaggtaatcttgcaccagatggttcagttgttaagcgttcagcagtagttgatgaaatgcttgtacatgagggaccagccagagtatttgactgtgaagaggatgctattgcagctataaagggtggaaagattgtatcgggtgatgtagttgttatcaggtatgaaggacctaagggtggtccaggcatgagagaaatgcttaacccaacatcggctatcgcaggtatgggacttggctcatcagttgcacttataacagatggacgtttctcaggagccagccgtggtgcatctattggacatgtgtctccggaagcagcagttggaggaccaatagctttagtggaagagggagatatcataagcatagatattccaggccttaagcttgaacttaaggtttcagacgaagaacttgctgcaagaaaggctaagtggcagccaagagagcctaaggtaacaacaggatatcttaagagatatgcatctatggttacatcaggcaacagaggagctatcttaaagactccggaggtataagaggtgtgatgaatgcaggacattcagataacttattatagaaattgtcaggacagaacaataacatataatgaaaggaagacagacgaatgatattaaatggttcagagattatagttgaatgtttaaaagaacaaggtgtagatactgtatttggatacccgggtggagccattcttaacgtctacgatgcattatataagcattcagacgagattacacatatacttacatctcatgagcagggtgcatcacacgccgctgatggttatgcaagagcaactggaaaggtaggagtatgctttgcgacatctggtccaggtgctacgaaccttgtaacaggtattgcaacagctatgatggattctattcctatggtagcgataacctgtaatgtaactctgccacttcttggaagagatagttttcaggaagtagatatagcagggatagttatgcctataactaagcacagctttatcgtaaaggatgtaaatgaacttgcagatacattaagaagagccttcaggattgcaaaggaaggccgtccaggacctgttcttgttgatattactaaggatgcaacagccaatgagtgtgattacataaaggaaacacctaagccaatagaaagaataactgatacaatcagtgaagaagctgttgagaatgcagcagctatgataaaggctgctaagaagccttatgtattcgtaggtggtggagttatagcatcagatgcttctgaagaactgaaaaagttcgttaggaagatagatgctccagtatgcgatacacttatgggcaagggtgcatttgatggttcagatccacactatacaggaatgcttggcatgcatggaactaagacctctaactttggtgtgtcagaatgtgatctgcttattacaataggtgcaagattctcagaccgagttacgggaaatactaagaagtttgctaaaaatgcaaagattcttcagtttgatgttgatgcagcagagattaataagaatatacatacagatgcatcagttattggtgatgcacttgaaatacttaagagagtaaatgccaagcttgaacagcttgatcatgcagactggcttgcacatcttaaggaatatgaagaaaagttccctatgaagtatagaacagatgtacttaacggaccatatattatggaaaagatatatgagattactaatggcgatgcaatcatttccacagatgtaggacagcatcagatgtgggctgcacagcactataagtataagaagcctagaacattgcttacatcaggcggacttggaactatgggctatggtcttggtgcaagtattggtgccaaggtgggctgtaaggataaggttgttattaacattgcaggtgatggctgtttccgtatgaatatgaatgaaatagctacagctacaagatataatattcctatcatagagatagttttcaataatcacgtacttggtatggtaagacagtggcaggatcttttctatggaaagcgttattcagcaactgttcttgatgatcaggttgatttcgttaaggtatcagaaggtatgggagctaaggcttacagagtagctgatattgaaagctttgaaaaagcgttaaaggaagcaatagagcttaatattccttgtgttatagaatgtgacatatgtaaggatgataaggtattccctatggttgcaccaggtgctcctatatcagaagcattcgacagggatgatcttaataagaaacaggctgagagcaagtaggtcaatgttaattgcaagcaggttatattaataaatagaaattccggatttgttgtattatgaatccggaattgttttatatgattcttaagtgagcgttcagagtattaaaaaaaatacatatataactttaatatgttaaaatattaacttgacatagtaaatatacaagcataaaatatagtttaataaatttttaatacttaagacattttgcgacaaatatatacagcttgcttaaaaaagttaattatttgtacttaggattaaagatttatcatatatttaatagaattcgaatggattaggaggaagaaaaagtggcaagagtttataactttagtgcaggtccagcagttttgcctgaagaggtattaagggaagcagcagatgaaatgttagattaccagggttgtggtcagtcggttatggagatgagccatcgttccaaggtttatgacaatatcatcaaggaagctgaaaaagacttaagagagcttatgaatataccagataattataaggtattattccttcagggtggagcatcgcagttctttgcagaagttcctatgaaccttatgaagaacaaaaaagcagcttatattattactggtcagtgggctaagaaagcatttaacgaagctaaaatatatggtgaggctgttgctgttgcttcctcagaggataagacatattcatatattccagattgctcagatcttgatattccagaagatgcagattatgtatatatctgtgagaataacacaatttatggtactaagtataagacactccctaatacaaagggacatattcttgtatcagatgtttcatcatgctttttatcagagcctatagatgtaacaaagtacggagttgtatatggtggagttcagaagaatatcggacctgctggagttgttatcgcaattatcagagaagaccttataacagatgatgtacttcctggaacaccaactatgttaaagtggaagacacaggcagatgcagattctctttataatacacctccttgctacaacatttatatctgcggcaaggtatttaagtggattaagaaaatgggtggactttcagctatgaaagaacacaatgaaaagaaagctaaaattctttatgatttccttgatgaatctaagatgttcaagggaacagttgttaaggaagaccgttcacttatgaatgttccattcgtaacaggtgataaggaacttgatgctaagtttgttaaagaagcagaagcagctggatttgtaaatcttaagggacacagaacagttggtggtatgagagcttctatctacaatgcaatgccaatcgaaggtgttgagaagttagttgaatttatgaagaagttcgaaaaggagaatgcctaatgattaacgtaaattgtcttaataatatagcttctgtaggtcttgaccttttctcaagcgattataatgctaatgcagcatttgaagaagcagatgcagtacttgtaagaagtgctaagatgcatgatatggaattgccagataatcttcttgctatagcaagagctggtgctggtgttaataatattccacttgataaatgtgcagataagggtattgttgtatttaatacaccaggtgctaatgccaatgcagttaaggaacacgttcttgcagctttacttttagcttcaagagatttacttggtggtatcaagtgggtagaagataataaagatgatgcggatattgctaagtcagcagaaaaggctaagaaagcatttgctggtaaagaaatcaagggtaagaagcttggtgttatcggacttggtgctatcggacagttagttgctaatgcagctataagccttggaatggaagtatatggatatgacccatatctttcagttaatgcagcttggaatctttcaagcgaagttaagcatattgttaatgttgaggatatatataaggaatgtgattatatcacaatccatgtaccagcacttgacagcactaagggcatgattaataaggcagcctttgatatgatgaagaagggtacagtagttattaactgtgcaagggatgtacttgttgatgagccagctattcttgatgctatcaagtctggcaaggttgctaagtatgttacagatttccctaacacaacaacagcaggtcaggaaggcgttatcgtacttccacatcttggtgcttcaactgaagaagctgaggataactgtgctgttatggcagttaaggaattaagaaactacatagagaacggtaatattgttaattctgttaattatcctaactgtgattgtggcgtatgtacatcagcaggaagagttacagtatgtcataagaatgtaccagcaatcatcagcaagcttacaagtgttatgggcgatgcaggtattaatatcgattctatggataacaagtcaagaggagattatgcatattctgttcttgatacaggagcagctatcacagaggatgtagcagctaagctttcagctatagatggtgttattaaggtaagagttgttaagtaatcacagtattatagtagtgacaatttattctggataattaagaataataaatgttatataattatattttggcaggtgtggaattagatccgcacctgctttttgttcttgttttcgtatgcttttactatttacttatttatagttaaatggtcataattagtgtgaaatgttgaaagggatggaggattaagatataatatatattaatagcagtaattagtaagcttatattctggagtttgtatagtaatacggcatattagtgatttgtgtgtgaattctgatatttgtgcttgtttgttaaagaaataacctttattgtcaattattatcggtaatgttacactataatggtttggttatattaatattttgcttaactttttgggttattgtgctggatatgttatatggcatcaggagcggacggctttaatggttttgatgtaaatttggtattacagacaataacatattaaaataacatactaaattcaggaaagagaggtctttttttagtgagtagattaactatattaactaaggataaggctcaggttacaatggagtcgatgtatcaggatcttgaaagacgaatagtggcatctccaccaggattatgtccggttgaccttacaagatcatttataaaaatgtgccttgcacagtcttgtggcaagtgtgttccatgtcgtgttggtttaagacagcttgcaagactttttgataatgtgcttgatggtgaggcaacagaggaaacagttgagaatataaagcttacagcagaaggtatatattattcagcagattgtgccataggttatgaggcagcaaagcttgcacttaagtcagtagatggctgtatagatgactttgagtcacatatacataacggtttttgttcatgtaacagtaaccagccagtatcgtgtgttaagtcatgtcctgctggcgttgacattccggggtatatagcacttgtgcagcagaagcgatatgctgatgcagtaaggcttataagaagagataatccaatgcctacaacgtgtgcttacatatgtgagcatccatgtgagaatagatgtaagagaactataatagatgcacctgttaatatacgtggacttaagaagatggcggtagataatgcaggcatagttccagtaccagagtgtgaaccagatacaggaaagaaggttgccataatcggtggtggaccaggtggtcttagtgctgcctattatcttgcccttatgggacataaggtaactatatttgaacaaagaaaacagcttggtggaatgttaagatatggtattcctaactacagatttccaagaaagaagcttgatgaagagatagattctatcctttcaactggaatagaggttaagaagaatataagtgtaggaaaggatatatcatttgatgatataactgatgagtacgatgctacatatatatctatcggtgcccatgcagataagaagatgggaattgaaggtgaagatgccagaagtggtattatatctgcagttgagatgcttcgtgcaataggcgatggagatatgcctgattatacaggaaagagagttatcgttatcggcggtggtaatgttgcaatggacgttgcacgttcgtctataagacttggcgcaagcaaggtaagtattgtatacagaagacgtaaggctgatatgacagcacttgaagaggaagttgtaggcgcagaggctgaaggctgcgatgttcttgagcttatgtcaccagtacgtataaagcaggatgaagagggcaatgccataggacttgtagtaaagccacagatgatatcaaaggtttcacatggcaggccagcacctaaggcagcatctaaggatgaaatactcttagaaagtgatctgatagtagttgccataggccagggtatagaaactaagagctttgaggaacatggaatcaaggttcagagaggtgttatctcagcacttaatacaggtaatattacgccgcaggatggtgaaatgtctgagggagtgtttgcaggaggtgactgtgtaacaggtccggctacagttataaaggctattgcagcaggtaaggttgcggcagctaacatagatgagtatcttggctttaaccatgagattacatgcgatgttgagataccatatgcaagtaatgaagataaagtagcctgcggaagagttgaagttgcactcagggaggcagctgaaagaaagaatgattttgaaccgattgaatatggtttttcttgtgaagaagcgtgccaggaggctggacgctgtttaagatgtgatcatttcggattcggtgcttttagaggaggcagagaagaacaatggtaaatgcaacaattaatggaatagatataaccgtcgaagacggaacaactatccttgcggctgcacgtaaagttggagttgatgtgcctactctgtgctatctgaaggaagtgaatgagataggtgcgtgtcgagtatgcgtagttgaagttgaaggccaggacagatgtgttacagcatgtaataatgtagtacaggagggcatggttataaaaaccaatacaagaaaggtgcgtactacaagaaagaccaatgttaagcttatactttcgcagcatgactacgaatgtgcttcatgtgtaagaagtggaaattgtacattacagtcacttgctaatgaacttaacatatcagagatgccttatgattcaatacttgaaaagaataagtgggataagaattttccacttctaagggccaatgacaaatgtataaagtgtatgagatgcgttcagatatgtgataatatacagggaatgcatgtatgggatgttgttaataccggttcaagaactacagttaatatagctaagaataagacaatacaggaaactaaatgtacgctgtgtggacaatgtgttgttaattgtccagtaggtgcattaagggaaagagatgatgttggatatgttcttgatgcggtagagaatgaagatatcataacagttgtacagattgcaccggctgtcagaacagcatggggtgaaggatttggattaagcaaggaattcgcaacagctaaaagacttgtatcagccttaagaaaggtcggctttgattatatatttgatacaacattttcagcagatcttactattatggaggaaggaagtgagctgcttcatagacttccagagattaaagaatcgggacttcctatgtttacatcatgctgtccaggctgggttaattttgtgaagaaggaatatccgcagtatcttgaaagactttcaacagcgaagtcaccacagcagatgtttggcgcagttacgaagtcatattatgctgaaaagcttggcgtggagcctgaaaagatattctgtgtatcaattatgccatgtcttgcaaagaaggatgagattacgtgggatggcagaggcgatgtagatgcggtacttactaccagagaagtagaaagaatgcttaagtcattctttattaagacagaggagcttcaggaagaagagtttgataatccacttggcatgggaagtggtgcaggcgttatattcggtgctaccggtggagttatggaggctgcattaagaagtgcttattatcttgtcaataagactaatcctgaaccagatgctttccagtgtgtaagaggacttgaaggctggaaagaggcaaagttcactataaatggcaatatacttaaggtagcagttgcaagcagtctttctaatgcaagaaaacttatggatgcaatagcagcaggaaaggtaaagtatgattttgttgaagtgatggcgtgtcctggcggttgtattaatggaggcggacagcctataaaagatgattatgataaggttgcggcaagaacgaaggtgctttatggacttgataaggtgaataacttaagattttctcatgagaatccagaggttatccagtgctataaagattactttgaagaaccattatcagaaaaggcacatgaattactgcatactaaacacgtagtaaagtaagcatattaaaagagctatgcttatgtaagataaagaaaggatggatgtggcgatggcaactattaaagcatttgaatgcataagacctaatgaggacgtggctgacagagtagcggctcttccatatgatgtatacaacagggaagaagcgtgcatggaggtggagcgggaaccactttcgtttcttgccatagacagggctgaaacccagtttgattcgtcagtagatacatatgccaatgaagtatatgataaggcaagacagcttttagatgaaagaatagctgatggaacatttattactgatactgataaggcatattatgtgtatgagcttactatgaatggcagagtacagacaggaatagctgcctgcgcctccatcgatgattatcagaataacattataaagaagcatgagaatacaagggcagataaggaacaggacagaattaatcatgttgacagatgttctgcacagacaggtcctatattcttagcttacagggctgatgatgtcataaggagagaggtagcaaaggctaagcaggaaaagccactgtacagctttacttcgccagatggtataaaacatcgggtgtttaagattgcagataaagaggctgttgacaatataaagaatgcatttgcaggaatagatgacatatatatagcagatggacatcatagagctgcttctgctgttaaggttgggttaaggagaagggcttcacatcctgattatacaggaaatgaggagtttaattattttctttctgtactttttccggatgaagagcttatgataatgccatataacagagttgtaaaagatcttaatggatatagtgttgaagatttcaaaaagcttgtatcggaaaagtttgatatacaagaaagtgatagtgcggtttcaccagacaaaaaatcagtatttggaatgtatcttgacaaaaaatggtataaacttatagcgaaaaaggatataatatcagatgatcctgttgatggacttgatgttgccatacttcaggataatctgttagaacctgtacttggaatacatgatcctaagactgataaaagaatagatttcgttggtggaataagaggtctttcagaactcgaaagaagatgtcaggatgattgtgtgctggcattttcaatgtatccgacatctatagaggagctttttgcagtagctgatgctggcaggcttatgccaccaaagtctacatggtttgagccaaagttaagaagcggattgtttatacataggattgaggaataagtacagttttttaaaatatatgtaaagaatacaggatgatattctactggcaggatgtgcagttgattaatacgttatgacacatggctgctgatagcagattcatcagaaaagaggattactatgttacataaagtgtacgatattgaacttccatatgaagaacttggcttaaagacacctgagaaaaaagctacaataacaacttatatcaaggaaatgtatcctgattatcaggatcccttcaacagaccacttgttataatatgtcctggtggcggatatgatcatcactcaccaagggaaggtgaggctgtggctgttaaaatgcttgagcttggatataatgcagtagtattaagatatagtcttgcaccatatatttaccctacacaggtatatgaggcagcttatacagttaagtgggtaagagatcatgctaaggaatgggatgtcaatccggacagaattatacttgcaggtttttcagcaggaggacacctggcagcatgtcttggtactatgtggagcggtgacatggttgcatcatttgcaaagaaatatctgggatgtgataaagagtatgtaagaccagatggactgcttttaggatatcctgttataacatctggaaaagatgcacatagagcttcattcgtaaaacttcttggtgaaaactatgaaaaatatatagatgatatatcgctggagaataaggtgtcaaaagatacacctgaaagctttatctggcatacatttgacgataattctgttccattggagaatacgcttttgcttgtagaagcattaagaaagaataatgttaagtttgaatatcatgtatttccagatggatgtcatggactaggactaggaactaaggaaactgctacaaagggtggcaaacactatcagccagaggtatatgcatggacaagcctttttaagcagtggatggacagatatgataaataaagcctgatgtaaaataaagaacatataatgtgcatataggtttacgggaaggggataagtatggataataaactgtataaacttatggactggcctgctatagaagagatagtatattcagagagcagtcatcctaaaagaatacttggtggtcatcgtactaaagacgggtttcttgtccaggtgttcagacctgatgctgttcaggtcagtatatctgtaagcgaaagaaaaaagaaaatacagatggaaaaggttgatgatgcaggtttttttgcaacacttataccattaaggaaaaatgttaagtatgttcttaatattgaagataaaaatggaattgtaaatgtttgttctgacccatattcatttgatgattatgatgaatatgatacagtttttaataagtttatggatggtacacaggataaggcttatcagatatttggcggacacgaatgcagcaaggatggaattaatggtacattgttcagaacatgggcaccatatgctcttcgtgtgagcgttgttggtgattttaacaactgggatggacgtatacatcagatggagagaattactgaacatggagtgtatgagctttttatacctggacttaaagcagggaccgagtatatgtatgaggttaagtttcatagcagggaaacagtattaaaggctgatccgtatgctatggaagctacaagatatgcagatgcacattctgttgttactacagtatcatcaaaagcttcgcataatggaaaaacaaaaagaacagcaccaggagtgaataatgctggtgctacagcattatccatattagaggtaagactaaaggatgtagcggatattattggtagtgaagctgattataaaactatggcagataagctcattgaatatgtcaaggcaacagaatatacgcatatccagcttatgagtgatgatagtgtattcagcaaaaagggatacagttatgcagcatcaggttactatgttcctgtaactaaatatggaagtgcacatgattttaaagaattcatagataaaattcatgatgcagatataggtgttattcttgaatggaatggtgcttattttggaagcgatatgcatggaatcgttaactttgatggtggaagctgttatggatatcttaagccagggctggataaaaagccgcacagggacgtaacgacatttgcatatgataagggtgaggtaaggagctttcttttatctaatctttcaatgtggattgatgaatatcatattgatggaataagactgactgatacagcgactatgctttatcttgattatggaaagagacctggtgaatggacaccgaatatgtatggtggaaacgagaatctggatgcaatagaattcataaaacagatgaatgcatatatacattcaaagaatagaaacattataagcatagctgatgaaacaagcagatggccaggcgtaacagatacagacaatgagacgttagggtttgattataaactgaatgatggtctggcagaggaattcagggagtttataaagcaggatccattgtttagaaaaggtgtatataataagcttacttatgagatgttttatcattataaagaacggtttatgacatctgtatcttatgatgcacttgatggctcatcaatatatgagcttgcagctggtaacaataaaaatagcaggcttgctgatataagagcagcacttggatatatatatacgtatccaggagccaaatgcatttctttaggaaatgatacaggcatactcatgacaggagaagaaagcgtaaaagaagcatggaacagattccagaagaatgagtataaggatatgcttatatatgtttcacagcttaatagaatgtacaggtcagagaaagccttgtatgagcttgatgataaagaagaaggatttaactggatagacaactataatgctgctgaaacggttcttgcatatgaaagaatcagtaaagataatgaaaaacttcttatagcggttaattttacgccggttacaagagaaaaatatatattgcatgttccagtcatgggaagatatagaatattgttagacagcagtcgttttggagatggtggtgaaaacatgcatgatagtaaagaagttatatgttcttctatagaaactgatgtcaatgataagtatgaattaagcataagtattccatcatcatcaatagttgtatataaatatgaagcttatagtgatatagagattaaggagcttaagattaaaaacgaagcagaagctgctaagatagaagcagaaaagaaagccagaatggcaaaagaacttgcaattaaggcagatgaggaagctaagaaggcagcagatgcagaaaaactagcaaaagaaagcttaaggcttgcacaaaaggcgagggatgaagctgagaaaaaggctaaggaagcggtaaaggaaagcgtcaggatagatgaagaaatgcgtaagaggctgcaggaattaaaatctgaataacatctatgcggcgtaatatcgtgtgaaaggaaaaatatatggcggagataaatacaataatcgaccagattacacactggggtcttactggtctgtggaaactggtatttgcagtaattatttggttcgtaggtaagaaagttatatccataagtctcaggcttttaaagaaaatatttgataagggaagtcttgatgcaggtgttataaactttacaatgtctattataaagtttgcattatatgcagtacttatacttatggttatagatgagcttggtatacagacaacatcacttataacagtgtttggttccgcagcacttgctgttggtatgtctttgcagggatcactttctaactttgctggtggagtgcttatacttatattcaagccgtttaaggttggagattatattgtagttggaaattatgaaggaactgtaaggactattgagttattatacactaagcttacaacagttgataataaggttgtgatgcttcctaatggtacattatcgaattctaacataattaatgttggtgcagaggattacagaagacttgatatagagatgtctataggttattcatctgatcttaagcttgcaaaaacacttcttaacaatataatcaatgcaaatcctgcaataataaaggatagagagataaaggttattgttaaaagtcttgatgaatcatgtgttacacttgaaacaagagcatgggttaaaacagaagactactgggatacaaagtttacacttcttgaaaattacaagtcagagtttgataagaatggaattgaaataccatttaatcagatggatgtgcatattatacagtaggggaattgttgtttaattgaatattagttggtgacgaacggacgacaaatataagctacaggcagttctgcacactatgttcaatgccagaagcttcaatcggc

SEQ ID NO: 501 - DNA, 1722 bp, Unknown
  gut microbiota DNA sequence
ttaataattgttaatttattaaccttattgtttctaaataaaaacttaataatactttaatttctataaaaaaaagattataattcattagcaaaataaattatagaaataaatttaggaggaataggttatgttaccattatggctgtgcattccttttgcgggattgctattatgtatcgcaattatgcctcttgtcaaagctgaatggtgggaaagccatcagttacatgcagttatattatggtcgatactttttattataccttttgctataacacagggtgttggaacggcagctgaaactgtacttgaatgtataataaacgattatttaggctttattgttttattatttggattattctgtgttgcaggaaatatttctttagatggtgatcttgtaggttcaccaagagttaatacaattattttgttaataggaacatttctttcgagtcttataggtacaacaggggcaagtatgcttcttgtacgtcctattataaagatgaattcatggagacacagaagaagtcatattatgatattcttcatattccttatatctaatatgggtggttgtctgacacctataggagatccaccacttcttatgggctttatgagaggagttccatttacatggagtatccatctgctgccagtgttatgttttaacctgcttgtgcttcttcctgttttttatatgatagacagaaaaaactacagacttgatatcgctgaaggcagtgtacctgatataagcaaggagtcaactgaacttaagttccagggtggacacaatgttatatttattattactattgtaatagcagtagtgttaagcggtacactttctaatgttccagcattcataggagctgatggtgtgcttaagggactacatataggagaagttactttctcatttgttactatgatagagattgctattattcttttatcagcattcttgtcatttaagacaactaaaaaagaaatacgtacaaagaaccactttaactggggggctattaaagaggttgctatactgtttataggtatatttataactatgcagccagcacttattattcttaaagcagttggacctacacttggtatatcaaaggcatggcagatgttctggacaacaggagcactttcaagcttccttgataatacacctacatatcttgtattctttacaacagctggtacacttggatttacaagtggcattacaacaagtgttggcgtgattacggcaaaggttcttatgtctatttcatgtggcgctgtatttatgggtgcaggaacatatattggtaatgcgcctaactttatggtcaagtcaatcgcagatgaaaatggtgtccgtatgccgggcttctttggttatatgatatggtcaataggtatccttgttccagtatttattctggatacacttatattctttttataggaggttggcatgatgagtgaaaatactactaacaatataaaaaataacgacacgtcagtgagtgtcaatgagttgaaaaaaactgccttaaaccttgctaataagatatatgatcttgatgaaagagtatacaagtcggttggttccgaacttggacgtgtatttataggtgataagactaaatgtatagataaacttagtgctcttatatacagcaatcctcatggatatacacttagaagtgaggttgc

SEQ ID NO: 502 - DNA, 3626 bp, Unknown
  gut microbiota DNA sequence
acaatgatatattaaaagaaatagcagagattccacatatatttaattcagtagatattcttgatactgcaataagtgaactgaatgtatcaaatcttcacaggcataacgatgataagcgtatgataatatgcataagccgtacagagggaagtgctggtacagatataggttttgcacttgctgacaagcttcatcttaattattatgatgcagagattttcaaagatattgtgttaagaaaggatgctgaaaaggacgcaagattcaaaagcaggaagatagatttaagccatgatatggtacagccagaaaaggcaagaagattcagccgtaaccatggacttccagccaatgatgctgcattctttaatgaatcagaaattcttcgtgaacttgctgaaaaagaagattttatagtcataggacgttgcgctgatgttattcttaagaataacaatataccacatataagtgtttttataacagcaccggtagaacagagagcaaaacgtattatggagcttgaaaaaataccatattccaaagctttaaaaagacttgtaaaatttgataagaaaagggaaaaatattataaattctatactaataacgtatggggacaggcatataattatgacttatgtatcaacagtgcaagctatggtattgatgaagctgttaatcttatattacgtgtaatcaatagagataaacatgagtaatacaatatgctgaattaaaatcggcgcgtaaaaccagcactaaaccagcacgcagactttttatggaaagtctgcgtgttttctgttataataaaatgaataaaggtctaaactggcttatatgttactaacatcaatatataagtagatattgtaaagcagcaggaatggtgaaatgtatgaatgcatgtaagaattaccaaaagatgataaaagattatgatgaaggaagattgtcattaaaacaggaagaaaaattcataaatcatattattcattgtaatgattgtaaagaagaattggagatatattatatagtatcatatggacttgatgagaattatgatgagaataaaataccagatgatataaagaactgtattgattcatatgattttaaaactttggtagagcttaagcttaagaaaagcatagaacaatgcaaaatgacccgccagtggaatcacgatatgaaaatgatgcatgcatttatcaacatcataatggttttaatgtttattgtatgtataattatcagattttattaaatgtatacaatatataacttgtttattaaatgagcagtgtgaatatcacaaatagcacaagtatcagaatggaggattgatatgagtaagcttttacttatagatggacatagtatattaaacagggcattttacggaatacctgatcttacaaacaatgaaggcatacatacaaacgctatgtatggctttttaaatataatgttcagatttatagatgaagaaaaaccagattatgtcacagttgcctttgatttaagtgcacctactttcaggcataacacatatgcggaatataagggaacaagaaagcctatgcttccggaattaaaacagcaggttccacttattaaagagctgcttaaggcaatgaatattaaaattgttgagaaagaaggctttgaagcagatgatcttcttggaaccatagcaaaaaattcacaaaaagatggcattgatgtttcaatcgtatcaggagacagggatcttttgcagcttgctgatgataagataaaaatacgtattccaaagacaaagaaaggttcaacagaggttgaagattattatcctgaggatgttaaaaagctttatggagttacaccactagaattcatagagatgaaagcacttatgggagattcatcagataatataccaggtgcaccaggcataggaccaaagactgcatctgctcttatcgtgcagtatcatgatataaacaatatatttgaacatatggatgagcttaagcctcccaaagctaaaaaatcaatatcagagaatgttgatcagattaagcttagcaggttcttatcagaaataaaaacagatgtgaatattgactataatgtgatggatgcatctattgataatatgtttaatgatgagtcatataagctttttaaaagatatgattttaaaaatatgcttaaaagatgtgatggcaatatacagtcagaacctgactgctacgaacattttacaagtgttacagacttatcacaggttgaagatatatttaataaggcaaaaaaatgtgttgctgaatgcagaaaagtcggtgtaagtataatggctgagcatgaattatatgctgtgtcgcttacatttggagaaaaagatatatattatattcctgtatatggttttgtgcttactgattatcttatagaaaagcttgcagatctgataaatgtttcagacaacagatatatagttattgataatcttaaggattatcttcatatatttgataaatatgatattgatgaacattcatttatggatatatcagtagcggcatatctgatacatcctaataatgacagatacgattatgaagctctttcgaaggaatatatgtctatgcttgttatgtcaaggcaggagctgcttggaaagcagactgttaaggaagcgtatgacaaggatgatgacaatcttttaaagctggcatgtcttacatcatatgttaactacaaatgcagtgatgtaataacagatattcttaagaaggaagatatgtatgagctttacgaaacaatagaaatgcctcttgtatttgttctttatgatatgcagaagtttggcatcaaagttgataagcaggcattatctgattattcaaaagtacttgttgaaaaaataaatgtgcttgaaaaagagatatatgaagcagcaggtgaggagtttaatatcaattcacctaagcagcttggtgtcatactttttgaaaagcttgggatgcctaacgcaaaaaagactaaaagtggatattctacagcagcagatatacttgacaagctggcacctgattatcctattgttaaaaagatacttgaatatcgtcagcttaccaagctgaattcaacatatgcagtaggtctggtttcttatataagcggcgatggaagaatacatggaacgtttaaccagactataacagctacaggaagaataagcagtacagaacctaatcttcagaatattcctataagaatggagatgggaaaagctataagaaaggtatttatacctaaggatggctatgtgtttattgatgcggattattcccagatagagttaaggattcttgcgcatatgtcaggggatgaaaagcttatagaagcttataattcatctgctgatattcatagggcaacagcagcagaagtgttcaatacacctatagatgaagttacacctttacagagaagcaatgcaaaggctgttaattttggtataatatatggtatgagttcttttggactcagccaggatttaagtattactccaaaggaagccaaggcatatatagaaaagtattttgcatcatatccagacataaaagcat

SEQ ID NO: 503 - DNA, 1044 bp, Unknown
  gut microbiota DNA sequence
ttatagatggtcttgttgaatcggcaaagaaaaaaggttattcagtaactatgtttaatagaagaagggaaataccagaattatcatcaagcaactttatgcagcgatcatttggtgagagggtcgctatgaatgcacctatacagggtacagcagcagatattataaagcttgctatgataagagtaagcagggcgcttaaagagcagaaccttaagtcaaggcttatacttcaggttcatgatgaacttcttgttgaaacagcagttgatgaaatagatatagttaaggacattcttacaaaggggatgaaagaggctgcaagtcttagagtgcctcttgagatagatataaaacagggaaataactggcttgaggcacattaagtgttaagtcatggttggatattaagatgtaatcacgattttaagattaaaagatgatagtaaggaagaaatataatgaaagttataggaataactggcggaataggtgctggaaaatcagaagtgcttaagtttctggcagataattacaaatgtgaaattataatggcagatgatgttgctaaaggactgtattataaaggcggtaaggcgtatcatatgataactatgctttttggtgatgatattctttcttcggatgccagcattgataagaaaaagcttgcagatattatatttgctaatcctaataaaagagctgctcttgacagtatagtgcatcctcttgtcaagcaggaaataataacaaagattactaataaccgcatagaagggaagcttgattatacatttgtcgaggctgcactgcttcttgatgatcactatgatatattctgcgatgaagtatggtatatagatgcaggagaggatataagaagaaagagacttaaagataacagaggatattccgacgaaaagataaataacatatttgcaagccagaaaagaaaagaagatatcattgataaatgtgattattgtatcaataacagcggcgatattaaggacacattctgcaggataaatgatatactga

SEQ ID NO: 504 - DNA, 6714 bp, Unknown
  gut microbiota DNA sequence
tgatatattaaagtgcaggatttaaaagtaatatttggcagcatcaactataatatgtaaactgtgttgatgacaaacctgataaacgtataaatgataagaggaacagatatggaaaaggataagaatactaacaattatgtatttggacttgatataggtacaaggagtatagtgggtgtagttggttatctggaatatggcagatttaagatagcagcaatggcagaaaagcttcatacaacacgttcaatgctcgatggacagattcatgatatatataaggttggcgatacaataagacaggtaaagctttcgcttgaaagccagctggatattgaccttaaagatgtatgtatagccgctgccggacgagtgcttaggactgtaaactcaacagctgagtatgaattcgaggaagaaacaagggtgacgcaggaagacatatattcccttaatcttcttgctgttgaacatgctcataataaaataaatgatggttcaagtaaggaaaagttttattgtgtgggtaacactcctataagatatcagctgaatgattatgatataggtaatcttgaaggacataaggcaagaaaaatatatgttgagcttatagctacatttcttccagaggaagttgtagacggactttatgaagcggttgaatatgcaggactaaatgtagcctctcttacattagagccaatcgcttccatgaacattgcaataccagaacagtacagactccttaatatatgcttagtcgatgtaggagcagggacatcggatatatgtataactaaggatggaagtatagttgcatatggaatgatacctcttgcaggagatgaaataacagaaaaaatcgcaaagaattatcttgtggactttaacacagcagaaactataaagatagctgcaagcaatcctgaaaatgatattgttacatttaatgatattatgggacttgagcagaaggtaccgtcaagtgaaattcaggctatagcagatgagtccatagcgaatatggctaaagcgacagcagacaggattattgagcttaatggcggcaagtctgtaaatgctgtttttgttgtaggtggtggaggaaagatgccaagctatgtagggcatcttgcaaaagacctttcaatagcacccgaaagagttgcaatacgaggcaaggaagtgcttacaacagttgactttaatatagagggttttgaaaaagattctttatatgtaacacctataggtatatgtacaaactactatactcagaagaataagtttatattcgttaatgttaataatgaaagaataaagctttatgataataacaagctcactgtgtttgatgccataatgcagataggatatccaaacgagaaactgttcccaagacgtggtaaagagatagaatatatgcttaatggaaaaacaaggcttgtaagaggacttccaggagagggagcggttataacacttaataaggagcaggcaagccttaatacgcctatagagcagaatgatgttatttacgttgaagagtctactattggcgaagcggcatccatgactcttggacagattgaggaattcggatcagatataacatttgatgtaaatggcaaaaatatagtgtgtcctagatttgcatatgttaatggtgaattaaagtcagaattctatgatataagaaatggggatgctgttcgtatagagaatttttatactgttgggcagctttttacattcctagatcttgattattcaaagtatgatattatggttaataatatgccggcagataaaatgacaaaggtgtatgaaaactttactgttgattttaacgaaaaaagtgaacaaaaagactataatgatgcacaatatgaagacatagataatgaagatgtgaatagcgaagatgtgaagaataatataaaacatagtgaagaacgtacttctggcagtgatagtgatacagacgggaatattaatgcagataataatgaaagtaataaccaacgtaataatgaaagtgacaaagaaagtgacaatgaaagcagcatcataagagatattactattatagttaataacgcccctgtaacactttctggaaagagtcattatatacttgtagacctgttccagttttatgattttgatttgtcaaaaccaaagggtaatatagttatccttcttaatggtgaaacatgtgagtatacagcatctattaatgatggtgatgttgttaaaatatattgggaataagaatggtggaaacgatatgagaatgatgccgattgcaagcggtagtagcggtaactgtatatatgtgggttctgacgacacacatatacttatagatgccggaataagcagaaaaaaaatagaagaaggtcttaacagtatagatttatcacttaaggacatagatgctgtatttgttacgcatgaacatatagatcatataaagggccttggagtcatgtcaagaaaggatggtatacctatatactcaactccaggaactataaacggcatagcagcaacaacaagccttggagatattgacaacagctattataacacgataaaggctgattcagacacaaggattaaagatcttgtaatacatagctttggagtatcgcatgatgctaacgagccagttgcttacaatgtgacatgtgatgataaaaaagcctctgttataactgatcttggatactatgatgactatacaatcagcaatcttactggttcagatatgatgcttgttgaggctaatcatgatattaatatgctgcagcttggaagctatccatattatctgaaacaaagaatacttggcgataaaggtcatctttctaacgaaacgtcagcaaggcttattaataaccttcttaatgaccatattaaagggatttatcttggacatttaagtaaagaaaataattatgataagctggcatatgaaacggtaaagcttgaaatagatatgagtgaaaatgaatataaggcaggagatatatatatagaggttgcaaacagaagtgagccttcctctttgcttgaaatataatgcttagatatctgacgtaaaatagtgcagtatagctattgaaaatataaatgttatgttttaaaatctagagataagtatatctttttaatagatatatttatataaatattcacacttaatatgcgtgtttaacgcaggaaagaggaaaaatatgaagaaatgtgtaattacagtagtaggaaaagatacagtgggtattatcgcaaaggtatgtacatatcttgctgatacaggaattaatattcttgatatctcacagactattgtatccggctattttaatatgatgatgatagttgatttatctaactctacaagtggttttgatgatgttaataatgaactggataagcttggaaatgagataggtgttgttattaagtgccagagagaagaaatctttgatatgatgcatagaatttaattaactattattaagtatacgccataggcgatgcggaaatgaggagaaaaatgattaacatatatgaagttactgaaaccaacaaaatggtagagaaggaaaatcttgatgtaagaacaattacgcttggtatcaaccttcttgactgtgcaagcgagaatcttgatgaggtaaatgagaagatatataaaaaaatcacaactcttgctaaagaccttgtaaaaacaggagaggaaatatcaagggaaataggtattccaatagttaataaaagaatttctattacacctatttcgttagttggtgcctcatgctgtaaaacacctgacgattatgtaactattgcaaagacacttgataaggctgcccacgaagtaggagtcaatttcatcggtggttattctgctgttgtatcaaagggtatgacaaagagtgatgaactgcttatacgttcgattcctaaggcacttgcatctacagagcttatatgcagctcagtaaatgttggttctacaaagacaggtattaatatggatgccgtaagacttatgggtgaaatagttaaagaaactgctgctttaacaaaagatgcagactctcttggctgtgcaaaacttgttgtattatgtaatgctccagatgacaatccatttatggcaggagctttccacggagttacagaggatgatgccattatcaatgtaggtgtcagcggtcctggtgttgttaaatatgcacttgaaagcgtaagaggagaaagctttgaagtactctgtgaaactatcaaaaagacagcatttaagataacaagagtaggacagcttgttgctcaggaagcttctaaacgacttggcataccatttggtataattgatctttcacttgccccaacaccggcaattggtgattctgttgcagaaattcttgaagaaatcggacttgagagagccggtgctcctggaacaacagcggcacttgcacttcttaacgatcaggttaagaaaggcggtgtaatggcttcatcatatgtaggcggacttagtggtgcatttattccagtcagtgaagatcagggaatgatcgatgcagttaatgcgggttcacttactattgaaaagcttgaagctatgacctgtgtatgttctgtaggtcttgatatgatcgctataccaggagatacaaaggcaacaactatatctggtattattgcagatgaagcagctattggtatggtaaatcagaagacaacagctgtaagagttatacctgttgttggaaagggtattggcgagactgtagaattcggcggacttttaggctatgctcctattatgccggttaatacatttgactgctcagcatttgtaaacagaccaggaagaatacctgcgcctatacatagctttaagaattaattacacattttagaattaacatataacttacatagtaaaaatccccccggagcaaaagcctctgggggatttttatgtattggatatattcgctgtattttgtattaattataattggatatgcttaacgatttatcgatatagagataacattcattataatttatgtgatataatgagcgcataatatttatagaattattgacagattaaaatgcaaggggatttatatatgaaagcagtaggacttgtaacagaatacaacccatttcataatggacatttatatcatcttaataaagcaatggagcttacaggggcggatataagtgttgcagttatgagcggggattttgtacagcgcggagaaccggcggttcttgataaatatacgcgtgcttctatggcacttaacagtggagttaatcttgttattgaactgcctgttaattatgctgtgtcaagtgctgagagctttgccgctggtgctttaaaagttcttgattatataaaagctgacagtattgcttttggaagtgagagcggggatatagaagggctttctgagcttgcccacattttgtgcgataatgaagatatgctatataaggaaatatcaaaatacactgccaatggaatatcctatgccgccgcaagacaaaagacagttgagaaactaacggataaagacactgcggcaatgcttacaagttctaataacatacttgcggttgaatatctgaaagctatcataaaaaataattatgctattaaaccttatacagtacaaagacagggggatagttataacgatacagatataagaagtgagtatgcaagtgcgacagcattgagagaaaatcttaaagcggataatatatcggaatatatacctgtaaaagcgggattaatattatcttcaaatactaattatatatatcctgatgacataacagaagcgttatttacaaggcttttagatatactttttgcgagtaattatgataaaaatgtatttatagaaaatgttatgcaatatccagatgtaagcaaggagattgctggcagattatataagtcggctatggatatgataacaaggacagtaccacagggggcagaaagtaaagataatgggttgttttcatttggaagcctgtgtgaacatataaagacgaaagaagtaccactttccagaataaaaagagcacttgtaaggataacgctagggcttgataaaaaacatatggaaaaatatgcgaatgaaccatatataagggtgcttggctttgataaaaaagggcaggagtatctttcatatataagaaaaactgtggaagtcccacttataacaaagaccgctgactataaggaaatgctgcttgatgatatacacgcggctaatatttataatatgattgttgttggaaagtatggagttaaagaactgggggattttgtgagggggcctgtcagggtttgataaaaagtgtgagttaaattaagaggaaacatatacaattcaactgttggaaaatagtatgctgttggcacagattatatattcagggagtgttaggtatgtatttaatatcagcgtattttgatgaaaatactaataaaatattgaaacatctgcaacaaagaattgccgataaaacaggcaatgattttatgataaggaataatgttatgcctcatcttacaatcagcgcaattgaggcaaggaatgttgatgtgttaattccagcatttgaaaaggtatgcagggaaaagtt

SEQ ID NO: 505 - DNA, 2514 bp, Unknown
  gut microbiota DNA sequence
tcaatatccatatataatgaatttgcaacaatttcagaaactaatataagcaaattttatcagccatattcgtggatgccgcatattacacttggcaaatgtcttgataaggagcagatgagacaggcatttgctgtattacaggatttatttatgcctatagatggtcagattactaaaataggattgtctatggtcaatccatatagagaagtgatgagtgtagcgttataaatattcacagatttaactgtgtggtttgaaattaaaaaggttatagataccataaatgataatgcagcagcttaaataacattgaattatagacataattcagtaaaattgcttaacatttagaacaattctcaccttgtcttacgcaaaaaaaaggtatataatgggggcaaaagtagcggttacataatgataaacataatgtaccgaaattcatattttaaggaggagtcagtaatcatggcatttattgacacaatttacgctagagcaaaagcagataagaagactatcgttttaccagaatctatggataagagaacattcgcagctgctgagaagattttaaaggaaggtatcgctaatcttataatcatcggtacaccagaagaaatcgctgagaacagcaagggatatgatattacaggtgctacaatcgtagatccattcaatgatcctaataagcagaaatatatcgacaagttcgttgaattaagagctaagaagggtgttacacctgagatggctaaggaacagatggagaaggattatatgtactatgcatgccttatgtgtaagtgcggtgatgctgatggtgcagtttcaggtgcctgccattcaacaggtaacacaatccgtccagctcttcagttattaaagactaagccaggtatcagcagtgtatcaggtttcttccttatggaagttcctaactgtgaattaggcgagaatggattattcgtattcgctgactgtgctgttaacccagatcttgattcagagaagcttgcagaagttgcagcattatctgcagattcattcaagagctttgttggcgcagaacctaaggttgctatgctttcattctcttcatacggaagtgctaagcacgagagagtaactatggtagctgatgcagttaagattgctaacgaaaagtacccagacatcgctgttgatggtgaacttcagttagatgctgctttagttccagaagttgcagcacttaaagctcctaacagcaaggttgctggtaaggctaatacattagtattcccttcacttgaagctggtaacattggttacaagttagttcagagacttgctaaggctggtgcttatggtccagttcttcagggtctttcaatgccagtcaacgatctttcaagaggatgcttcgcagaagatatcgttggtgttgtagctatgacagcagttcaggctcaggatgctgctaaataattgtgtacatacattttgatgatatgattgccacgcggcagtcaggtacatcatttataataatatgagggacgaattatttgcccctcatattgtttgtataactaacatagactgattatttaatatgatatttttattttgaatatagtattattagtgatttaataatgagaaagcataaaatgttgttgctattattttgtattacgtatgctatgtgatttatattatattaaatgattatataacttatatttaattttataggagattaataagaatgaatattttagtattaaactgcggaagctcatcacttaagtatcagttaatcaatatggaagatgaaagcgttatcgcaaagggtcttgtagaaagaattggtattgatggttctatccttacacataagccaacaggaaaggataagtatgttgttgaaacacctatgaaggatcacaacatcgctgttaagcttgtacttgatgctcttatggatgcagaacacggtgtgatcaagtctacagatgaaatcgctgctgtaggtcacagagtacttcacgcaggtgagaagtatatcgagtcttgtcttgtaacagaagacgttaagaaggtagtaagagagtgcttcgatttaggacctcttcataatccagctaatcttatcggtattgaagctgttgaagctgctatgcctggtaagccaaatgtagctgtatgggatacagcatttggtggaacaatggagccaaaggcttatctttacgctattcctcgtgaatattatgaaaagtatggcgtaagaagatacggtttccacggaacaagccacagctttgtatcaaaggaaacaatcaagtttgctaaccttgaccctaagacagctaaggttattgtatgccaccttggtaacggtgcttcaatctcagcttctatcggtggtaagtgtgtagatacatctatgggtcttactccacttgaaggtcttattatgggtactcgttcaggtgatcttgatccagctatcatcgaata

SEQ ID NO: 506 - DNA, 57313 bp, Unknown
  gut microbiota DNA sequence
aaccttacagtaagtgaaatgcttaacatccttaacaagaagtcaggtgttcttggtatgtcaggtggtatttcttctgacttcagagatcttaacgcagcagctaacgaaggtaacgaagtagctaaggttacacttgaagcatatgcttacagagtagctaagtacatcggttcttacacagcagctatgaatggtgttgatgctatcacatttacagcaggtgttggtgaaaatgcagcttggttaagaccaatggtatgcaagtatcttggcttccttggtgttgaacttgatgaagcagcttcacagaaggcttgcggtgttgaaggcatcatctctacaccagaatcaaaggttaagctttgtgtaatacctacaaacgaagagcttgctatcgcaagagaaacattagcacttgtaaagtaattaacgacatatgttaattgattaaatatattaaattagttattgacaaaccaatatcaggtgcgtataatagacaaagtgtggtaagcgttatgtttatttactatatatagtatgaattggagacaattatgctaattgatttaagagagcttttatccggttcacaggatgagaagagttataaagcagatattgaaatgaatacatttagtacaggttcatctgattatgatataattgataaacctgatgttaatgtcagcattaaaaagctaggtaagaataagctttctataaaggctgattcttatgttacccttagtattccttgtgacagatgcttagagccggttgataccaaagttaactacacagttgatgaggttgttgactttaatgataatgcatctgaggaagaagcaaaagaagaaaaagactatattgatggatacaacctcgacgtggacaagttagttttcggcgaaatactgatatccatgccgggaaaaaccttatgtaaggaggactgcaaaggaatttgtctgatttgcggtgcgaatctgaacaaaggagaatgcggttgtgacagggatatcctggatccaagaatgtctgttttcaaagatattttaaagaattttaaggaggtgtaaccgaatgtcaatttgtcctaagaataaatcttcaaaggctagaagagataagagaagagctaattggaagatgagcgctcctaatctcgtaaagtgcagcaagtgtggtgctttaatgatgcctcatagagtatgcaaggcttgtggttcatacaacaagaaagaaatcgtttctgtagactaatccagtaaaatcatggaattatggtgttattaaagggttaggtattaaaatgatctaatagtagccccaattaaagacagagcgatatatattttcaaagggataaagagaataatctttatcccttttttttactttgatttgtcctttttgtttcggatattattttacaaaaaaataaagtaatatgtttacaatggaaacaatggaaactctggtaatatatccttgataaaaacttattttcgtagtatatttattaagtattttcatacattatgatataagtgcaggaagtgtatattgtttagttacagtgtggattgaatcactaaagtaacgattttaaaataatatattgatgcgcatttatctcatataatagaatataaggaatggacagatatatgataaaagttgcacttgatgctatgggtggcgataatgcgccagttgagattgttaaaggtgccatagctgctgttaatgcaagcaatgaatgctttgtatatcttgtgggccaggaagatgtagtcagggctgagcttgcaaagtatacatacaatgaaaaacagatagaagttgtcaatgcttctgaggtcatcgaaactggtgagcctccggtcatggcaatcagaaggaagaaagattcttcaatagttaagggtcttaatatggttaagaataaagaagctgatgctttcgtttcagcaggaagctcaggagctgtattggtaggaggtcaggttattgtaggtcgccttccaggagttgagagacctcctataggagctattgttccaactgataatagctgtgtacttattgttgacagcggagctaatgttgatgcaagacctgattttttagtacagtgggctaagatgggctctatatatatggagaattgtgtaggtataaagaacccacgtgtagctattgttaatgtcggactcgaggaagagaagggtaatcagctggtaaaagaaacatatccacttcttaaggcatgcgacgatattaattttattggaagtattgaagcaagagagattccacgaagtggtgcagatgttatagtatgtgatgcatttgttggaaatgtaatacttaagctatatgagggacttgctggaactcttatttctaagataaaaggggctttttattcaacgcttaaatctaagataggagcattacttgtaaagggagcacttaaagatacattaaagactatggatgcgtctgaatatggtggagcacctcttatcggccttaacagactggttgttaaaacacatggaagttctaaggctaaagagattaagaattccgttctgcagtgtgttacattttcaaaaagcaatatcaatgaaaagatagttgaatcacttgctaatatgccacacacagatacagaatccaaaaagtaaatgtataaaatatatgaatgattaaatataagcctgaaaataagatataaacaggcgggaatggaggaataatatggagtttcagaagttacagagaattatcgcagatgttcttaatatcagtgaggataaaatcacacctgaatctacttttgttgatgatcttaaggctgattcacttgatgtatttcagattatcacagagatagaagatcagtttgagattcagattccagatgatgcagcagaacatataacaacagttggtgatgctgtgtcacagattcaggcagctcttgctaaataatcaggataataacagatatggagtgccgccaagtatcactgcataacatgcaggcgaggcggcatttttatacttatgtgtcaactatatgatgaaaggaaaaatatatgcataataagaatttatcagaattaatgcagacaatacattatgaattcgagaatatagatcttcttaaaaatgcactcacacatagctcatatgctaatgagaaatgtattaaaaagtataaagataatgaacgtcttgagtttttaggtgatgccgttcttgaacttacatcaagtgattatatatataagaattatgctgatatggatgaaggaaggatgacaagattacgtgcaagtatagtgtgcgaaccaacacttgccatatgtgcaagagctataggattagataagtttgtcatgcttggtaagggtgaagaactcactggtggaagaaagagagattctattatatcggatgcatgtgaggcagttataggtgcaatatacctggatggtggttttgctaatgcaaaagaattcgtaacatcatttattcttaatgatcttgaaaacaagcaactcttttatgatagcaaaactattttacaggaagttgtccaggcagctcataaagaagtggtatatgagataattgatgagactggtcctgaacatgataagaactttattgcaaaagcttatgttgaaggtatgtttgaagtaacggcaaacggacatacaaaaaaacatgccgaacagagagctgcatatgaagcactcgtatatcttaagaagcatggacaggcataatgtaattaatggaaaaggaataataaataaaatatgtatttaaagagtatagaggttcaggggtttaagtcctttgctaacaagatagtgtttgatttccataacggaattacaggtattgtaggaccgaatggctctggtaaaagtaatgttgccgatgcagtaagatgggttcttggtgaacagagtgccaaacagctgcgtggtgctaaaatggaagatgttatatttgctggtactcagaacagaaagccggttggttttgcatatgttgctataactcttgacaacagtgatcatgcattgcctgtagaatacgatgaagtaactgtgtcaagaagagtttaccgctctggtgaaagtgaatataagattaatggacattcctgcagacttagagatgtcacagaaatgttttatgatacaggtattggtaaagaaggttattctattataggacagggtcagatagataagattcttagcggaaaaccagatgagagaagagagctttttgatgaggcggctggtattgttaagtttaagagacgaaagtcagctgcgataaagaaacttgaaaatgaaagaagtaatcttgtcagagttaacgatattttgtccgaacttgagaaacaggttggtccattaaagcaacagtcagaaaaagcaaaggaatatcttaactataaaacagatcttaaaaaatatgatgttaatgcatttttacttgaaactgacagaataaggaaggaaacggcagagcttaatgacagactgaaaatagtagatgatgatttagaagattctaaatctgaatatgataatacaaaatctgaatatgaagcagcagaaaatcagcttaatgatattaatgcccagatagacgaaaacagtcagactgtatcagctctggaacttgaaaaccagaaacttcagggagagataaatgtatttacagaacagataaagacatttaacgctaataagcagcttcattctgaaagattacttgatattgaaaaggacaagcagaataagaataactcagttaaagagctgagggagcagtataatgaccttaacacagaactttcagagtataatgataagttagcggctattaatgatacagctaaggctcttaacgctgagattgaaggaatatctggacagattgataatcgtcagaacagcatctatgataacctgacagagcagtctactatcaaggctgaaaatcagaagtttgttactatgcttgaacagctggaaattaaaaaatctgagcttacaagtcatattatcaaaggcaagagtgatgaaagtgcacagaaacaggttattaagtctcttacagcagagcttgataatgctgttggaaagcttgaagatattaataattcgattgaagaaagtaacacgtcagtaacacagctgaaagctgaaatcgctgaaaagaatagtgaacttgataagctgacacaaaactaccatagagaaaagtcacgtcttgaatctttaataaatattacagaaagatatgatggttatggtaacagcataaaaaaaatcatggaattaaaggatagcaatcctggtattcttggtgttattgctgatatagtaaaggttgagaagcagtatgaaacagctatagaaactgcacttggaggaacaatccagaatatagttacagataaggaatctacagcaaaagaacttataggttatctaaaacagaataagcttggacgagctacatttttacctttgaacgccatacatgctagaaatacgttagaaaatgaagcttgtataaatgaaaaaggtgttataggtgtggcaagtaaccttgtacgtgtttctttcgagtatgaaggacttgctaagtatcttcttggacgtattcttgttgttgataatattgataatgcacttctgatcgctaaaaaatataaatacacgctaagaatcgtaacacttgaaggtgaacagctaaacccaggtggttcaatgactggtggtgcatttagaaattccagcaatcttcttggacgtagaagagaaatagaagaattaaaacagtctgtatctaatactaataagcagataacacaagagaaggcagctgttgctgatttaaggaatcaggttgcaaagtaccgcgaggcacttgattcttataataagctgttaagagaaactcatatcagaaagaatactatagacgttaatcttaagcaggcagatcttaagctgtcagagattattgcttcatatggtgatgatataaaagaacaggcatctattgattctgaaatcttaaagataagtgaaagcaggaatcaggtcagtggtaatcttaatctgcttgacaatcagaacgaggcagccagaaaagagatagagaatcttggcaaaactcttgaagcaaaaaaatcagaggaagcagctgttgcactgaaaatagagaatctgaaaatatcacattcatctatagagcagaaagcctcatttatcaatgagaatatagaaagactatgtaaagagctggataatcttgaagaagaaaaaacttctatacaggaaaaaataggtgaaacaaaagaacttgtatcagctaagcaggctgatattgagcttgttaagaattctatagaacagtccgaaagaaaaataacagctataggtgaaaaacttgaagatttaagagcagccaaagaaaaggttaatgcaagtcataaagagttctttaagaaacgtgaagaattaaatgaaaaaataattcttcttgaaaaagatagtatgagacttcataaccagtatgacagacttgaagaatcttatgactcacttgtagattatatgtggaatgaatatgagcttacatatagttatgctcttgagttaaagagcgatgagcttaataatattaacgatataagaaagcagattaacatattaaaagctgcaatcaagaaacttggagatgtcaatgtaaatgctatcgaagaatataagtcagtaagtgaaagatatgaattcatgaagacacagcatgatgatatgattgaagcagaagaatcacttatgaaggttattgaagaacttgatgaaggcatgagagcgcagtttactgctaagtttgaagaaataaaagttgaatttgataaagtgttcaaggaactttttggtggaggcagaggaacaatagagcttgtagaaggagaagatattcttgaagccggtatacttataatatcccagccacctggaaagaagcttcagaatatgatgcagttatcgggtggagaaaaagcgcttaccgctattgcacttctttttgcaatacagaatctaaaaccttctccattctgtcttcttgatgaaatagaagctgcacttgatgattcaaatgttggaagatatgctaattatcttcataagctgacaaaacatacacagtttattgttatcactcacagacgtggtacaatgtcagcagctgacagattgtatggtataaccatgcaggaaaagggtgtatctactcttgtatcggttgatcttatagaaaatgatcttaatgacaggaaaaaagaatcgtagaaaatatattgattaagaaagagaggctgtatatgggactttttagtaaattaaaagagggtcttacaaagacacgtaataatatagtgtcaggtattgataatatatttagtggtttttcttcaatagatgatgatttttatgaagaacttgaagaaacacttattatgggagatatcggtgtaagagcaacagacgaaattatagaagaattaaaatctaaggttaaagaaaacaagattaaggatcctaaggattgcaagcagttacttattgacacaatccgtgaaaagatgaatcttggtcctaatgcatatgactttgagaatcagaagtcaatagtcatgcttataggtgttaatggtgttggtaaaacaacatcagtaggtaagcttgcgggacatttaaaggcgcagaataaaaaggttatcatggctgcagctgatacctttagagcagcagctatagaacagcttacagaatggtctaacagagtcggagtagatattattgctcaaagcgaaggctctgaccctgccgccgttatatatgattcaatagcagctgcaaaggcaagacatgcagatgttctgttgtgtgatacagcaggaagacttcagaacaaaaagaatcttatggaagagttaagaaagatagaccgtgttatagaaagagaatatgcagatgcttacagggaaaatcttattgtgcttgatgcaacaacaggacagaatgctctttcacagctaagagaattcaatgacgtaacaaacataacaggtatcatccttactaagatggatggtacagctaaaggtggcattgcagttgctatccaggctgaattcgggataccagttaagtatgttggtgttggtgaaaaggttgaagatctccagaagtttgattctgatacatttgttaatgcattatttgatgttgagatagatgatgaagatgaagatcagaaataatatcatcaaattatttattaaatattatataaaaaacttgaatgattacggtaataggaataatatataaaatgtcagaattttattttgacattcatatcattttataaaattcaggaaaggaaagtactgtcgtggtataatgggatttttagtatatatagaataatgtgttgttttatgcatttgtatgatatacatttattgcgatagcactatataagtaataatggaagaattaacacttaagaaattcgaagaagctgctgaaaaggtaaaggaagccacacttccaactaatcttgtatacagcgaatattttagtaaccagacaggcaacaaagtatatttaaagcctgaaaatatgcagtacacaggtgcttataaggttcgaggagcttattataagataagcactatgtcagaagaagctcgtaaaaaaggtcttataacagcttcagcaggtaatcacgcacagggtgttgcatttgcagctaagaagtatggtgttaaggcaactgttgttatgccaacaacaacacctcttataaaggtaaacagaacaaaaagttatggtgcagaagttgtgttatatggtgatgtttatgatgaagcgtgcgagtatgctcttaagttagctgaagaaaaaggacttacttttgttcatccttttgatgaccttgatgttgcaacaggtcagggttctatcgctatggagattataaaagagcttccaacagtagattacatacttgtaccagtaggtggcggcggacttgccacaggtgtttctacactcgcaaagcttcttaatcctaatataaaggttattggtgttgagccagcaggtgctaactgtcttcaggcttctataaaggctggaaaggtaacaacacttccaactgtaagcacaattgctgatggtacagctgttaagactcctggaagcaagctgttcccataccttcagaagaatcttgatgatataatcacagttccggatgaggatttaatagtatctttccttgatatggttgagaatcataagatgatagttgaaaattctggtcttcttacagttgcagcattaaagcagattaaggataaagataagaaaattgtttctatcctttcaggtggtaatatggatgtcattactatgtcatcagtagtccagcagggacttgttcaaagaagcagaatctttacagtatcagttcttcttccagataagccaggtgaacttgttaaggttgccaaaataattgctgatgccaatggtaacgtaatcaagcttgatcacaaccagtttgtaagtatcaacagaaaagcaacagttgagttaagaattacaatcgaagcatttggacatgagcataaagaacagatagtgtcagagcttgaaaagaatggattaagacctagattagtaaaggtaaacatctaatattgtctgttcctgacatcattatttaaattttttaaaagtgtcaagtaaaagtacttgacacttttttagtaccatgatattatactcaaggcttaagaatatttatgagctggaaagttaaggtgcattgtggaacgtattgtagaacagacattgttatatgatttttatggcgagttacttaatgaacatcagcggggtgtttatgaggatgccgtgttcaatgatttatccttaagtgagattgcagatgaatatggaatatcaagacagggtgttcatgatcttataaaaagagtatctaacacacttgatggatatgaggcaaagcttcatctggttgaaaagtttatggatactaaagcaaagattacaagaatagacgagcttgttgatgcatatatcaaggatgaggatatgagttacatccatgagattaagaagctctctaaagaaattatcgaagattattaatcatacattggaggtcatatatggcatttgacagtctttcagataaacttcagaatatatttaagaatcttcgaggtaaaggccgcctttctgaagctgatgtcaaggcagcactcaaggaagtcaagatggcattacttgaagctgatgttaactttaaagttgttaagaactttatcaagtcagtagaagagcgtgctattggacaggatgttatgtcaagtcttacacctggtcagatggttataaagattgttaacgaagaaatgatatctcttatgggttctgaaactactgagattaagttgaaatctggcaacgagataactattattatgatggcaggtcttcagggtgcaggaaagacaacaacaacagcaaagcttgcaggtaagtttaaggaaaaaggtaaaaagcctttacttgttgcatgtgatgtatacagaccagctgctattgagcagttaactataaacggcaataaacagggagttgaagtgttctctatgggaacaggtcataatccggttgatattgccaaggcatctatagcacatgctaaggataataattttaatattgttattcttgataccgctggtcgtcttcatgttgatgagaatatgatggaagagcttatcaatataaagaatgaagttgaagttgaccagactatattggtagttgactctatgacaggtcaggatgctgtcaatgttgccgcttcatttaacgaaaaggttggaattgatggagttattcttactaagttagatggtgatacaagaggtggtgctgcactttcaatcaaggctgttacaggaaagcctattctttatgtaggtatgggcgaaaaattatcagatcttgagcagttttacccggatcgtatggcatcaaggattcttggaatgggagatgtccttacacttattgagaaggcagaagcacagattgatgctgacaaagccaaggagatggaagctaagcttaagaaagcagagtttgattttgatgatttccttgagtatatgggtcagataagaaatatgggcggtataggttctattatgagtatgcttccaggcatgggacttggtggcaacatgaagaatcttcagatgcctgatgaagatgaagcagaagctaatcttaaaagaacagaagctatcatacagtcaatgacagctaaggaaagaaagaatcctgatattatcaatccatcaagaaaaaacaggattgcaagaggtgctggtgttaatatcagcgaagtaaacaggctcatcaagcagtttgaacagatgaaaaagatgatgaaacagatgcctggtatgatgaaaggtgctaaaaagggacgttttaaattacctttttaacatatatattattatgaaagatttacaggaggtgaaacagtaatggcagtaaagattagattaaagagattaggtgagaagaagtctcctttctatagaattatcgtagcagattcaagatctccaagaaatggtagatttattgaagaaatcggtacttatgatcctaattacgatccatgcaagcttaacgttgatgcagaactcgctaagaagtggttagctaacggagctcagcctacagaagtagttggaaagcttttcaagatggcaggtatcgaaaaataagactagtggaggtatttagctatgaaacagttagtggaagttatcgctaaagcactagttgataatccggatgaggttgtagtaacagaaacacagaaagataaagcaattgtcgtaaatttaaaggttgcttcatcagatattggtaaggtgatcggtaaatccggaagaattgcaaagtctattagagctgttgtatctgcagccgcatctaagactgataaaaaggtcattgtagagatagacaattaatgcactgttatgagtcattatactttttaagtatagtggctcatttttgttattaatatttgcagtaaaacaccaggtgcatatagtatcatattaatactagtacatcgttttcaaaataacgtactagaaaatatgttcgacatatgttaatataatgatgaaataagaagtataggagaataatattattatgaaactgatacactgtgcagatctgcatctggattctgatatgacaagtaatcttactaaagaaaaagcaaaagaacgaaggacagagctgttagtgacatttcaaaggatgattacatatgcaaaggaaaatgatgtacatcatattcttatatctggagatctgtatgataagaaaaacatatcatctactgcacgcaatgtttttttaacagcagttactgataataaagatattatattttattatcttaaggggaatcatgatgctgaaagtctgtttattggaatgaataagattccagataatttaaaactgtttggtacagaatggacggaatataagattacttctgaaaaagataacaacaacatagttattagtggcatagaacttactgcggataattccaacattatttacaattctcttattcttgacaataactgctttaacatagtcatgctgcatggtcaggaagcacagactaaaagcagaaatgaatatcagagcatatcaatcagacttcttaagaataaatggatagactatcttgcacttggacatgtacactcatacaagaaagaaaagcttgatgcaagggggatttactgttatccaggctgccttgaaggcaggggttttgacgaatgtggtgaacatggctttgttgttatagaagtaaacaataatacacttacaagccacgaaatgataaaggcagcttcaagatgcctgtatgaaatagacgtagatatatcagaatgcctgaattcatctgaaataattaataacatacagcatgcacttgatatgaagcattatagcagttcaagtatgattaaagttgtgcttacaggtaatataaatgtaaactgtgaaaaaaatatagaatatattacaatgatgttttgtgacaaatattattattttaagttgtatgaccattctggaataaaaatagattatgataattttctatatgagaattctgtaaaaggagagcttgtacggcttgtgaaagctgatgatgcgctggatgatgacactaaagctgctattatagcgattggaatcaaagctttaacaggagaggaatatatatgaaattagtaagtctgcatatagataattttggcaaatttaataaccttgatatgagctttaataatggacttaatcagttgatagaagaaaacggatgggggaaaagtacacttactgcatttattaaagtcatgttttatggctttgataattcctctaaaagagattcctatgaaaatgaaagaaaacgttataagccgtggaatggcggaatatatggcggtaatataacattctgtcttgatgataaacgatatacgatatatagaacatttgaagcaaaagataaagatgatacattccgccttgttgaccaaagaacaatgttagtttctttagattatagctccaatattggatatgaaatctttaaaatagacagcagcacatttaaaaagaccttatgtatatacgaaaataactgtataacagaaagcaccggcgatatcgaagcacttcttggagatgaacagtcagatacagaggatataaataactttgacaaggttattaaaagcatggatgataagcttaatgccttaagtcctgacagaaaaacaggtgaactttataaacagaaggacaagcttaatgaaatacaggcacagttaaaagaaatgccagtattagaagatagtatagacacaactataagacatataaaagatacagaaaaacttatggaaaagctgtctttgcaaaaacagcatataaaaaaagaactggataaggcaggctattacaatgaaatgcaaagcattttaaagcaatataatatatatagcagacagcttgaagaaaaaagacaagcctatgaagaaaagcttgaagaatatggcaggcttccagatattaatgatgtttgtatgaaaatacaatatgcagacagtatacttgataaatacagccagctaaaagaactagagcctaataagacacagtatgacaggctgcatgaacttaaagcatcggtgtcttgttattcgcatcatgagcttaagaaacagattgataacataaaccatctgaacacattaaagtctgagatacaaagtgaattatctgttgcagataaatatagaaacattcttttaatagcatctatagcagtcggtctgctttctattatagttggtgctataactggtactggcgtattgctgataccaataggaataatattaataattgccggaatagtgtataataaaaatgaaaaaactggaagcagtaaacatattcatgcacctattaatgaattaaaaaacgattataaaaagcagtatttacttataaaagaatggcttgatgcacacgatattagttttgatcctgatgtagtatatacactgtcaacaatagataacagattatatgaatatgaaagaatcgtccaacagatagataagtataatatccagtataagcaggctggtataagtggatatgtcaggaatatatgcagctttatagcaagctttgagaattatatgccacaagaactggctgatattataaatgatgataaaaagaagcaggatattatactgcttataaaggagtgtaataactgcctttataaaatgaagcaggatattgaaataatcggacatataagaaaagaatatgatgatgcatataatatatttaatacatttgtaagccagcataatgatatagataaaatcatagaacaagtatcagatgctaatcttgaacatactgtaaatgtgtctatgcttaacagcaggctggatgatatagaaaaaaaactcaagcagcataacgataatatagctggatatagcacacaattaagtatatatcaggataaacttgatgagcttacagataaaaataatatactttcggaacttatggaggattatgaaatacgactaaaaaaatataacaatctcaagctggcaagagaatatcttataaaagccagaatatcgttttcatgtaaatatcaggtttcagttaaaaataaatttaatgaatatattgatatatgtaacaatgcaacggacttccacgacaagtatagtattgatgttaataacagactgcttacgaatgaatatggacaggaaagagagcttcgtttttttagttcgggttcaaaggatatagccagcttatgtttaaggctttcatttattaatgctatgtataaggatgataaaccatttataatcatggatgatccttttgttaatatggatgataacatcataaatggtgctaaagcacttttaaatatactatccgatagttatcaaataatatattttacatgtcatcaaagcagaattatcaaaacacgggattaggtctgagtgcaccttgccatatacccgcatacataaatatgtgcacagaaaagaggaattttatgaacgaagatatgttaagagtaggtgtgattacatcaactcacggaataaaaggagaggttaaagtgtttcctactacagacgatcctgcaaggtttaaaaagttaaaagaatgtgtaattgctggaaaaagaggaaatgtaaatgttactgtacagtccgtaaagttttttaaacagtttgttatactgaaatttaaagaatttgataatattaatgatattgagatttatacaaaatgcgacctgcttgtaacaagagataatgctgttaaatgtgaaccgggtgaatatttcatatgtgatcttatcggacttactgttgttacagatgaagggaatactcttggaaagcttactgatgttatagaaacaggagctaataatgtgtatgaggtcacagcccctggtggcagagtatattatcttccagttattgatgaatgtatacttgcacatgatcttgacaagaaaacagttacagtacatgtgttaaaggggcttcttgacattaactaaagcagaattcacaacgaaatattttattgaaattaagattgcatgtttttattgcatatttttataaaattaatacttgcatatttatttagtatatgttattcttatcaagttgtgaaaagagacagtcctctgttgtgcaggtcacattaagaatgtcgaaataataaggaggtcacacatgaatacaattattaagaacatcgaagatgctcagcttaaggctgaagtaccagctttcaatgttggtgatactgtaagagtatctgctaagattaaggaaggaaaccgtgaaagaatccaggtatttgaaggaactgttttaaagaagcagggtacaggagtacgtgctacatttacagttagaaagatttctggtggaatcggtgtagaaaagacatggccattacattcacctatcgtagagaaggttgaagttatcagacgtggtaaggctagaagagctaagttattctacttacgtcagagaacaggtaaggctgcaaaggttaaagaattagttagataattataataattctataataaaatgaggttgtaacaggtttgtgcctgaattacaacctcattttattataaatatttttttaagtttaagaggtagcatcggttccaagagataacgcacaaccttctccatgtttatcgcagtgataaattatattatagccacctgaatttatatcttttgtaatcatataaaaaccggccttcagttttgctttagagccatcaaggaaatttatttctctcctataatagtttttatcctcgtgaatatcaggaactgctggattgaactgaccagttaaggtataatcagcttggatttcattaaaataattctgaagattagcccagtcagcggcaaccctggctttatgaatatgcctaattaaagaagggcttagtataccgacaagcacagccataatggcaataacaataatgagttcaactaatgagaaacctttattgtgattatttttattatgtttattaaaaaaattatgtaaatgtatcatatagtatcctcctttttatatttgtatatatattaagccgtggtcaaaagccaccgacttaatctcatgggattataaattttacataataataagtcaataaaataaatataaaattttttgattatatgctatgatatgtgtatcaaaagccaccggctttgatacctacggattgttccatgcgacgcactcacgcaatctgctctggtattataataatataaaataatttttaatagaaatggagatttcaatgtatttagatatcttaggattaataggtgcgtgttcgtatgcacttgactgcgtagaagcagagcttgtacactcaactaataaacactctaaacgagttgcgtatatgagcgtgtgtattgcaatgaatatggggattaatgatgaaagtctgcaggatttggcagcttgtgcacttatgcacgacaatgcactcacacaatatatcaaagaagaactgcataataactatatagatatacatggtaaacagaagcagcttccacaggtaggacagcattgtatacttggtgagcagaatataaaaaagcttccatttaatactgatgttaccaatgttattctttatcaccatgaaaatgcagatggaagtggaatatttggtaaaaaatggaatgaaattcctttgttttccagaattatacatatgtgtgatatattagatctggcctgctgtaactctattaattctgataagcattccaaagctgcttccaataaatacttaccatactggaataaaatacaatactttcttgaaaatgtgcgtggcaggcttgttgataatgaatgtatagattcattcctacaggtgttcacgcctgataatattagtgagcttgattctgataatatagaagtgaatctatggagcaaagttccacgaatgaataaggagcttaactttaatcagcttaaacagatagcaagtttttttgcaggaatcatagattataagtctccctttacaagtacacattctattggtgtagcctgtatagcaaagaagcttgcaggatatatggggcttggagaggaaacatcacagaaaatatatctggcaggtgcattacacgatattggcaaggtagccataggcaatgatatattggaaaagccagataagcttacagatgaagaatattcagttatgaagcatcacgcagcttatacctactatatattatcagacattaacggctttgatgaaatacgtgactgggcggcttttcatcatgaaagacttgatggtactggttatccttttggtaaaacagcagcagaattaggtgttgaagaacgtataatggcttgtgcagatatatatcaggcgcttacagaaagccgtccttataaaagcggaatgccacacaataaagcctgcagtattctgtatgatatggctaataagggctggattgattctgatgtagtttcaaatatagataaatgctttgctaatgaagctgatatattgtaatcagctatattataattcagaatggagataataaatctatacttttgacccagactttgatacctacgaattgttccgtgctacgcactcccacaattctccccaatatgagcgagctcatgtgggtttagaccttttgaccctggtatcatataacattaagaaagagaaatgacacaggtatcaaaaatgaatactaatatatcttacatatatgatggcaggaaagctttctttcatctgcctggtttgtttgaattctatgaattttataaggtttttctgcctttattttatgaacacagggagtatttttatgattggtgcgatataggctctatatatggtgcacctgccgactgcctgtggggtggagggcgtgctggatttggagattgcgatgccagagaggtatttaagcttatggcagaatataaaatatcatcaaggcttacttttagtaattctcttcttaaaaaggaacacctatcagataaaaaatgtaatgaactgtgtgaattgctaaaggctgctataaagaaacagcatacttattctggtatcaacaatacttctattaatacagcatgtaagacagatggtgttaaaaatggcattatcgttcattcagaccttctgcttgactatttaaaaaataaatatcctgaattctattttgtttcatcaacaaccaaggtgttgacagattacaataaattactggatgaaataaacaacgaggcttttagctatgttgttcctgattttagattgaacaaatgttttaataagctggaaaacatgacggctgcacaaaaaaataaagttgaatttctatgtaatgagtgctgctggtttgaatgctatgaccgtaaagcctgctatgaagcggtgagccgtatgaatcttggtgaaaattgtgcaagccatatatgtgtatcaccaaaagctgccgaaggttatagcttttctggtgcaatgagtaaccctgcattcataagtgtagatgatataagaaatatatatattcctatgggatttactaactttaaaatagaaggaagaagccttggaagtgcacttattcttgaatttatactttattatatgactaaacctgaatttcagattcatgtaagggaagccatatatcttgataatatgcttgatttattttaaagaaagagagtactactatgaatactacagatatgaatgatacaactatgactaacacaactatgaagaatattgatatattaaataaactgcatattgcaatgattgaactatacagtggtgatgctaaaagaatacaacatttctgtaaggtacacagctatgcccgactgattgcaaagatggaacatgtagataacaaaactttatttgttattgaaacagctgccctgacccatgatatagggatacatatatgtgaagaaaagtacggggaatgtagtggaaagcttcaggaaaaagaaggtccctcacttgcaggaaaactgcttcataagcttgggtttgaaccagaaatttcagagcgtgtgcagtatctgattgcacatcatcatacatataataacattgatggtattgattaccagatactcatagaggctgattttcttgtgaatatgtatgaagataatgtatcaaaggaagctgtattaaaggcttatgataatatattcagaactgaatatggaaagcagctatgcagggatatgtatggtttttgattttacaggcacagataaatcatgtctttgacacctatttcataatcctgtataatgcgttatatattattgaataaaacggagagtttttataatgagttcatattatagaagatatcaggaaaatacagtacttcttaatatatgtaaaacaatagttgatattgttatggttattgttgctgcgtatgttattgtttcgttttcctgtacaagaacaactatatcaggtagttccatggaagatacgataaagaatgaagacacagtacttatcaacaggtttgcatataccttagatgaacctaagcgttttgattgcattgcctttgagccagatgcaatcggttcctcaaagctatatgttaaaagagtgataggacttcctggtgaaactgtccagattaaagaaggacatatatatattaatggtaatctgcttgaaaatgatattaatgatacatatattgtaactgctggaattacagcaaacgagattcatcttgcagaagatgagtatttctgtcttggtgataatagaaataacagtgaagacagcagattctcaagtataggcatggttaaaaaaaagcatgttattggaaaagtatggatggtattacagccttttgaagatatccggtttgtcaaataaataagagcatctactttaatttatgaaaggtacttatatgcagaaatcaagaaataataatggttcaacaaataaaaaatcaatagaaaaaaatcatcaaaaaaaacagcagaattcaaaggactgcaatacagccaaagctggtaaaagcagtttcaactggtatcctggtcatatgactaaggctaaaagaatgatggaagaaaacataagacttattgatcttgttatagaaatagttgatgcgagagttccaatgagcagccgtaatccagacatagataaacttgcctctaacaaagcaagaataattcttcttaataaggctgatttagcagatgattatgtaactaacaaatggattgcttattttaacagtaagaatatatattgccttaagcttaattcaagagacaattcaggcgttaaacaggtaaataatcttatacagaccgcatgtgctgataaaatcgaacgtgataaaagcagaggcatcatgaacagaactatcaaagcaatggttgttggtatacctaatgttggaaaatctacatttatcaattcctttgctggtaaggcaagtgccaaaactggtaacaagcctggtgttactaagggaaaacagtggattaagcttgggaaaaatgttgaaatgcttgatactccaggtatactatggccaagatttgaaaaccaggatgttggaatgcgcctggccatgattggctctattaatgataatattcttaacatagaggaacttgctatagatactattaactatgtgtataacaactatcctgataatattatcgaaagatatgagcttgataaagaagctgtaaaagcaagctatgatgagagcgctattaatccagataattcaatagcactgtatattatggaacaggctgctttaaagagaggctgtattaaaaaaggcaatgccatagactatgaaaaaactgcgaatataatacttgatgacttcagaagtggacgtcttggacgaataacacttgaaaggagtgaagataatgccaacagctaaagaacgtgaagaaaaaaaagcacttaagcttcaggcagagcttgaacgtatagaaaatatgtgttcatacgaaaaggaatattcgggatatacgtatatatgcggtatagatgaggctggcagaggtccatttgcaggtcctgttgtagcaggggcggttgttcttcctaaagacagcagaatactatatgttaatgattccaaaaaattaagtgagaaaaagagagaagctctttatgatgttataatgaatgaagctgtttcagtaggtgtcggaatagtaggtccggaaagaatagatgagatcaatatacttaatgcaacctacgaggctatgcaccaggcgattaataatcttactataacacccgatatattacttaacgatgcagtagatataccaggaattagtataaaacaggttcctataataaagggagatgccaaaagcctttctattgcaagtgcaagtataatcgctaaagtaacaagagacagacttatgtatagctacgatgaattatatcctgaatatggatttgcaaagcataaaggatatggaacaaagcagcacagggatgctttagcagaatatggagcttgtccaatacatagaaagaccttcataaaaaattatatataataatatgattttacttgtttttaatgaatatactgcaaattgcaaatgatttatttatcagataaaaatacagagaatggagattcgtatggatattaatgtacaaaagctttctaatatatcgtcaacaggtaccgaacagactgataatacatacaacacttcagaaaaaaatatcaatataacgaatactcctgcttctggtttaaataatataaatagcaatgcttactcagtgttaaaaaatcttatgcccggagatgtcctttcaggcattattaaccagataaaagattcccaggttcttattggctttaatgatggttctttattgtctgcacaccttacgggtgatgctaatgtttcaaaaggggataatataacatttcttgtaaaaaatatttcagataatcagatatcccttaaggtagtatcagttggtgaacaacagaatatgtttatagataaggcactagaggctgccggattatacgctacagatgaaaatacagccatgcttaaggaactgttatcacttaatatgccagtaagctcagatatgcttaacaatatgaacaggcttatggcgcagtatcctggtgctaatattaacacaatagctaatcttatacgtcttgatatgccggttacatctgataatatagctatgtttgaagcttataaaacctttgatgcacagataaataaccagcttaattcccttggattaaatatttataatagtataaataatgcttgtgtgacaggtgatttaaaagcactttcagatatcggaaatctgataaatggtatgtacggaattaacggaactgatagtgaagtaaaatcagaatccttatcttactcattcccagatgatttcataaacaagcttactgataaactaaacagcgtatctgatgccggaaaagttctgtctgatagtattataaaagacaacatatcattaaaagataccattaactatatactaaataatccttctttatctgatccttcatctggcattacgaattcagctgtatttaaacagctgcttggtcagtttataacagaaactatgagacttactcccaaggatgttggtacacctggtgacaatcctataaacagcttctataaaagggtgcgtaaaaatattgaagatgttgaaagcatatataaaagcagcaacatcaatgaagacatatcaaaaagcatggaggatataaaaagtaacatagattttatgaatgatcttaataagaatatgactttttttcagatgcctcttaagttttctgagggtgaaggcaacggtgaattatatgttttcactaacaaaaaggcacttgcacataattcagaagatgtaagtgctatgcttcatcttgatatggaacatttaggtcctatagatgtttatgtaaagcttaacaaaaagaatgtatcaactaatttcatgtttgagagtgaagaactgctcaactttgtatattcacatatagatgaactaaatgaaagattagaaaagcttgggtattcaacacattttgaaatgaaggtgtctgaaaatgtcaaagatgaattcgattttgttaatgattttattgaaagagatatacggccagaaaataacggacaatacatacttgatgtaaaagcataaatcataatataacatggattacaggtgaaagggggatggctatatggctgatagcaggtataaaaataataatgctggtgatatcgtaaatggtcctgatggagctgtacgaaaacagaaggtagcggttgcactacagtataacaaaggcgaacaggcaccaaagatcatcgcttcgggaaaaggtcatattgctgataaaatcatagaaaaagcaaaagattcagatgttccaacctatgaagacagcaagcttgccaatactctttctaatcttgaaataggagatatgattccacctgaactatatacagttgttgccgaaatacttgttttcgtagataaaacagataaattaagaggtaaaatacatggttgataataatccaccatataataaaagaaatataggcactaggtatgagaacatagcggttgaatatcttttatcacagggacatacaattattaaaagaaattatagaaccagacttggtgaaatagatatcatatctaaagataattcaacaattgtatttacagaatgtaaatatagaagcaataacagatatggatatgcgatagaggctgtagatgtgcgtaaacagcataaaataagccgtgttgctttgtttttttgtaccaggtatggatacacctcttttccgtgtcgttttgacgtcattggaatagaccgtaacaacagaataactcatataaaaaatgcatttgactacagatgataataaaattatataaatcaggataaggaataaaataatgcaggatattaatactctatgccgtgtcaacagttctttattatatagcggacttattgaacaattcggacatccagataattttaaaaacacgatttatactaatatatcagagcaaaatataccatatattacatttgcgccattttctaacagcgatgtagtaaagcaggctttttccacaagacttggtggtgtgagtacaggaatgtttgagagcatgaatcttactttcaaccctgtaggacagtatgaggcagattcatataagaatgtatacaaaaattttgagcgtatggcatcagttctttacataccggtagaacgcatggtatatactaaacagacacacacaaccaatataaagattgttgatgacagccatgccggaatgggaattacaagagaacgtgattatgataacatagatggattggttacaaatacaagaaatctatgtcttgtatcatcctatgcagattgtattcctgttacgcttgttgacgaaaaacagcatgtgatcgcagctatgcacgctggttggaagggcactgttggaaatatagcagctaatggttttaatgcaatgaaaaatgcatttggctgcgtaaacgaaaatataaaagcattcataggtccaggaatatgcatggattgctatgaagtaagttccgatgttgctgatatgtttaaagcagcatataccaaacaggaagttaatcttttgttaaaaaatggaaaaacagaaggtaaatatcagcttaatcttttgtccgctaattatattaaccttattaactgtggtattaaagcgtctgatatatatgtatcagatgtatgcacatgctgtaacagcaatattctcttttcacatcgtgcaagcaaaggaaaaagaggaataatgtgcaattttatttatctgagatgattataaccaataaacataatttattaaaaatctaataaaaatggtgtaatgtaataagaaaatccatccttattacattacaccattttaaaatattctttttatttttcttttttcaatgtatttattttgttttattgttattttcatgagcttttttatattcagcccttaattgtgcttcttcattcagtctcttagcttttcccttcggtccaacctttaccagaacataaagaattattgcgagtataattattggtataccaacagtaattatatttgataaagtttctgatataactgaattttcaaaaagtgattttcttactttagcataactggctgagcttataatgcttttagcattggctgtcatatcctctgaaacacggtttgtcttagactggatagcatatgtgtatatatatcctcgcacaacagtataatatttctgactgtaaacagtaacgtcatttgatactgaatgtatattagttacaaaataagggatatcattaatttttatcagttcacttgactcaagctcttccttaatgttgtcattatttatagccgactgtgatgcaacatattcattgtataataagttaagttcgtcttctgacaattcatttaagttaccaagattctttgatgctgtatttccataaacaactatttcatatccgacatcctctggaactgcttcaagatatattttattagctatcatattgttagtaagcaccgatgcttcattaacacccagcttttcaaggtatgaattattatttgttgttgttcttgtaaaacatatcagttctttaggtacctttacagacaagtctatatcagaaaacttgaaattgtttgtgtcacctgctgcatatgcatatgtaaaagtagccacacacatgactgatgctataatcatagctgcggctttttttatgatttgtttgttaaacacgtaaaacctccttcttaaaactacgcatttccaatatttcgtatgatagcatagcgctttacaaaaagcaattaaactggtattatattttagattatgtgtgttaatttttcataaattaacattatcagatgatgtttttaagtataaaaattatttttatctactaaaaaagattttttatagtattttgtatggaggcgaatatatgagtaaaccaatagttgctgtagttggtcgtcctaatgttggaaaatcaacattgtttaatgaccttgcaggacagcagatttctattgtaaaagacacaccaggtgtcacacgagatagaatatatgcagatgtaacatggcttgataagtcattcacacttattgatacaggcggtattgaaccagatacaagtgatattattcttgcacagatgagagagcaggcagaaatagccattgaaactgcagatgtaattatatttcttactgatgtaaaacaggggcttgttgattctgatgccaaggtggctgatatgctcagacgttcaagaaaacctgttattcttgctgtcaataaggttgataactttgacaaacttatgcctgatgtatatgaattctataatcttggtatcggtgatccacatcctatatcagcagcttccaagcttggacttggtgatatgcttgatgctgttatcagccattttccagaggattcaacagaggaagaggaggatgaacgtcctaaggttgctataataggtaagcctaacgttggtaagtcatctattattaataaactcctgggaaagaacagagttattgtatcagacattgcaggaacaaccagagatgcgattgatacaactataacctataataaaaaagaatatgtatttatagatactgccggtcttagacgaaagaacaagataaaagaggatcttgaaagatatagtatcataagaacagttgcagcagttgaaaggtgcgatattgctattcttgttattgatgcaacagagggtgtaacggagcaggatgcaaagattgctggtatagcacacgaaagaggcaagggtattataattgctgttaacaaatgggatgctgttgaaaagaatgataaaacaatatatgagtttacaagtaagataaaggatactttatcatttatgtcttatgctgaaattatctttatctctgctcttacaggacaaagaatcggcaagatatatgagcttattgatactattatagacagtcagactatgcgtataccaactggtgtattaaacgagattcttacagaagctgtcgccatgaagcagccaccatctgataaaggtaagcggttaagaatatattatatgacacaggtatcagttaagccacctacatttgtaatgtttgtaaatgacaaggaactgacacatttctcatatacaagatatattgaaaacagaatccgtgaatcttttggattcagaggtacttcgataagatttatcaacagggaacgtaaggagaaagaataatgctaagcagagttatatgtcttataataggatattttgttggtgctattattcagactggtttctggataggcaagtttaaccatattgatataagaaattatggaagtggtaatgcaggaactactaatactatgcgtacacttgggaaaaaagctggttttctgacatattttatggatgctttcaagtcatgccttgttgctatcattatacattttgtatatggcagtaattcaggtgtatcggaaatgctgcttattctttatggtggctttggagtagtgcttggacataactttccattttatcttggatttaagggtggaaaaggtattgctgctacatctggcatggtcataagccttatactttttcctaagtattgctttatgtttactgtatttggaatgcttacatttggtttagttacaaaactttcaagatatgtatcacttggttctattatcggtattataggtttttttgttgaatttgtaatctggggtctgcttggatggcttccacttgctgataaagagtttaaagaagctgttatagttgtattattattcgttcttcttggcgttggaagacaccatggcaatattaaaagacttttaaacggaacagaacgtaaaatcggtgaaaaaaagactgataattaaaacaaaaacagaaatatcaaaaagttattatagttttatagttatcggcagcatatatgtattcttcttacttgggcatatatgctgccagaaatgaggatttaatggtaaagattggtatacttggtgcaggaagctggggacttggacttgctatgctgcttaataataatggacatgaagttacagtttggtcagtatttcctgatgaaatcaaagaactggatgaaacccgtgaaaataaaagatgtcttcctggtgtgatattcccagaacatattaaattcaatgcagatacagaatatgttatcaaaaacagtgatgtgcttatacttgctgttgcctctccttacacccgttctacagctaagcttattgctccttttgttaaggaaggacagtatatagtaaatgtcggtaaaggtatagaagagcatacgttaaaaacactatgtgaagtaaccaaagatgaaatcccacaggcagttatagctgttctttcaggtccaagccatgcagaagaggttggacgtggtattcctactacatgtgttataggaactgctaagaaagctgatgcacaatttctccagaatgtattcatgagcaatgtattccgtgtatatataagtcctgatgtacttggtatatgcataggcggtgcacttaagaatgttatagctcttgcttctggtgttgctgatggactaggttatggtgataatacaaaagcagcacttataacaagaggtatcgctgagatttcgcgccttggatgcgctatgggcgccgatataaaaacatttgcaggtctttcaggtatcggagaccttattgttacatgtgcaagtatgcatagccgtaacagaagagcaggtattcttattggaaaaggacacactatgaaagaagccatggatgaagtacagatggttgtcgaaggtgtatatgcagcaaaagcagcacttgagctttctaaaaaatacaatgttgaaatgcctatagttgaacaggttaatcttgttttatttgacggaaaagctcctgccgatggtgtaaaggatcttatgttaagagataaaaaaattgaagctggaaatgtagactggaattaaaaatagaatccttactaaaagaaatggggaatagaatggcacatttaaagcacgttaatagagcttatatttcaaaaaaattaaaagatggtttaagcgggcttgaatataaaagatataattatatatgtgcacctacaggatatggaaaaactcttgtatgttcaacattttacaagaattattcaagacggacagttttatggattgatgcagacacaacacctgacatattctggaaacgtttatgtacatcattaaatgtagtaaatgcaacttacgcaaatgaacttttaaaggctggttttccgtataatgatgatgatataagaaatatcacttatattcttgatatgtttccatcaaaagatccagagtatgttatcataatagataattttgataaagtacttaccagtgttctaggcagactttttagtgctaattgtatcaaaaatccacttggcataagctttgtgtttatcgtaaaagctgttactgaccataaaataataaatcttatcactaaaaatgaagtagggtttatcggcaccgaactgctttcattcgatatagatgatattatttattattacaggataaacgagcttgttatcacgagggaagaggcactttcaatatacaacaaaacttatggctggccatatgctgttgaaatatatatgaaaaatcataatatgtccgataatcatataatgaatattctggattcttttatatatacaaacatctggcttgacaatactgacagcataaatgaatttatcttaaagatgtctgtatttaataattttactttgacacagtgttcaagacagactatgttaagtgaaaaagattgttataatatacttatgggaacaagtcttattatgtatgacaaagattcacagtcatacatgtttaatcctgtattcaggcattttgttacagatattcttaataataaaacaactgatgtcatctataatataaccctggatgcagcaaatacctataaagcttctcataactactatgaagcaatcgcactttattcacgtataggacattatcaggaaatatatgacagtgatgtttcagttgaagagctttatgaatatgtcataaaatccaataaagatatatttttagatattgctaaccattattggagtgttgaaaaaaaaggacattatgatatggcagtcaatatcagctttattatgtttttgtataacgaaaagcttactgctgcaaagcttatatcaaacatatcagatgatataaaaaaagactgtcatctttcaaaagagcaggtgatggattataatgcggcacttacatatataaatgcttttcttgattataatgatttcacgaaaatgaacgctcagtttattaaggttgctgatattactaacaaacctcttaaacatatagctggacatttccccttcagctttgaatgtccatcagtaatgagtatatatcattcctcaccaggtgcacttgattatgaaacatatgctttagaggaatgtgcatcaaactattacagaatcacaaatggacacggaaaaggttttgaggcacttatgaaagctgaggttttatataaccgtggtgaaatagaaagtgctgaaatattatgtcacaaagcgttgtatatggctgatgggcgcaatcaatacagtatatatatagctgcaacatttattatgacccttatatcgatatataagggtgctaatgatgagtttaaagagcagatgaataatatgacacatatcacggaaaatacaagttatttaccacagcatatgcataaaatgactgatatatgtaagtcatacatatattcaaatctctcaagtcctgataatatgtgtgaatggttaaaagattataagcagttagagctttcaattaattttcattcgctcggattcgccaatataatattgggaaaatatcttatacttataggtgattatcataaatttcttgggataagtggtcagtttttagggttaaaccatatatattcatatgtaatatctaatatatatacatatatatatctttcaatagctaacaacgagactggtgaaaaggaaaaatcccataaattcatcatgatggcagttaatctggctatgccggacagattatatatgccatttgtacataattatccatatattaatatgctgcttgatgaaataaatacaactaaagatatatcattttttgttaaaaatatacagaggctttcaaaaccttatgaaaaaggtgtgaaggctatcaataaagccgggcgtctgcttgctgattatggattgactgtaagggaagctgatgttgctaagcttgctgctaagcgtcttaccaacaaggaaattgctgaccagctttttattgctgaaagtactgtcaaatcaaatatgaaaatgatattcaataagcttgaaattaattcaagagcagaacttaagaatttttttgattaactataaaataaaatgattgtgaggtttttatatgcgtgttatagcaggaacagccagaagccttcctttaaaaactatagaaggaactgacacaaggccaactcaggacagaataaaagaaacattatttaacattcttcagtcagatataccaggatgccatttcctcgacttatattctggaagcggtgctataggtattgaagctatcagccgtggagcagcaaaagctgtactagtcgagaattctaaggctgctgcacaatgtataagagataatcttaagtttacaaagcttgatgataaagctgatgttatggaaatggatgttctttcagccattaacagacttaaaggaaagggtgtattttcaatagtatatatggatccaccttattcgcatgactatgaaaaggacgttcttattgcattacataattcagatataatcgatgaatatacaacaattattgtagaggaaaagcttgatagtgatcttgattatgccacagactgtggctttgatattgtaagagtcaaaaagtataaaactaataaacatttgttcttacgcctgaagggaagtgctgaataatgaagaaagctatatatccgggcagctttgatccagttactcttggacatcttgatataataaaaagatcagcagcgctcgtagaccatttaatagtaggagttttaaacaacaatacaaaaacaccattgttttcagtagatgaacgtgttaatatgttaaaggaagttactaaggatattccgaatgtagaagtattaagctttagcggacttcttgtagattttgccagacaacataaggtccagacaataatacgtggtctgcgtgctgtaactgattttgaatatgagcttgccatgtcacagacaaacagagtggcagctcctgacattgatacaatttttcttaacacgagtcttaaatatgcatatttaagttcaagcattgtaaaagaaatggctatgtatggcggcgatataagcaagtttgttccagcatgtatcattgaaactgtaagagaacgttacagtataagctataaagataagtaaatcgaatgaaaaagggagagttgacaatgagtagaatagagcagattataagtgatattgaaagttatatcgataactgtaagtttcagcctttatctaacactaaaatcatagttaataaagatcagttagaagatatgctcaatgagttgagattaaaaacccctgaagaggttaaaaagtaccagaaaatacttaacaataaagatgctatcatcgctgatgccaaggaacaggcagaaactatagttaatgctgcacaaattcgtacagaagagcttatcaatgaacatgagattatgcagagggcatatgcacaggctaatgctcttatagaacaggcgactgcacaggcacagcagattcttgacagtgcaacagaagatgccaacagtatccgtcagggagccatggattacactgacgatatgttagaaaagcttcaatatatcattgaaaagtccataagggataatcgtgacagatatgactcattattatcaggccttgataatatcttatctatcgttaataataaccgcaacgaattaaagacacctgttcctgaggaagatgctcagactgaagcattcgatgaatcagcggcacaggcagaagatgctttatcacaggatacacaggaagacatattagaatccattgatgacaatgataatattccggaataaataaaaaaacacatatacatccatatgctttaagctgtatgaatgtatatgtgttttttatttttctgatttcattttgaagaaatagctatgataagataagtaaccaatattgtacatatcgtcagttttattttttgaaaaatatatttctttatatcaatgcatactccaacattatctttaattaccgaatatgtctgcataagtgttgataatccgccaaatgcattgattgctgctataagcattattttaactaatgggctttttatagctgatacaaaatatattccatttgtgatttccataaagccacatgcaatccagttgatataaggcatagagagcatatgtgaaaagtattgtatgtaagcacacagacaggaaaatataattatatagcctccaagctttaaaactgatgtaagcattttatctattgaattattcaatatagtaaagaaatccatatattcagctgactgaatatatctttttgaatcacgaatacatttagcagcggtcctgtttcttacatattcatagatgataagaagaatagtgggaagatacacgcataataaataacagaatatattaaaatgctctgacaaatagttataatatatataattgataacaaagcccggacttgatatattacaatacggcattatatacgtaagccattcgttattattataatttttctgatatttaatacaattcagtgcacctgctggaaaaccacatagcaggctgcttaatatgacaagaaatgttccatatgtataatctgcaggtatataatagttaaaacattctataaatatcattcccataattaatccaggtgcaaccttaagtccccataattttattcctgatattgtcgctggaataagaatatcaggagttatcatcattaacacaaaaaacatcagtaatataacaaatattaaattatgtctagttttcatcatattctatcctgctatacattttcttaagccttatttcatatccttaattaaatatatacaatattatcaaaaaaatgaataaagcttattttaaaaaacttctttttatgcttatactatgtattgctgctgttttattaacaagtggattaagatgctcatcgcatatactgcataatcttaatattgatattgatgataatgctttcacaaatatggacatatcatgttcttatgatgagttagttaatgcagctgatgcaataaatgctgataaagggcagcttatgacgatatgcacatgtttatatgacggaaaaatatcttatgataatctaaaaaaaataacacgtcctctatatgtacgtataagtaattatcttaaccggacacaggcagataaattcagacaacagaaaaaaatatataatagtattttaaatgacatcagatactttccagttccacgctcagacaaaagatatgaatgggtaaattatgttaactcatggaataatgcgcgcacctacaaaggaaaccgtacacatgaaggaacagatataatgggagatataaataaagatggtgtttacccggttatatctgtaagcgatggctatataagtaatataggctggcttgagcttggtggctggaggatcggtataacctcctgtaacggaatatattattattatgctcatcttgattcatattacagggattttaagcctggagataaagtgaaggctggagatataatcggatatatgggaagtactggatatagcagggtagaaggtactaaaaacaaatttccaacacatcttcattttggaatatacataatatccgataccaagactgaaatagccattaatccatacaatatacttaaaataaatgaaaataatgctttgatttatagctattaatccctctacatgctataatgagtaaaatttcagaaattgaggttacataaatggaaatacagatgtggaaggaaatacttaatccatatgaacttgctgtagaagagcttcaggttaagtttaatcatatggtgaaggaatatcgtcaggctggtatttactctcccatagagcaggttcttggcagagtaaaatcaatatcaagtatacttggcaaggcacagaagcaagggatagatatcgatcagatagaaggaaatatacttgatatagccggaataagactcatatgccagtttactgatgatatatataacgtagctgatttaatacgtgcaagaagtgatatggaagttatcaatgaaaaagattacgttaagaatataaaaccaagtggttacagaagctaccacataatagtcagatataaggttgaaactgtaaaaggaaccaaagttatacctgtcgaaatccagatacgtacacttggtatgaatttctgggctataattgagcattcgctgcagtataagtacaatggtaatataccatctcatgtccgtgaaagacttacatctgctgccgatgcaatatatacacttgataatgaaatgatgagtatccatgaagaaattatagatgcccagaattttgtatcgactaaagcaaatatagtttctgatatattaaacaatatccagagcctttataaggttgccaataaacaggagattatcaaaatacaggacgaattctatgatatatatgaaacagaagacgtagccaagcttcaacgcttttcaagacagcttgatatgattgcagaaaattataaggcacagagtatatagtgcagaaatgaggaacagatgaatttaccagagagttatcttaaaacaatgaaggatatgttaggttcggaatatgatgcataccttgaaagctttaatgataaaagattatatggacttcgtgttaataaccttaaaatatcaacagaagattttctaaaaataagcccgttcaggttaaaaccaataccatggattaaaaatggcttttattatgaggaagatgataaacctgcaaagcatccttactactatgccggcttatattatatccaggaacctagtgccatgacacctgccaatgttcttcctgtaaaacctggcgatgttgtttttgacatgtgtgcagctccaggtggtaaatccactgaacttgcttcaaaacttgcaggagatggacttcttataacaaacgatataagtaattcacgtactaaagcacttctgaagaatgtagaagtgtccggagtttctaatttatgtgttcttaatgaggatccagcaaaaatatcaggtaaattccatgaattctttgataaagtccttatagatgcaccatgttccggagaaggaatgttcagaaaggataataagcttatacgtgcatgggaacaaaatggtcctaaggtatattctgccattcagaaaagcattatactacatggtgctgatatgcttcgtcctggtggaatgcttctttattcaacatgtacattttcaaagcttgaagatgaagaaagtataagatatcttcttgataacagacctgatatgcatcttgttgatatagtttcttatgaaggctttgcaaaaggttttatatcatctgatgaagatttaaaagataatatggacaaatgtgtccgtattttcccacataagatgtcaggtgagggacattttgtagctcttttaaaaaaagacaatcctgatgatgttttacatgcaaaatatgtgcatacaccacttaagcaaaagcttcctgacgaattaacagattttcttaaaaacacaactatgaatatagatactgattatatcaatatacgtgattcacgtgtatatgctatatcaaaacatatgatagatgagaaaggcctacgcataatacgtaatgggcttctgcttggtgaacttaagaaaaaccgttttgaaccaagccaggctcttgctatggcattaaaaaaggaacagtataacaactgtatagatttaaagcttagtgatgaaagagttataaaatatctgaaaggtgaaactttagatgtagatgatttccctgacagtaagggatgggcacttgtatgtgttgatggatatcctcttggatggggaaagtctaatggttcccagcttaaaaacaagtatcttgcaggttggagatggatgtaaaatgcagttaagactagataaatacctgtgtgatatgcaggagggaacaagaagcacagttaaagatatgataaggaaacaacgtgtatctgtaaatgatatcgttgttacacgtcctgaattaaaggttaatacagataaagatatagtatgcattgatggcagacagataggttatttccattatgaatattatatgttaaataagccacagggtgttgtatctgcaacaactgacaaaaccgacaaaacagttattgatattattacagacaaaaaaagaaaagatctttttccagtaggaagacttgataaagatacagaaggtctccttatcataacgaatgatggagaacttgcccacagacttttatcgccaaagcatcatgttgataagatatatgaagctgatgtcaaaggaaagttgccagattcatgtgtagaaatgtttgcagaaggactggttgttgatagcagcttcactgctatgccagctatactcagtataatttcttatgatgcttttactgatacatctcatatacgtattacaataaaagaaggtaaatatcatcagattaaacgtatgtttaatgccgttgattcagaagtcctttaccttaaacgtttatctatgggaagtatagtacttgataaaactcttaaaaccggggagtatcgtacacttacagatgcagaaatatcaacattgaaggatttttaatagatatttatatagatatacagaaaggtaactttatgactaacttttttttacctgtttcaaaatcagacatgaaaaaaagaggatggacacaatgtgatttcatatatatatgtggcgatgcatatgttgatcatccatcatttggacatgcaataataaccagactgcttgaagcttttggctataaagtgggtattatagcccagccagactggaaaaataaagaatccataacaatacttggagaacctcgtctggcttttttagtatctgctggtaatatggattccatggttaaccattatactgttaataaaaaacgacgtcatcaggatgcattctcacctggtggtgttatgggaaaacgcccggattatgcaacaattgtatattgcaacctcataaggcaggtatataaaaaaacacctgttatcattgggggtatagaggcttccttaagaagaatggctcattatgactactggtctgataaggtgaagcgttctatccttattgattctggtgccgatatcatatcctatggaatgggagaacattctattatagaaatagctgatgccctaaacgccggtattgatatacatgatataacttttatcaagggaacggtttataaaacaaaaactcttgataatcttgaaaactatatcgagcttccatcttatgatgatattgtaaacagcaaggaaatgtatgctaaaagcttttatacccaatataaaaacacagatccgttcacagcaaggattctcgtagaaaaagttaaagaaaaaatgtatgttgtgcaaaacccaccagctatgccacttacagaagttgaaatggatgatatctattcccttccatatatgcgtaattatcatcctatgtatgaaaaggatggtggcatacctgctttatcagaaataaagttttcaataacaagcaaccgtggctgctttggaggctgctcattctgtgccctcacatttcaccagggaagaataattcaggtaagaagccataaatccatcatagatgaagcagtacaaatgactaaagatgcagactttaaagggtatatacatgatgttggaggacctactgcaaacttcaggcatacctcatgtgacaaacagcttactaagggcgtatgtatgaacagacaatgccttttcccaaagccatgtcctaaccttaaggtcgatcattcagattatataaagcttctgcgtgaattacgtgcactgcctggtgtaaaaaaagtattcatacgttcaggtataagatttgattattgtatgtgtgattctgatgatacatttataaacgagttatgtaagtatcatataagtggacagttaagagttgcacctgaacatatatctgacaatgtacttaaaaaaatggggaaaccttcaaatgatgtatatgaaggctttcttaaaagatatcagcgtataaataaaaaaacaggaaaagagcagtttgtagtgccatatctgatgtcaagccatcccggctccaccatgaaggaggctatagaacttgctgaatatataagagatcttggatatatgcctgagcaggttcaggatttctatccaacaccttcaacattatcaacatgcatgtactacacaggacttgatcctgctaccatggataaggtatatacacctgtaagccaccatgaaaaagccatgcagagagccctcatacaataccgcaaccctgagaattatgagcttgttaaagaggctcttattaaaaatggacgaacagatcttataggctttggtcctaagtgtcttattccgccacgtaatataaacacacatagtggcagatatgtaaaaatggcaccaaaaaaacaatctcctgttaaacagtcacaggttaaacagcatgcgcagcataacaacgcaaaaaataacaagactgttaataaaaagaaaatggggcataaataatgaataagaaaaataaaggtgattttggttatcttaattataagaagaagcttaattttataatagccgccgttgctttacttataataatcgctgtatttataactggtcttataatatttaaatcacgtaataattatatgaccctcgttgccactgtactcgttcttccatgggccaagcttgcaattgcatattttgtactgattccacataaggaatgtacacaggatatatatgaaaaacttgaacaatcaaaaaagaatatatcatctatatatgatgttgtggtaagcaattcaaaaaaaccaataggagtatgtgctatggttgttaccgacaacacagttgctgcgttaagccttgataaagcaccagataaggaactctttgaaaaaagtctcaaggattttttaaaaaatgataagttaagtgcatctgttacattatatacagacactaacagcttcttaaaaagagtttccagccttgcggcaaactttgatgcagctgatgaaaacaaaacagacagaatgggatatataaaaaacagcacattgaatatgtgtctttaatattgcagctgatgctttactgatacagacagcatgcgcaagaatggagattaatatgaaagaattaataatagacagacttggaagtaaccagaggcttgataaatatcttgcaaaatatctttctgctgccaataaaagttttatatataaaatgcttagaaagaaaaatataacccttaacaacaaaaaagctgatggaagtgaaaagttgatggaaggtgattctgttaaaatatttttctctgacgaaactcttgaaaaatttacagagggcagatataaagcttctgacaatatcattgattataaatctatatataagccactggatattgtttatgagaataacgatatcgtacttattaataaaccctctggcatgctgtcacaaaaatcagagccaaaggatatatcgcttgttgaatatctcacagcatatctgcttcactctggttcaataagttacgaagatcttaatatatttcatcctggtatatgtaacaggcttgacagaaacacaagtggaatagttgcggctggtaaaaccatgaatgggcttcaaaagctttctgcccattttaaagatagaacccttaacaagtactatatatgcattgttaagggtgaaataaccaaaagacagcttgtaaaggggtatttaaaaaaagatcatagaagtaacagagtaacaatatataagcaattacctgatgatatcccatctgataaaaatatgccagcaaatgataagaatactgataaatcagaatacatgccaatagaaacagagtatgttcctgttgtatcaaatggcaggataactcttcttaagatacatcttgtaacaggacgaagtcatcagatacgagcgcatcttgccagcctttcccatccactggctggtgattacaaatatggtgatgcttcatttaatcaatattttgctgataaatattactgtaaaaaccaaatgcttcattcatatgaaatagatatacctgatatgaatatacatgtacacacggatataccagcttcatttataaatgctttaaaaggagaacagatatggcagcctggaattccagaggtcttagaggctctgcactagaagattatattaatatgacaaacgaaaaatatcttactaaccatcttggacttatccagaaaataccaacacctataacacctatacgcatgaacaaagaaacaaggcagataacacttgcgtattttgagcagaagagtactgttgactatataggtgtcatccaggggattcctgtgtgctttgatgcgaaagaatgtgcaacagatactttttcaattcataacattcatgaacaccagataaattttatgaaggaatttgaattacaggatggtatttcattcattatattatatttttcaacaagagatgagttctattatatgccattttctgatataataaccttttgggaaagagctgctaatggcggacgaaaaagttttacatatgatgaagtggataaaagctacagaatcaatcatggaaaagggattatgcttcattaccttgaaatgattcaaaaagatattaatgagcgaacgggagaataacgtgttatggagcttaattatattaatgattatgaacttgttaatggatatgcagttattgatagtgatttttcaataataacagctaatgaacgtatgtacaaattcgttggaatatcaactaaattcacaatagcagaaataatacatcaggttgatattgaggactttattaatgttgccaacagtcttagattaggacagagtaaaagcatggttcttcgcatgaaaagaatcgataattcatatcgctgggtacttgcagatataaaaagatgtattcttaatacccagtatgatgagcacgcatcagaatatctggagctttgcgtatccgatgttattgcccttagaaacagatgcaatacactaaatgatgatctttcatcatacagaagagttatatctatggatgacgaattattctatatatatgaatatgagaaggatttattaacagtgtacaactatatcgacaatgatgctatagttgttatatctgctcctattatggaagtatataatcgtattattgcaaaacagtttattccagaaacaagcattattcctttcaggcagctcttaaatgatatacagaaaggaaaatctgtatatgaatatgattttaatatatgtatttattcagattatgaacaggagcagtcaaagcttgtaaattcccatctgcgaggttcaactatatattcacagatgcacgccatgcgttctgttggtacacttaaactaaccggtcttaaaagtgtattttcaagaactacctatgattttgaatatcatacacatattcttgaaacaaaagatcttgaattatatacattaaacaatgcaaaatataataaaaattgtcacctgacttttattaagattgttattgacaacatttccgactatgaatacattcatggaaaacagaacactcttgaattacttgaacatgttgaaaatatacttattaaagcagtagaataccgtggcgttattggaagaacagataaaaaatggcagtttattattgttattaaagatataaataacgaacctgaattacgggcatttatagaatatatgcgttcacgtgtttcgtgggaatgcagaagctatgacaactccttcaacataagtttttctataggaatatcaagatatcctgataatggaactgactggaaacttctgacagataagcttattaaggctacggatatagctgttaaaaaaggtggaaatcgttatataatctataaagaagcaattcatggagaacttccataaaatcattgacattgatagtgtctttatgtataatctctttaacttgttatcacgttaccttgctaaagtcagacgtgactaatatattttttcagttaaagtttgttatgatacacgaaaatggagaataatagtgcgcggaatgcaagcacaaaaatggaggattattatgaaaaaagacttattacatacacccgaaggtgtcagagatatatacagcacagaatgtgttgaaaaaaaaataattgaaaacagacttcatgatgtatgtaagttatacggatataatgatatacagactccttctattgagtattttgatgtattcagtaaagaacgcggcagtgttccatcgaatgaaatgtttaaattatttgacagatatggcaatactcttgttttaagacctgatatgacaccatctattgcaagagccgcagctaaatattttgaagatcgtatacttcctataaaactatgttatgtaagcaatacatttatcaatgtcagcaaatattatcagggaagattaaaggaaaatacagttattggtgcagaattaatagatgatgactctatttatgctgattatgaaatcatatgtatggttattgactgcatgaaaagtgctggtcttagagaatttcaggtagagattggcaacgttgctttctttaatggtcttttggcagatgccggcatccttggtgactcttatgaagagcttcttaatcttatcaatgagaagaattatattggtgttgaagaacttcttaattccatgaatatagacaagaatacagctaaggttcttcttgaacttcctcagctgtttggtcaggcagaagtattagaaaaagccaagggtcttacgactattccagaatgcataagtgctgttgacagacttttagcattatacgaactgttgaaagttaatggttatgataagtatgtttcatttgatcttggagaattaagtaatcatacatattatactggaattatattccatgcatttacatttggaacaggagaacctgtcgtaagtggcggccgttatgataagcttcttggacagtttggatgtgataaagcttctataggtttttctcttattgtagacagacttatggcggccataaacagacagcatatagatattcctgtggaatacaacggagtacttatagtatattcacaggataaacttttggatgccattaagcgttctgatgagttaagaaaagatggcatcaatgtatgtatgatacaaaaaaatggctctgaaactgaaaaacagtatgaagaatacgctgctgcttcccagctttcagatgttatatatatataaaacgttccataaaacgattattgtctgtgcgtacctgacataatctggttttatgcataactgcatagctatttaatgtacgcagaaatgaggattagtgtgaaaaataagatttttcacacgcaagatttgtgcttcgcacaaacttgagatgcgccaagaagcagcgcaagaatggaggattattatgaggtatataacaattgcactggcaaaaggcagacttgctaaaaatgcacttgatatatttgaacacattggaattacatgtgacgaaatgaaggatgagaaaacaagaaaattaatatttactaacgaagaattaggtattcgtttttttcttgcaaaaccatcagatgtaccaacatatgttgaatatggtgcagccgacattggtattgttggaaaagatactcttttagaagaaggccgttcactttatgaggtgtatgacttaaagatgggacaatgtaaaatgtgcgtgtgtggtccagcatcagcaaaagaaaagctgaagcatcatgagcttataagagttgcttccaagtatcctaatatagcaaaggactacttctacaacaagaaacatcagacagttgaaatcatcaaacttaatggttcagttgaacttgcacctatagttggtttatctgaggttattgtcgatatagtagagactggagctacattaagggaaaacggacttgaagttcttgaggaagtttgtccattatctgcacgtattgtagttaaccaggtcagcatgaagatggaaaatgaacgtataacaaagcttgtcaatgacatacgtaattaccttgaaaataaataacagatatttaaaataaccattaaaatatcaatcaatatgcgcaaaaccgcaggatgggagaatatatgagaattgttaaattaacagatgaaactaaaaataatatacttgagaatcttttaaaaagaagtcctaacagctatggaaaattcgaagctgcggtaggtgagattctttctaatgtaagagccaacaaagatgctgcattatttaagtataccaaagattttgataaggctgatatcaatgcttctaatattgttgtaactaaagaagagatagaagaggcttacacaaaggttgatccaaagttagttaatgttataagaaaagcccttaaaaatataaaagaatatcatgaaaagcagaagcagtacagctggtttgattctaaaccagatggcacaatccttggacagaaagtaactgcactttcaagagtgggtgtatatgttccaggtggcaaggcagcttatccatcatcagttcttatgaatgttattccagccaaggttgctggtgtagaacagatcattatgtgtacacctccagatcatgaaggaaaagtatatccaacaacacttgtagctgctaatgaagccggggttgatgttatatacaaagcaggaggtgcacaggctatcgctgctatggcatatggtacagaatctgttcctaaggttgataagatatgtggtcctggtaatatatatgttgcacttgcaaagaaggcagtatttggttatgtaagtattgattcggttgctggtcctagtgaaattcttgtaatcgctgatgaaacagctaatccaagatatgttgctgcagatcttttatcacaggctgagcatgacgaaatggcatcagcaatacttattacaacaagcaatgagcttgcacaaaaagtatcagatgaaatagatggtttcttaaaagaattatcaagaagtgaaattatatctaaatctctggataattatggatacattcttcttgttgataatatagatgatgcagtagatgtagcaaatgaaattgcatctgagcatcttgaaatagtaacaaaggatcctttcaatactatgacaaagattaagaatgcaggtgctattttccttggtgaatatagttctgagcctttaggtgattattttgcaggtcctaaccacgtacttccaactaatggtactgctaaattcttctcagcattaagtgttgatgatttcataaagaaatcaagtattatatcatattcaagaaatgcccttgaggaaatacataatgatatagaaacctttgcaacagcagaacaccttactgcacatgctaattcaataaaggtccgttttgaaaaataaaagcgtaataacgcagaaatgaggatttatatgtctaattcagattgcagacaggcaagtattcatagaaaaacaagtgaaactgatatcaatcttttcataagacttgatggttctggcgatgcccaggttgatactggaatcggtttctttgatcatatgcttaaaagctttgcaaagcatggtatgtttgatcttaagctgaatgttactggtgatttaatagttgactgccatcacaccattgaagatgtaggtattgtacttggggaagctattaaaaaagctcttggagataagaaatccataagaagatacggagatatcattctccctatggatgaagcacttattttatgtgctatagatttatcaggccgtccatatcttgtttttgattcaacattttcatcagatatggtaggttattttgatacacagatggttaaagaattcttttatgcaatatcttatagtgcaggcatgaaccttcatataagaaaaatcacaggtgaaaatgatcatcacatcatagaaggcatgttcaaggcttttgctaaagctcttgatgaagcctgcatgaaagatgcacgtataaaatcagtattatctactaaaggaagtttgtaactattatacataacaagacaataagaagaattataacatgctgttgtttcaattcctcttattatctggatttaaccataaacactatataacggaattggagattattacaatgagattatatccagcaattgatatcaaagatggtcagtgtgtaagacttaaaaaaggattatttaatgaggttactgtatattctgataagccatatgaaatagcaaaagcttttgaagaaagtggtgcacagtttatacatacagtagatcttgatggagcccttaaaggacatggagttaatgcagatactattaaaaaaatagtatcaagtgtcaatatacctgtccagatgggtggtggaataagaactcttgaaaatataaaagaagtgttagctcttggcgtgtacagggtaataataggaactaaggcagtagaaaatcctgattttataagacaggctattgaacaattcggacctgaacatatagttgttggtgtagatgcaaaggatggtcttgttgctatagaaggctgggaaaaggtcagtgataagacagcactttcattagctcttgccatgaaagatatgggtgtacagactatagtttacactgatatttccaaggatggaatgctttctggtcctaatgttgaacagactaagcttttatctgataaaactggtatcaacataattgcttccggtggaatgtcatgcgtacaggatcttaaaaatattaatgatgctggtatccatggtgccataataggcaaggctatatatgaacacagaattaatcttaaggatgccgttaatatgtttgaatcaggtgcatctgttatagaagctggaaagaagatgagtacaagcctttcttttaaagattttaagcttaattctgatggtcttattccagttgttgttcaggattatgtaaataatgaagttcttatggtggcttacatgaacgaagaatcttataatatgactgttgatactggtattatgacttactttagcagaagccgtcaggaattatggataaaaggagcaacttcaggacattatcagtatgtaagttcacttgacatagactgtgataatgatacaatattagctaaggttcgtcagattggcgctgcatgccatactggcaacagaagctgtttttatagaaatctttatcataaagacagatagtgtatcatataaaccataatgaggattccatggatattaaatatattatcacaaaaattaataacaatataatatgttcacaatatactggtgatgactgccagtcacttaatatagctgacactggcagtcttactggtaatatatacattggcagagttgaaaatgttgttaaaaacatcaactctgcttttgttgaaatcgagaataaaatcaaatgctactatccccttgatagtaataagaatagcatataccttaacactaaaaataacgataaagtaaacataggtgataaattacttgttcaggtagttaatgatgcccataaaacaaagccacctactgcaagctgcaaaatagagcttacaggaaaatacgtagtattatcaagtgatgtagacggagtagctgtttcaaaaaaaataaagaattcagacatttgcagcgaagctgccattatgcttaaagacatacttaaagcttccataaaaagtattaacagcgatattggctttaatgacagattcacttatggattaatcatacgaagcaatgctgttaattcctcacctacagctatagctgatgaggctgtgaaactgatatcagaatataattcactgttaaaagctgctgtttatggcaaattttacaccctgttaaaagaacatgaacccgattatataagtgaaatagtgcattttagttctgataataacattgaaataataaccgatatcaaagaaagctataatatgcttagcagctgctttgctgatattccatctgttaccgtaagattttacgaagacagccttcttccgttatataagctatattctgtggaaaagaatcttacacaggctctttcgccaaaggtatggctgaaatgtgggggatatgttattattgagcagactgaggctatgtctgtaatagatgtaaactctggtaaaaatattgccaggtctaaaaagcaatcagataaagaaaaagctgctttaaaagtaaatctggaagctgccaaagaaatcatcaaccagatacgcctgcgtaacctgtctggtattattattattgactttataaatatgtcggatgataacagcaccagacagcttatgtcttatcttaaggagcttgctaaaaaagagcatatacagactaatgtagtagatattactcctttaggtctggttgaaatgacccggaaaaataatggtaaaacattaaaagaattaataggctgatgtttggagagtatgaatatgaaagatattgatatagaagaaaacaactcatgcagatatgaaataagatataatcgtatatacaattatatcaccacacacaccaaacttaaaaacacaatattgtttatatataaggttctcccttattttgttgcgttatcatatatactgcttatcattatgtgtctaagaaggaaggattcaatagtaacaccatctatatcctttagtgttgatgccactggatatgttgaaacctctaatatatttgttatatcaaagcttatacttacacctctgacatcattcattgtggtatctttcttccgtaaatgtattgatgaaaaaagaccttatgttaaatataatatcacacctcttgttaagaaagaaaaaaaaggagaatctatgcccagcaggcatgtattttcaataactattatagccatgtgctggttatatatatatcagcccattggaatcgtcctgcttatattaacaattattcttgctgctgtaagagttattgctggcgttcattttataagagacgttattgccggaatagcagttggcatattatgtggttttataggcttatggatattataataccgtctgcaaatacatgatatttttatagcctgcaagaaaaaaaatgatccacaagaacaaaaaagtaaaaaaataaaaaaatgtttaaatatagttgacattttatgattcatactatattatattctagtgtgccgctcagttaggatataagaaggattaatcctctccaaaactggcgagtaattattttaggaggtgccatatgtacgcaattattgcaacaggtggtaaacagtacacagtttcagaaggcgatgtaatcaaggttgaaaagcttggtgttaacgctggcgatactgttacatttgaccaggttcttttcgttaataacggtgaagctaaggttggtgatcctacagtagcaggagcaacagttacagcaagcgttgttgaagaaggcaaggacaagaaagtcatcgtgtataagtataagagaaaaactggatatcacaagaagaacggtcacagacagctcttcactaaggttaagattgaaaagatcaatgcttaattagtgtgaggtgtgttatccatgactcatataactatctacaagtccactaatggtggaatagtaggattcagatcagctggtcatgctggttatgcggaagagggtagcgatatcatatgttccgcagtatctattctgacattcaatactatcaattctattgaaaaattcacagatgcgaagtttgatgtgtcggtagatgaagaagcggctgtagtagattttatggtcacttctgatattagtgatacaactcaggtattgcttaatgcattggagcttggtttaagttctgttgctgctggtaatcctgattacttattgattaccgtcaaggaggtgtaatgttatgttgaatttgaaccttcagtttttcgctcataaaaagggtgttggttctacaaagaatggtagagattcagaatctaagagattaggtgcaaagagagctgatggacagttcgttttagctggtaatattctttacagacagcgtggaacaaagattcatccaggtgttaatgttggtcgtggtggcgatgatacattattcgcacttgttgatggaactgttaagtttgaaagaaagggcagagataagaagcaggtttctgtttatcctgttgcctcagagaactaattagtttttataagctccaaatcttcggatttggagctttttgtaatattgaaacaaagcagcgtaagaatggagattaatatgttttcagataaagtaagaatattcattaagtcgggtaaaggcggcgatggacatgtaagtttcagacgtgagctttatgtaccagctggaggtccggatggtggtaatggcggcaatggtggcgacatcatattccaggttgataaaggtcttaatacacttggcgacttcagacataacagtaaatatatagcccagagtggtgaagagggtggaaagaaaagatgtacaggaaagaacggcgaggatcttataatcaaagttccagagggtactgtaatatatgatgacgaatcaggcaaggtaatagctgatatgtcaggtgataatatgaaagaaactatacttaaaggcggtcatggcggtaaaggcaatatgaattacgctactgctactatgcaggctcctcagtatgcacagccaggtcaggaggccaaagaactctgggtacgccttgaattaaaatgtatagctgacgttggacttgttggttttcctaatgttggtaaatctacattcttatcacgtgtaactaatgccagaccaaagattgctaactatcatttcactacacttaatccaaaccttggtgtagttgatatagatggcggtaaaggttttgtaatagctgatatccctggactaatagaaggtgcatcagaaggtgtcggacttgggcatcagtttctaagacacattgaaagaacaaaggttattatccatatagtggatgctgcttctacagaaggaagagatcctatagcagatataaaggctatcaatgcagaattagaagcatataatcctgatttactcaaaagaccacaggtaatagccgctaacaagatagatgcaatatatgatgatggcacatgtgctaaccctgttgaacttataaagaatgcttttgagccagaaggaataaaagtatatcctatatcagctgtaactggacaaggtgttaaagagctgctctatgctgtcagagaacttcttgacaactttcctgatgatgttgttatatttgagaaggaattcgacatagatgaacttcttgacaattccgatgataactacaacgtatacgttgatgagaatggtatattcatagtcgaaggtgaacgaatagacaaaatgcttggatataccaatcttgaatctgaaaaaggctttaacttcttccagaaatttatgaagagttctggtgctatagacagacttgaagaacttggaatagaagagggggatactgtaagagttggcgattatcttgaatttgactattacagagcctgataaatcattttagcttttaaataaaactacacttaactatgaaaggagcttgctatgacaagtaaacaacgtgcatatttaaagagtcttgctatgactatggatccgatattccagtttggaaaaaacagtctcactcctgaaaacaccaaagctattgctgaagcattagaggccagagaattaataaagattaatgttctccagaattgtgcagatgatcctaaggaaatagcgcagattgtagctgaaagaacacactcacaggttgttcaggtcattggaaagaaaattgttttatataaagaatccaaagataacaagaaaatagaacttcctaaagacaataagaaaaaatagtattatataaaatatccaaaaatagcagaaatggggataattatggctgacattgttggaataatgggtggaacatttaatcctgttcataaaggacatattgctattgcaaaggcagcacatgaacaattcaatatatcacagattcttgttatgccttcatattcaccagcatacaaagacaacagcaagatagtttctgcagttcaccgctgtaatatgataaagcttgccataaacaattacaattatatgtctctttctacactagagatagaacggggtggaaaaacatatactgctgacaccttaaagcttatgaaagatgattatgataacatatattttataataggtgctgactcgttatttacactagataaatggtatatgcctgattatatttgttcacattgccatatacttgcagcaaacagagataaccattccatagatgagcttacaaggcagaaagagatactcattaataaatataatgcctctatagatttcatatcatgcaaggattatcccttcagttcaacacatatacgcaatgaagcagcagccggacatgatatttcatcctttgttggtaaagaagttgcagaatatataactgccaacaggctttataattaattcaattatatatatgtcacaaactggcagaatggagataatatggataacatgtatattgaaaagcttcgaaaagaggttaaacgtgctttaaaaacagataagatgcgattcagacacactattggagttgccgatacagctgcctgtcttgcatcaagatatggcatagatatgcagaaagcttatataagtggattattacatgattgtgctaaatgtgtaccagatgaaaagaaaattgccgaatgcagacaaaatgacataacaattacagactcagaatataaaagtccttatcttctgcattcaaagcttggtgctttttatgcacgcacacaatatggaataaatgatacagatatattagaagctataacatggcatacaaccggtcacccagatatgactatgcttgagaagatagtatttgttgctgactatatagaaccataccgcaacaaagctgccaatcttgacaaaatacgatatcttgcatttactaatatagatgatgctatactgcatatacttaatgatacaataaactatcttaaagaaaacgataaacctattgatggaattactcttgaaacctataatttttataagaattataataaatctaatattacaatagaaaggaataataaatatcatgataaaagatacttcaaagcagatggtaaaaactaccgtagaagcattaaaagaaaaaaaaggttatgatataaaggttatagatataagtgaaatatctatacttgctgactattttataatcgctaatggtaataatacaaaccaggtacaggccatggttgacaatgttgaggaacagatgtataaggctggctttaacgatcctaaagtagaaggttacaataatgcttcatggattctccttgattataatgatattgtaattcatgtatttgatgatgaaagccggtcgttctataatcttgaaagactatggaaagatggaaaagaagtagatattgataatctgtaaaatataagctacaggtaccaaaagtgaattagctattatctataagagagccacaagagccacagtaacttatttaataagtttactgtggctcttgtg

SEQ ID NO: 507 - DNA, 417 bp, Unknown
  gut microbiota DNA sequence
ttacaagctgctttcctccaagcgtgctgccgtcgaaagtaaactcaatctgcacttccatgttttccttatccgctgtaaattcataatcattggtaacttctttgccatcaatgagcagctttgcattttctgccttaaccatctgccaaccagacaacttgtagttcgtaccgatttccagtccttctaaagtaaccgtatccacaatcgtcagatcttttccggcttcgatttctttcttaccattcttatccgttgctgtggtatgaatcaaaatctttcgctcggtaatcaggactgtctgaccttcatcatcaatgtccttatgctctgcaacttttacaggttcttccggattcttcagatcgtataattcttcaaatgtaaccagattctgtccgccaagttctgatg

SEQ ID NO: 508 - DNA, 201 bp, Unknown
  gut microbiota DNA sequence
ttttcccaatcaggtattttttattgatattggttaaatcctctcgtttaagttggtcagtacatatccatgaaattacatcttctttactggaaaaatgtagtctttttattcggaaaggaatactgtgtttacgaaataattcatatgcttctataccattaatgacaataccattccatgtgcagatgggggtgtgat

SEQ ID NO: 509 - DNA, 217 bp, Unknown
  gut microbiota DNA sequence
agatgagtatgcgcaattatagtatatatacattaaaaacaaaactagaattcaccaatttgtatcaatatctcagtgaaaaagattataaacaacttgaacaacagatattatgttattcctatcacacccccatctgcacatggaatggtattgtcattaatggtatagaagcatatgaattatttcgtaaacacagtattcctttccgaataaa

SEQ ID NO: 510 - DNA, 288 bp, Unknown
  gut microbiota DNA sequence
acccaatggcattaagttaagaaaatctcgcatcacccatagtgtggtgtgggatttttttatggaaaagtattgacatgtcaatcaaaaaatgcggccgctttagctactgatttatttatagatgcagctaaagcggcccttgtaattagaaatcatctttttgcaaggaggacaccgcatgaatagaaaagctcaagaattaaaaacattattacttagaatagtcaatactcagaaacaggatttaactggtcttgtttctaacccagatattgatttttcaag

SEQ ID NO: 511 - DNA, 18118 bp, Unknown
  gut microbiota DNA sequence
aattcaaacataaactgctcccttccttatatgataaatgtatatgttaccatgtctttaaaagccattttttaaaagaaattccttagttatgccactgccattattatcagctggctggttatgacctgtattatgagccaatgtcctgctgatatcatatgggcataacagtttttctacatattttgctattatatctgtttccagattaaccacatctgatagtcttttatcccgaagtattgttacctctcttgtatgaggtatcactgatacctcaaagtacttatcagtcacagatgcaactgtaatacttattccatctattgttattgaacccttttcaacaacatattttaatatactgttatctgcacttatcctgtaccacactgcattatcatcttttctaatatctgtcactgttccagtaccgtctatatgccctgatactatatgtccgccaaatcttccatccgcactcatagcacgctcaagattaacatgcgaacctgcacgtatgttttttaaagaggttctttttaccgtttcatgcataacatccgcactaaactgtcctttttctatggccgtaacagtaagacatattccattcacagctatactgtcacctattttagttccttctaataccttagaggcttctatgacaatcacctgtgaaaatgtctgttttttcactgcttttacatgtccgatttcttcaataattcctgtaaacattttaaacttcaccttctatcagaatatcatccccaagcctggttactgtataatccttaagcttcagcgcatcgtctggtgcatcaaatcccacaccagcaactgatactggtgcatccacacctccaaatatcttaggtgctatgtatgcctgtattctttttaccatgccgctgtttataacgctccagttaagctctgcaccaccttcacatatgcagctgtctattcctctcctgccaagtataatcataagctgtgctatatctatcttttcaccttccatagctatgatttcacatccagctttctcatacatgtttatacgttctttatcgtgacagcatgtcactatccagactggtatctgtcctgccgtcttaacaagattgctgtcatacggtatcctaagccttgtatcacatactattcttactggctgatgtggattttctatcgctttacttctgcagttaagcatcggatcatccttaagtactgtatttatacctaccataatggcagaatatctatgtctgtccatatggacattttccctcgctgcctcccctgttatccactttgacagtccattgtgtgtggctatctttccatcaagtgtctgtgcatacttgactatgacatatggcagtttttctttaatgtaatgaaagaatacatagttcatatctatacattctctattgcacacaagtttattatcaacctgtatattgtgttcccttaatatctgcattccttttccactcacaagtggattaggatcaagcgaacctataacaacacgctttattccagcttttattatcgcttctgtacatggcggctgctttccatgatgacaacagggttcaagtgtcacatatatcgttgcgccctctggacttttagtacagttatttaaagctgatgtttctgcatgaagctctccatattttttatgatacccttcacctattatttttccatcctttactataactgcaccaaccattgggttaggattagtccaccccagccccttctttgcaagctctattgcatgcctcatatatttttcatcatctgtgctgctatatccacacatacatatcacccgctttcttttaaaaaaatgcaccagaatatcctgtcaatcaggaatccccctgatgaaagaatactctggtgcagcttttactacatccatctgataaataaaaatcctgggaacttatcattcccaggacacaaatcataatcaatataacaatataatgcagataacagaaaataaatcctgccacgcaatcctaaacacgttatatatcagataacttctttcatccagactatactgtcggcactggaatctcaccagttcatgctttacgctcgcgggctgtaccgccggtagggaatctaaccctgccctgaagttaatattctgttttaatgtaaacggctgtctgcttagtacttagcacagactaacctctgttaacaaaaactactatacacctatacaagcatataatcaagtacttatttataatatctcatgtaatatctgcataattctgcataatgtctgtaaacatcaacaaatattcacaataaaatccacggcttctaatggttcttctcaaaatccctgctatcaagaactattgtaaatggtccatcattctcgagcgataccttcatatgtgcaccgaattctcctgtttcaacctttgatacccgttgtctgcacaacctgacaaactcttcatacagttcattggcaagaactggctcacaggcatgcacaaagcttggacggttaccttttctgcaatctgcatataaagtaaactggcttactacaagtatttccccattcacatcgttgattgacagattagttttttcattctcatctgcaaatattctcatttttgctatcttatctgcaaaaggtacaagcatttctttagtatcaccctcacctgcaccaaaaagtataagataaccttttcctatgcttcctataaccttatcatccacacttacacttgcagaattgactctttgtataacaaatctcatttttctctccattttaaaatcagatattaatcttttttctgtgattttctatatcttcttttatcttcaaacatttgcttaatcacaacaggatggaacagtaaaagaagtgggaacagttcaagccttcctgctaacatatcaaatatcaaaacaagcttactaaatacattaaaatgttcaaaattctgtgtcggtccaacaagttcaagtccaggacctatgttgttaaatgtagccgcaactgccgtaaaattcgttgtcagatccttgccctcaaatgatacaaggaacaccgatgctacaaatataagaatatatgttataatatatacattaaccgaacgtataacttcatgttcaactggctttccttcaacctttatttttcttacacttcttggatgaatataagaattcagttcttttatcacagtttttataagaattacgaatcttgaaacctttatgcctccacctgtacttccggcacatgcaccaataaacataagaagaacaagtatagtttttgaagtctgcggccatatattaaagtcagtagttgcgaatcctgttgttgttatgattgaaccaacctgaaatgctgacttggtaactgcatcccatactcctgagcatattgagtatatatttatagttattatgacaattgctgttaatataataccaaagtacgctcttacctcttccatggataaagccttttttatactgccaaaaatcataatataatacgcattgaagttaactccaaaaagcatcataaatatcgtaactatccactgtatagtcacggaatatccactaagacttgaattctttataccaaagccacctgtacctgcagtaccaaatgtagtattcatggcatcaaacacaggcatctttgctgctataagtacgacaaactctataagtgaaagtccaagatatataatatataaaattcttgctgtatgttttatctttggaaccagcttacctactgatggtcccggactttctgccctcataagattaatattcgaaccaccactcaaaggaactatggctatgataaacaccagtacacccataccacctatccagtgtgaaaagcatctccatgtcgtactgcagcgtgatactgcttccacatcacttagtatactggctccggttgttgtaaaacctgataccatctcaaacaaagcatttataaatgatggtatctcacctgttatcataaaaggaatagctccaataacacccataagaatccagcttaaggacgtagcaacacagccttctttaagatagataatataatcctttggcttcctcatagtcataagctgtcctaacagaatacttatcatggcaactgtaaaatatgcccatccttctgtttcgcgatatataagtgctatgaagcatggcaacgacataagtacaccttctgtttttaatatataacctaaaacatatattactattgacctgttcataacgtgcctcacctgactatatcattaatatcagtaaatcctgtattcttagttacaatcataactgtatcaccatcttttatctcatcattacctgttggaataataatatgtccatcatgattgataaatgatataagaacatcttttttaagcttaagatcctttataggtatacctgatactttggaattttcctcaactatgaactctatcgcttcaactcttgaatcaaacatatgataaagtgtctctatgttacttcccatagaattcttctttgcgcgcacatatgctatgatagcttcagaagttatatacttaggatatacaatacttccaagatccagattattaataacctgcttataattaaccctgttaatcttggtaactaccttagcattagatacctgctttgcatgaagtgtaagcattatattctcttcatcaatacctgtgagcggaataaatgactgtatggtttcaataccttcttcctttaatatatcaggatctgtgccatcaccatttataactatggctttaggaagcttaatgctgaatctttcacagttttccctgtctctttctattatcttgacagtgattcccatattaataagctctttagcaagatagtacgctgccttgctgcctcctattatcatggtatccttaacctggtttgttgcaaatcctatagttttaaggaaatctcttgctatatgtctttctgatacaaacgatataacatcaccggctttcattataaaatcaccgttaggaatatatacctctccgcctcgctctatagcacatataagtatatcattagttatgttcttaccaagatatgctatgctaagctcattaagaatattatctgatggaaccttaaacttaacaagctctgcctggccatgtgcaaaagagtttacctcaagggctgttggaagatacaatatacgtgctacctccttagcagcctcaagctccggattaataataagcgcaagacctagtttctctctaagatatcctgtttcttcactgtaatcaggtgttctgactcttgctatggctgcacagttacctactcttttagccactgtacagcataacagatttaattcatctgaatctgtaacagctattataagatcagattcttctatacctgcttccatctgcgtagaataacttgcaccatttcctactattcccataacatcaaacatattagtaatatcctggatgcgttcgggtttcttatcaataacggttatatcatgaccttccttactaagctgttcaactaaagttgcaccaacttttccacatccaactattataatattaaggccattttcctttttacttaatttaaacataccaaccctcacctctgcgcacatatccttacgcataataagcctgtttgaaagcacatatcatgtatattatgatactcttataatgctttctttatagcctcaaaaagatcatcatattcctcaaaggcctcaagctgtggataatccttttttatctgttctgtacttctgaaaaggaaaccagccttacttgcctgtatcataccaagatcattatggctgtcaccacttgctattgtttcaaaaccaactgactgaagagccttcactgttgacagcttagattgttcgcaacgcatcttaaagcctgttatagttccgtcatctgcaacctcaagagtattacagaatattgtaggccatccaagctttttcataagtggtgctgcaaactgtgtaaatgtatcacttataataataacctgtgttgtctcgcgtaacttatcaaggaactccttagcacctggaagtggatcaatctttgcaatagtttcctgaatctctttaagaccaagtccgtgttcttttaatatgccaagtctccagttcataagcttatcataatccggctcatctctggtagttcttttaagctctggaataccactctcctctgcaaatgctatccatatctctggaaccagtactccttcaagatctaaacatacaatattcatactcattttattattcctcctcatcagatatataaactcgttttatcatgtcattaccttaacacattaatcaatagattatagcatactttgtgtaatcttacaaagatattgtttttccttatttctcacgttcttatttttcatgtgccgctactaattccaggttatctggtattttaatatgctgtgggcagttcttttcacatctgtggcattttatacaatcagatgcgcgtcctcttcccataacaagccttccatgatacatatttgaaaaattgttattaatacaatagttgttataaagcccaaacaaacccggaatattaatattcttaggacatacctccatacaatagccacatgatgtacatggaataacagttttactgttaattatatctactattttgcttaaaagctccttttcaccttcattaagcggagctggattatccataatacgtatattatctttaacctgctctaaactgctcataccacttagcaccatgaatacacctggaagactggctgcaaatcttaatgcataagacactggtaaaacaccaggagcatactccaaaagcaggctggcagcctccttaggaaggctggcaagtgttccacctttaacaggttccataacaactatcggcttgttatacttccttgctgtctcataacatgcccgtgactggatgattttattgtcccaatcaagataattaatctgcagctgtacaaaatcaacctcaggatgttcagtaagtatctgatcaagcatttctgcatcatcatgaaatgaaaatccaaacttcttaatcttaccttcttccttcattcttcttgcaaaatcaaagccaccccatttgtcagtgttaaaatatctgtctcttcccatattatgcataagataatagtcaaaatatccaacacctgtcttttcaagctgcttattaaaatacatcggatattcatctcctgatttgacaagcacagttggcatcttatcagcaaaaatatagctgtctctgtcatacctgtctacaagtgcttcctttaatgcattctctgatagctgctcatgatatggaaatgctgtatcaaagtatgtaaaccctgctgccataaactcatctaccattttctttaactcttccatatctatagaacttttatcctgtgaatctataagcggaagtctcatagctccaaatccgaattttttcataatatatatacacctctttatgcctgatattaatcaattcttttttcaccccagaaaaacaatgcaactgttcctggtcctgtatggcttccgatagttgttcctatattattaataagaaccttaccattaagcttaggaaacttttcttcaaccagctttgctactgcctgtgcatcctctatacatgctgacatggatatataacatttatctgaataatcagttccgttatctgcattaagtaccatcttgttcaccgtttctgctataaccttcttctttgtacgaatcttttctcttggtataagctttccctgataatcaacattaagaagcggacatatattaagaagatttccaacaaagccagataccttagatactcttccgccctttataaaaaatgtaagatcagttgtaaagaaccagtggttaactcttaacttattatcttctatccagttctttaactcatctattcccattcctgcatcttttaaatctgccaccttatccataagaagtccatatccagaggatgctgcaagagaatctataatatatatttttctgtcaggatacttttctttaagattatctgctgctataagtgctgaattaatagttcctgatattcctgatgaaagagttacatgaagcagatccttaccctgttttaaaaacccttcaaaatacttttcatattcatctgcatttatctgtgaagtcttagtatcagcaccttctgacatagccttgtaaaaatcatcaagattcatagtttttcccaaatcatcaggatacgaaactccatcaagttcatagtgaaagcatatataatgaatatctctctctagaaaatgcttctctgataaatcagctgttgaacaacatgaaattatataatcacccatatctgcataaacctccaaataatattattaacttgtttaaatccggatttcaaaaccaaaagtcttattatgcaggagcaaacaactttttgaccttttaatccttacatcataatataatattttattttatatgtctattccatataccatattagtaaaagcaacttgccacttacaacatttcaagcatactttttatcttgacgatgtacacaggaataatataatgataccagggtcaaaaggtctaaacccacatgagcttgctcatagatgggtgaaagaccttgggacccgccccgatatgagcataaaagtgggatgataatcccacgatatgcgaatattggggagaattgtgggagtgcgtagcacagaacaattcataggtatcaaagtcgggggcttttgaccccgacatcatatagtgataccataatctaaaaatattttacatcttataacaaacaggagataatttccatgcttacctactcatttaacaaccgcaatggccgcagtttatatgaatatttatacacatgcataaaagaagatattttatcaggaaagctttcacctgatgccaaacttccatctaaaagagactttgcaaaaaaccatgggataagtgtagtaactgttgagaatgcatatggtcagctgcttgcggaaggatatatatattccctgcctaaaaaaggcttttacgtgtcggatattaaaaatgatattaacaacaacatttacctgtcagcaccaaaaagcagctatatttataatgaaaagactataacagatatacgcaataataatccatatgataaggcatatacatataatacagctatagaaaacaggcatgatgctgactgtataaatcttgtttcaagccacacacctcatgataactttcccttttcaatatgggcaaagcttatgcgccatgttcttacatatgaaggagaaagtacattaaatgtacctcctaccggaggtgttatgcagttaagacaggctattgctaagcatctgtatgaattccgtgggataactgttaatcccgaacagattattatcggtgccggcaccgaatatctatatggacttattgtgcagcttcttggaagaaatatatcatatggacttgaaaatccaagttcaaaaaagataatcaatatatacaagtccttaggtgtaaaggttaactatcttgacatggatgaagaaggggtaatacctgactgccagggtcttaacgattcccagattatccagatatcaccttcacatcactttcctacagggatcgtaacatccataagccgccgttatggacttttacaatgggctaatcagtcgcctgacagatatataatagaagatgactatgacagtgagttcaggttacagggaaaacctattccctctcttttttctatagatgcaactgacaaggttatatactttaatacatttactaaaagccttgcagccacaataagaataagctatatggtactgcctctgcctctgcttgagcgctttaaaagcactctgggattctatgcttgtacagtctctaactttgaacaatatacacttgcgcattttattaaagaaggttatcttgataaacatataaaccgtatgaggaatcactaccggtatatccgtgatgaactaatatcaagacttatggatagcttaataaaagatagaatccatatatatgaagaggattcaggactacatttcttactaaaatatgatactgagtatacagatgaagacttaaaaaaacgtgcttataataatggacttatgatatcttttctttctgattatataactaataattcttataacatagctgattacgaacatatagctattgttaattattctggaataacagatagtgatattgcaagaactgcccaactgcttattgatgtatgcatctaaaaaagttgtcacaacaagaatatatacaatatatagattactgaaattatcataaaactatacattgtaaatcatctttgttgtgacaactcaattaaaatcagcctgcatccttactctcttcactgcattccccatagaacctatactgtcctcgtccacttcttttagcttcatataaagctttatccgcattcctgtacatatcataataatgtggattaccatcacttagaagacttattcccatacttatactgatctgatatccctcatatatgcatgaaacattgttaaatattctgttaacaatatcttttatattatcctcctgcttatagttaacatatacaacaaattcatctccaccatatcttatagctatgtcagaatcttccctgacactttcctttagtcgtgctgcaacacactgtaggacacaatccccgaaataatgtccatatgtatcgttgacaagcttgaatttatctatatcaaatataataaatgccgaatcagaatatatcccatcatctattttattcttaataagaagctctcctgttacatggttatataaacctgtaagcagatcgagcgaagcttgtttagcaagagattcccgcaagaactcctgatgatatctctcacttacattcctaagactgactatacctatgatatcatctgtaatattgtccttagcaagatatacggtcttacttacccacatctcctcattctgggtatcaagtgttctataatcctgggttagcaacgtttttcctttattatactcatctatcatctttgcagatgtctcaagcagcatgtagttgtttatcgtatcatctgacactcttttatgccatcttctgcaatattcatcatacgaacaaggagtattgataccaactgcattcaacaccttaagttcactatttttctttttttggatgatatcattttctataatatctttagaaaaattaacctgatataatactatagcttctgacataagtgcatccttatactgttcagctgtctgaagaagcttctttaactcaagattcttcttttctataatatcataatacttatacctgtgtgaaacatccctgtatgttactgttatctgtcctttgcatacagcatcatctgtatcatgcataagtgttataagtatccatctgtattctccattaaccataagtcttatatccgtacactgcttaacctcatgactgctgtcaaactgcttaagtgcatcatatgatataagctttaaaagactgatcctatcatcacaatggcatatatcaatagtgccattgagccatgtctcaaaactgatagtcttacttgtatctactactctttccccatcactaagacataatacaactccttcagatatattaatctgaaatatacccacatattgtgtcaacaaattcctaagaattctgtcctctaactccatacatttattcataccgcaccacatccccgcaatatacataatatattgtaaaattccgtaaaatatcttttattaatataccatattataataaaaaagtcactttaataatattatttatacacttttttaatcatatatccgtaatcatatatcacattttcaaccgctttttgaaaaaaggtcaattttaaaaaagtcaattaaaaagagtttacatcacaaaattttatgaattcaaagaaaaagaggaataagtatatataatactcatccctctcataaatccctatattaagcggttataaggctattaaaagctgcttataatcacaactgattagccaaagtatctctttaaaagaccttcaaaagcttttccgtgtctagcttcatctctagccatctcatgtactgtatcatggattgcatcaaggttagcagccttagctctcttagcaaggtctgtcttacctgctgtagcaccatgttcagcttctactctcatctcaagattcttcttagtgctgtctgttacaacttcaccgagaagttctgcaaacttagctgcatgttcagcttcttcccaggctgccttttcatagtaaagacctacttctggataaccctctctatgagcaactctggccatagcaagatacatacctacttctgaacattcaccattaaagttagctcttaaatcttcaagaatatcttcgcttactccttttgctactcctacgacatgctctgctgcccataccttgccatcgccctgagctaaaaacttatcagctggtgccttacatactggacagacgaaatctgctggaagtgaatctccttcataaacataaccacatactgtacatacatacttcatattcgtaatctccttttcttgtttaatatttataaaatagtaattattactgttttgtgaatttaatataacatctttttttcaccttgtcaagcaaaatagtaattattactattattattttttctttgttacacatttaggacatttaccataaaagaatgtaacatttccttcaatctctccaccaaacccctttgctgctgctatattgaaagctttttcaacttcttttgaatcaaaatcaagatcaagtacgcttccacattccatgcattgaaaatgatagtgaggttctacgttgccatcaaaatgtactgaaccatcctcacatggcaccttaatagccattccattatccacaaggaaagaaagattcctatatacagttccaagacttatattaggaaaatccttactgacaaactcatatactacttcagcagttggatgatcctttcttgacataagaaactctttaatagcctctctctgcctgcttctttttactaccgccatataatcaatctcctcttaacataaatcaataaattaacaaaataataacagttactattattaatatatcatttttcataaaatgtcaagtcatacaatatctcatattttgtcaatatacatttaaactttcatcattcctgacattatgcagcttcctgctgcaccatattttttcacttcttttctcctgccgtcatctatgtttattccacctatagcatacacaggaatatctaccgaatcacacacattctttagaaaatccagacctcttggagctaacccttttttacaatctgtcgcatatacatgtccggctgttatataagatgcccccatattccttgcttcaactgcttcttcaactgaatgtatggaacaacctgtctttatattgtttatcttattaacattatctataaattctttcctatattccctcatattatgaagtgacatatgaactgtatttattcccagttcttttgcaacattaatatatgtgtgaataatcaaccgtacatcataacttgtagttatattatacacctcttctgccagttttgcatactctgtttctgataaatctttttctcttaaaattatcgcttctggccttagctgacacactctttttatctgttccagaaaaggtctctggcttaattttctgtttgtaacggcaataacatcgtttaacatatacattacctcaatactctatatatttttacctgtcatatcttatatatactgactatcataatgtaaagatacctgctaggattgtgtgagtgcatagcacgaaacaatcggtaatatcgtaaagacaaaaagtcctatcgccaactcacgataagactttttattttatcctacatatatataatcactcataactggctgaagtcctattttcacaagatcgttatatacctctttgacatctcttccatctgatatttcaaactgttcatcgcccttatcgctctcttcaatatcatcagaatggcttccgataccagtacttacgcctgcagatatctttgttgcagctatattcataagattatcccttactcttgcacattcccttgttgatactgttatgcttgcaaatggcataaataatctatacgctgtaacaacctgtaaaagctgtgcttcatgaacatcctttggattaatcctgtcattattgataataggtcttaatcttggacatgaaaatgctatctctgcatgaggatattttctctgtaaaagatatgcatgcatacctgttgcaaatgcatcttttctgaaatcatcaagacctaacaatgctgcaaaacctactcctctcatgccacccttaagtgctctttcctgtgcattaagtctgtatggatatattctcttatgtcctgaaagatgcagtgtttcatatttatctgagttatacgtttcctggaatactgtaacataatctgcaccacatttgtgaagatatgcatactcatctgaattcataggatatacttcaagacctattactttaaaatactttcttgcaatcttacatgcttcacctatatattctacacttgacattttcttactttcaccagtaagtataagtatctcctgtagtcctgtcttagctatagcctgcatctcttcttctatttcttcatagttaagctttgctctctttatcttattatgacagttaaagccacagtatatacaataattttcacagtagttggctatgtatattggcgtgaaaaagcatattgaattaccaaaatgtttttccttctctatcttagctgcctgtgccatctgttctaagtatggaagtgctgctggtgataaaagtgctgcaaaatcttcaggtgtacgattaactgcatttatagcattttcaacatccttagctgtatacttgtcatagtcatagttgttcatagccgctataacctgtttatcaatatcagagtcaagcacctccatgtctggcatatattccatgtgattagttctgtttttcttctggtcttctcttatttcatcacttaatatactttcatttatatgtaaatcttttttttcttcattatttatttgattgttactcattttaatctccattcctgcatctttatttcatataacgaattgatataacgtatataaaagcttacattatgtcatatgctatatattttatacaaagcttcgtacatatttttattcatgaagataacctgtaagtggagaagaagcacttgctccgtttttctttactcttccaagtcctgcaagatatgcttcccttcctgcatttatagcatttttaaatgctgctgccatacgtggaatatcacctgcagttgcaatagctgtattcgccataactgctgctgcacccatctccataacctcacatgcctgggaaggacgtccaatacccgcatcaactataataggaagatctatttcatctataagaatctggataaagtcttttgtacatactcccctgttagaaccaataggagctgcaagcggcataatacatgctgcaccagcatttgccatatctcttgctgcattaaggtctgggtacatgtaaggcataacaacaaaaccttcatttgcaagtatttctgttgcttttgctgtttcataattatctggaagaagatacttagtatctcttattacttctatcttaaccatatcactatggcaaagttctcttgaaagtctagctattcttactgcctcttctgcatttcttgcacctgatgtattaggaagaagatgtacattttctggaatgtaatccagaatgttagcaagtccgccatcattagctcttcttagtgcaagcgtaactatctgtgcctctgcctgtttaacggcagcctctataagttcaagtgaatatttacctgaaccaagtataaaacgtgatgtgaattcgtattttcctaacttaaatgtatcctttaactgctctttattgtctgtacctgttatatttgctgtattattactcattgtattatcctcttttatttttattattatgatatgctgctaaaccatcagcccccacccataaagcttaatacttctaacacatcattatcttttaatataatctcctgatatctttcttttgggattatctcttcatttaactctacaacaacatgctctggcttatagctgttgattgttatgaattcagtaatattagtattgtcttttatgtctcttttctttccattaaacattatatctgccattaagatattcaccttccttcctgaatgtcttttaacacttaaacatataaagctgtcagagagctgaaaactgcatgaactacacaagctatgcacagctaaaataatagataaaaataaaaagggttcacgaagaaaagcgcccttggtggtgctccccttcgtgaacccttatgattcactctatcaacaatgtttattaagttgttaactactatagcatttgttttcttattttgcaagtcctaattctttttttagttcttcttttactgctgtacttgtaaatgcggcatcgactgcgttattaagaatgatttttttctgctcgcttgtaagtccgaattcattttccatatatctgtattcttcttctaatgtaatcccttctattgccatatcatctgtattaagcgttacattgattccctcattcagatattttataaaaggataatctttcatattttctactgcatgagtctgtctgttacttgtcggacacatctcaaggacgatacctttattctttacaagttcacacactgaatcgtcttctcttattcttactccatgtcctatccttgaagctccatattctatggcacatcttacactttctgctccagctgcctcacctgcatgaatagtacatggtatgccgtattctctggccttagcaaatagtgctgcatacttcgatgtaggataaagtgcctctgctcctgcaagatccatgccagttacgccgccgtcttctacaaggtattttttcgtaagttcaagcgtttcataattagcttcttcatttccttcaccacgcatacaacacaatataatattagccttaagccccgttctcttaagtccttctaatgcagcctgtacagcttcttcctgtgacattcccttttctgtatgattctgaggggcaaatcttatctctgcatatataactccctgttgtcttatattctctgcaacaagatatactgcttcgcttattccctcctgtgtcatcataagtgcatccggaagtgcaaagcacttaagaaaatcattcaggcttgtacatgtatctggtacagtaagaagcttttttagctgttcatcattttctgccggaagctttatgttctgaagtgcagccagcttttttgctatatccatggttatggctccatcaagatgaagatgaagatctatgtacttgtctggacatatcttattatctgattcattaactactatattcttttttacatctggttctgtatctgattctgtattgtgttttaaacccataaaattatttccttccttctttttctattttatttttttattttattttttcgtgcatcgcaaataaagctt

SEQ ID NO: 512 - DNA, 942 bp, Unknown
  gut microbiota DNA sequence
gctgcatactctaaaatagtttatggtttcaaatagttcataatttcatgtttcatgctttaaaataactcacagtttcatgtttcatactttaaatagctattgacactttaaataaatatggatattctgaaaacagattggcttttcttctacttttcgaagtgaaaaagtggtgaaaaagtgaaagaaaaattaaacttaaaaactttaaaaactatttttaaaaaataaggaaataaggattactatggaattatttgatattgttgatgaaaacggaatacctacaggaaaaaccgttgaaagaaatgttgctcataaagatggcataagacatcgttctgagcatgtatggatagcccgtcatacaccaactggaacagaggttcttatgcagaagcgtgcaatgattaaagattcttttccgggacgtttcgatacttcaagtgcaggacatatccgcgccggagagaatccgctcgaatctgctgtgcgtgagttaaaagaagaactggggttaaatgtaactaccagtgaccttaacttcatagacacgtttgttattaactatgaaaaggaatttcatggcaagttatttaaagacagtgagatagctttcgtttatgcatatactaaacctgtagatattaataatcttgtttaccagattgaagaagtagaaactgctgagtggtttaatcttgattatgtgatagaagaatgtactaaacataaccagaagttctgtgcacctttgaacggactacggcttataagaaaatacatgcagaataactaaataatatggggctgtcgcaataaaaaaaattacagcttatattgttgtttaattgaatattagttggtgacgaacggacgacaaatataagctacaggcagttctgcacactatgttcaatgccagaagcttcaatcggc

SEQ ID NO: 513 - DNA, 220 bp, Unknown
  gut microbiota DNA sequence
gcagatgatgttgcagttgatgcatcacatccaaactgccttaataattcgtttgttaaagttgtcccttccattgttagtaatgacaaaatcattttttcatacggtatttttctgtttcttgaaaaatcaatatctgggttagaaacaagaccagttaaatcctgtttctgagtattgactattctaagtaataatgtttttaattcttgagcttttc

SEQ ID NO: 514 - DNA, 51492 bp, Unknown
  gut microbiota DNA sequence
gcacgtatgaattctaactgaaacataaaaaagaaaagagaagttaatatcaaaaaacgatactaacttctcttcatcgcccttaacttaatgccattggatatttaccctctggtgttttaccttaagtataagtatgataattattaatatgcgtgtatcctgatacatatccagaaagtaatcattatcaaaataaggctgcatatctattattcttgataacatataagccataagatatacaatagccggataagccctctcacatgcaccaagataataagtttctacatacgtattcctgtttgccgaataacctattacattagttatatctgcaaaaaaatcttctgtattacggaaaaatatatcaaattgtcttccatgacttccaaaaagcactatacccgctgcccagtctattatacctgccaatgcacaacataagaaaacaatctcataaaatttctttgatttaataagactattctttaatatcatgatcaactccctataaattaattaggtcatatttatcagctgatatttattattagctattaattatattattcacacatccattctactttaatgtcaattcataataatatattccaccatgatatgttgaagccgtttttctttctgatatatcataatacctgtttaatacatccaaggaataattaatatcaatgcttctgtctacataatatgtcgttacaacaaataacgctttttcttttagtttattatctttaagcatcttctcaccctttttagcaagagtagatataagatgataatcattcatctttttggtattgttattactgtaaaatactcgttttttcttaactatatcccagttaagatagtacaatggaacattaccgcatatgaacacaccatcatcatcgtacagataaatatctgttgtgtctgggtcataatctgtattctttaacataacatccattgacttgtcataaccatgatattgtgtattatgaataagagattctccatatgtcatctcatcattgaccattgtcataataagagtatcacgtgtcactgaatcagcatttaaaaacaccagatttgataacggatctatcgtaataaagcattccataacaagaatcatacaccataaacctaataaaacactatctaatatcttcctggctttattgtaaaccttattatctgatacgtcatgtttacagtcatatatttccttaaccttattaattacatatatggcgataatatatataagtatatcacttattatattatatcttgtgcatgtaccagttatatacagatatgaaaacagagaatgtgttacaagtgcaccaataactggacatatcatataagtaccatttttctttagttttttatggttaaaaactatatatatagtaccagttattataatcaaaacaggaatccagttaaaatttaatatacactgttgtttaaatttcataataatgaacgatggattaaaacctaaacattccgaaccattattattccatttgaataatccacctgcttcctgttcacctgtagcaacccagttattaccaaataatctgaaatacatccactggactaaggctgcagcaagtgtggcatacaatctaagatctgtaaatattactttcaggctttgttttctatatttgagtatatgtcttattatttcaccaagtgctataccagcaactacaacaagtgcattctcctttgtctggaaacatataattgatagtatacctgttaataatggtttttcatacatataagagcatataaccattatcacgaacatagccatcgtataatcaagattaagatgcatagtaaatgtgtatacaataggtgcaaaagaaattataagcgtatatatagcacataaagttcttgaaacactactagtcaacttaataataatcttatatacacaccacatagttatagctgttaatataagattaataatagaaacacctataatatgtccaggatatatcatttctcctatcatataaatcatacagaacaatgacgctgaatgtccacataaaccataattatcaaaaaagacatctatccctgaataatcaaaattctcaagtgccagtcccattctgtaataatactctccagcatcccatctttgtaaaagattcataaatggaattctggatacacatattataaccataacaataagcattactctgtttctttttatccactcatacaccttgttattattgtagtgtgaacacatatctatcaaagatataactaatacaaatgtgtaaataccaaaacaaataattaacttttttgagaaatttgactcataattccatttatcattattaaataaaaccgaaactgcgataaaaagataaaatggtatcaatcccatcgcaagctgtcctatcatattaacaaatattttagataatatggtaagcacaataacagctgctgttattgataataatataattaatgctgctttttttccctgatactgaattatattatttccaaaaaataatcctgtaattaataaagcaaagaaatatattataatttcttttttacatccaataatttttttcataaatctccaatttaatttacattttttctttttaaaagttttttccatttaactttattaattttcttctttaaattatatctttgcacatccaacagccataattattaatattttaataagattaaccacaaccagagctattgccattccccataaccctaatgcaattgtcataggtatagctatcacaacaaacactataaggaataatatattaataacaagctgatacttttcgtcagtaaatcttaacaatatgactgttaatgtattggcaatgaaataaaatacctgtccaagattagcacaccacaaatatggtttaacaagttcaaatatatctgcatacattattcttacaaacacaaatgaaacgccaaaacagaatacattaagaatcaggcttccaaccacacttccaagacatagctttacaaatgtgcttttctttattccaccttcatacttcgtgagatgtcctattataacaccattaagtggtgttgatataagtgaaaccatctttcctataagtgttgcagcataaaatattgttactgatgttcctccatcaatagcctgaagtattaatctgtcagcattaagaataacagctgctataagttctgttccagatagtattaaaagagatctcatattatccttaaaatactcactcttatggaaaagagcccctttgtatatacttccagtgattataacaaatccaactgcaagacattcaccacaaagcatagcaataatccatgaatgagtaacaaagaataatcctatacctataagatatcctactgatatgaacagataaaataaaaagaattttttataattaagattaagtctgaactcaacatcagaataataccttaatactgtcaccatcataagtataaaataaccaatttctgctattatgctaaacttatgaagccatacaagaccaccaatagaaacgaaaactgataaaacagctataagaagcagaaaaatattatagtctccattactatcctgccctttcatccttgttaccattcgtgaataattagctgccgtaccaaaagttgaacccattattgatatgaaagatataagagtaagaacaattccaaactcatctgttcctaactgcttacttaaaaatggatataatgcaagctgtattactccattcataacaatgagtcccatcatgctgtacataaaatcgcctgtaataccttttagcttttctggtattttcatatactctccattccgcaggaattttagtaaaatattcctgtctgtcattatataatgttaatgtattaattacactaaccataatcccctcaatatcaatatttgataatattatttaataattatattgttcatctggctttacatgcataggtactcttgtttcttcaggtggaaactgcatataatcaccataacattccttgagtactttatcatattctactggacagttaaagtaatcatcacctactttaagtggtaccgtttctctgtaccagtctttttccacccacttcttaagttctggcataggatagttactgtaaaaataatgcttagtatttcctttaacagactgactgattctagaatacttttccctaagcgaatcaagcgacctgtgtcttcctatagccgcaaaaaacctgacaccaagtccagtaattgttccaaactcagaataatcaatagaatccctgtgacccatacactgaccatatataaaagtaagtcgcattcttaatattaactgttttaactttgaatcataggcattatcaagtacaaaacaatcaagtaccatcttatcttcatactttttttgaacatgtccttttactttatcatagctttgaagaggtattgagtcaccaagataaacaagtcttgtaggaaaatcaaagaagctgtcctttacaatatctttaacttcaacaagttcaaaatcctctccccatgcttctttaggtatggatttaagtttattatattcttctctggtaaaagctacatcaatatcatcatcccatggtataaaatcatgatgtcttaccgctcctataagagcacctgaatcataaaaatatgtaactccatattcttcacatactgaatgcaattttctcataagtattctgtttatcttatgtgccttttctaaattagtcatagtaatccccatttctgcgctcatcttttatgcatatcaaatttaaaacctatttattatttagtattatcttcatcaaaattaagtctctcttcctcaacaaccagcggtctgttcataagtcttttattcatgctaagtatatactcacccataagacctatgaatatgagctgcatagctcccaggaagcagacaagtattataagaggtgccatacctgctgcaaatctgttccaatacacaagtttaagaacaagatacacaatagcaattataaggcttataaaaccaataaaagcaccaacaaatgttgccagtcttaaaccaatcttcgtgtaagaagtaaagctaagcatagcagcatcatataaagtaaagaaattattatgtgtcttaccagttcttctctgtgcctgtgtatactcaatctctgtctttttaaaacctaattcaccaactattccacgaataaaaggaataggatccttaaggtctcttaatacctttacaaaagacttatcatacagaccaaatcctgtaaaatgttctatctgctcaacagatgacattttctttataagcttgtaatagcatgaacgaaggaaatacataactggattttccttacttgatgacttaacagcacatactatcttgtaaccttcttcccacttcttaacaagtcgtggaataacatctataggatcctgaaaatcagcacatacgggaattgtacaatcgcctgttgtctgcaatattccatagtaaggtgaattaaactgtccaaaattctttgcgttaaatatagcctttatctttgtattattctcacataactgtcttaacttaaccctcgtagtatctgttgaatcattatcaataaataatatctcataatcatacattggaagatctttagcaaacatatcaatcaacgcttcacttaatggcacaacattttcttcctcattatagcaaggtaccattatacttatctttttcataatattcctcatttctgcgtatgttttttaccaacctttaattctgcatatgctttttatactaatcctcattacacaggtattttacactattattcctcatccattaatggaataaacattattttcttaagttcttctctaggaaggaatggtgctaaatcctcaagtggagggcttacaagtgttccatcttctaatctctttgtactgctctttggctcccatacctgcttggtatctgtaaatatttcgcagaataaaggtccatcttccttaagaacttcatcaactacattcttcatctcttcattagatgaagcactataatatttataaccgaaagcttctgcaatctttttaaattcagggaatgaaaggtcatgcgattctggacctattcctatcttacaatgttctttaaaaagattattctgtgtaagtcttattgaatgatatccattattatttataaggaatatcttgattggaagcttgttagttatgattgtctggagttcctgaagattcatcataatacttccatcaccttcaagacatatagttggtcttctcttaccgcctatgcatgttcctattgcagctggaagtccataacccatacttgcaatggcactattatttgccattctgcttcccttctggataacatacgcctgatttccaacaacacaacatgctccgttagatactgcagtaaggctgttttctggcagcttactgctcatatatcttacaaatgcatatacattagcagtacatccattctcttcccactgtcttggctgtactaccggataattcttcttccatttctgtgtagtatcaagccattcatcactatgtgatacaggtgccatatcctttgccttactctcaagctttgtaagaaaatccttagcgtccgcccacacaggcatttctacatgaatagtaggcttctttaactcagctttatctatatcaaccattataacttcagcggctcttgcccatgtcttccaattatatcctgtctgtcttatagatattcttgtacctacagccagaataagatccgcattctgtattgcccagtttcccggtctgtctcccatattgccagctcttccacagtaaagaggactttcatcttctatcagatctactgcattccaatatgttactatcggaatgttaagttcatcagcaacttttctgaatacatcataagcacctgaaagtcttataccataaccagcatgaaaaaccggtcttttagcattcttaatcttttcaagtacagcatctattatatccattccaacttctggtggtagaagcttatcatcttctgcgggatcatatccccttaattcatctgtttctataaaaccaccctggaaattcactggaatatctatccaaaccggacctggtcttccagttgttgccagatgccatgccttttcaagaacatatcttatatcattaggatcctctatcatagttgcatactttgtcatattggatacagatttaactatgtcatactcctgatctcccatagctcttaagggggtttctgtatactgaagcgcatatcttgcagttgtgtcataacggacctgaccacttattataaacataggtatggaatcaagccagccaccaacaactccagtaagtgcattagttcctcccggacctgtagttacacatacagccgctattctgttatcaattcttgcataagcctctgctgctatagcgcatgcctgctcatgatggttataagtaactttaaggttttcattgtgtcccagcgcatcattaaggtgcatagcacctccaccaactacagaaaacacatctgttactccatgattaacaaggaattctgcaacataatctgccaatcttattttcatcccgcacctccgttatatagaaaaaatatatcttgtaactaatctatttcatttatcattttacaaacattaaaatttaaagaagctaagattttcattatcacttatcataggttcttcattaagtatctgcttaagagaaccttccagcgtagtaagttcctcttcttcatatgctcttctatctatatatattcctgcaaacccctgttctttaagatatgaaaccatcttatctataggcatcgaaccaacatttttattccatttatcttcatctcttcctttaatagaaccataactccatttaagtgttttagaatgaagataacctatatacaaatgataatcccacatatcattgacaggtccatattctggatattcatgatatggcagctgatatatcatagagccagcttcaacactgttttctatattctcaacaaaatttttatcacttatatagttcatcttattagtatcatatgctggtgttgcaagctgaggatatccttcccatatgctgaataaacacataagtccaaatatacagccggttagaacaagagatatacgttttgcccatgccgaaacaacctttttgttatctttaattacacgtataagctcgttaacaagtaaggcaacagctaatatactaacatattctataaatatagaaattctgttataagctctgagcatcggacttacaaagaatgcaaacattgaaccaagtccacctatcgttcctaatagaaccatagatatattaagttctgaaagacaagctaatctcttctttagcagtgaatctctctttgtaaaaagacaaaacattagaactatgaaacctatcatgcctaatattccgagataagctgatgaattctctgttacaagaaatgcattatcattatatatatcaatgtatttatcataccatccatgaccatttaatggcataaaaagctgtgcaatctttaatccatataattctgtctgttcaaaaccagatctgtctacagcagccgcattgcttccattcattatattatatattttacctggaagtatgcttaatactacaaaaaagcataccattattactgctacaacgccacgtaaaccctgcttgatttttcctgttttggcaagctttgacacggctgtaaccatcagtataaaacatgtaaaaaacggataatatgctataccattgttagctattaaaaatgtgaaaaacaatgctacataattaatctttcttttaaagaaatctttatctaatgttaatacgtcatccctctcatatatccatatacacaaaagtattgacaaaggaacaaaataacattctgtaagaactatatgtcctatatttctaaacagcatataaggtgataacgcaaatacagctgaactaagtgatgctacccaacagtttatctttatatttctcataacaaaataagatattattcctgctataaaaaatatagataaatatgtcagattcattgctactgcagcatcctttgtaattacagcaaatatcttcataataaaaagtccggaattatgcatcatggaagatgtgaaatcataatattggactgtataaggagcaccaagtctgtcacatgtcagattccagaattgttctgtaaactgtttagcatttacaataacccccatatcatctccacccatataaaaaagtggtatattaagctcacagttacttaattccatcagatgatacatcatgccaaatataataattatcattagtataaaactggcataatcctgccatttttctttaaaatagctaacaaacttctgtttcatagttcacctttcttatgcagtagttttttccacctttgctataatatcatcaaacttcttcataatatcatcccactggaaataatcatctacatactttcgtgcatttttacacattatttcatatacatccggatgttcatataagtaattgaggcatccttcaaactcaaagaaattcttataatataagcctccattactcttaatgcaatgtcctttcagcacatcacatataccattaacaataaccggcttggaaagtgtcatagcttcaagaacagatattgaaagactttcaaacttagatggtaacataagtgcttttgcaccacttataccatcaaacttatcctcatctgttacaaatcccagattaataatatctggatgcttaggaatatcacatactgcttttcccataagtacaagtttaaggtcactgtttttatttctctttttatattccataaaatatctgaataatctaggacagtctttaccttcatctattctaccgacatagatgatataattatcaagattatactggctatatttctttctgaatctgtcagcgcttacctcagatggtacatctaccccaactccacatacttcatatggtacatcttcattgtggaatatagaatgaacaagatctttctcctcatctgtaaggaaaacaaaagcatcagccgcaccaaacaccttcttatacatatcaaaatgtataaatggttcctgatgtgctgttggaataaagattgctttatccttaattcttactatactcttaactgctgtataataaagataagttactacaatgatagcttcatattcatcctgatgttcatctacatattcaacaagctgaggacaataaggtcccatatgttctatccatctgtcagaaagttctacaggtgcatcaggattagaaagcatctcagaatcaagtgctgagaatatcttaggaattctttcgtgttctgtcttaaaccttcttacagtcacaccattaatgtcttcaacgccttctttataataattagaccacttaacatactctactgcacatgaagtaagaacttcaacctcatacttagccttaagtctttcagctatctctcttgaatataactctgaaccaccattaacttcaagtccatatctctggttaataatcgctatctttttcataataatcctcatttctgcgtatgcttttggcgcaaagcctgcgacacaatttgcacacatatatgtcacaataatcttaattataattctaagaaattcataaatttcttaagtactacatcccatttgaaattatcaagaacaaattgtcttcccgaatgacccatctgcgatgccgtctgtggattatctatatagtaattaagacaaccctcaaactcaaaataattgtcaaaatacaagccagaattagattctcttgcaaaatcacttgttacattgcactgactatgcacaagtacgggtctttctgtcagccagctctccataataactatagaaaagctttcattcttagatggctggcataaacatatcgcaccagcacatgcatcatatttgtcctgtatatcaacaaaccccagatcaatcacatcattcttaatagtgtctggaatattcacttcaccgccacctataagaaccaacttaatatcaggaatcttgtccgaatttctttttttatattccccgaaatatctaataagagtattaatatttttcgcttcatcttttctgcctgcataaataatatatggagaattgatcttatatttttttctgaatctatcagcatcatattcaaagtctgtctcaatacctattcctaatagtaactgattaacgcctcttaaatctaatatttcattggcaagctcctgctctggtctggcattaaatgctattcccctaagatccctgaatgtttctctgaaatgtctgaaataagcataagcctcatcatgaagacatggtattaatattgatttaaatgggcatgactgaattccgtaataagttgttccaaacatataaggaataaaaacaaacctgtgataatcttcactatgttccctgagataatcatacatatccggactattaaccatctccttaaggaacgttgtttcttcttcataagaaatagtctttccctgcattaactttgcattaacgctatggaaatctttcatatttccttttcttactttaaatcttctaactgttattccatctatctgttctgttccttctttgaaataattctcagtccagtcagatgcaaattcctttacgcatgttgttataacttcaacctcaacccctgcagcatgcagatgctggacaagtcctcttaattcctgttctgcaccaccacgtatatctttataataccatggaataacaaatcctatcttcttcatactaatcctcatttctgcgcatgctttttgcgcatatcgagcttgtgtcaaacatgtacagacacaaatcctgagtgtgataaataagctatcaaacttatttttacactatttcctgctattcttattaatgaaatccctgagatattttttaaacatttcagctatattattatactcaaaactttgtaatctttcattctgccagtttacaagctgctgtctgagatccttatccctgacaaccctgtctatacatcctgctacatacacaggattattatcgtctataatcattcctttatatcccatagtatctgctattgcagttttatcatatgctattataggaaccttaaacttcatcgcttctaccaatggaacacagaatccctcatgttcactcatacacagaaaaacatctgctgttttataataagcaagtatctgattaaacttgatatggcctgtaaacacaattgcttctccaagacctagtttcttagtatactctgtaagtctgatgtaatacggatcattctctttataggagcctgctagtataagtcttgatttattattatataatctattgtaataatagaaagctgctattaaattctcatgtttcttgttaggtgcaacccttcctgtaaaaagaatattggtatagccatccgaatatttctttattacatctttgtctggttttttgtcgtaatctgacataggaataataataggtaaaacgtctatatcacacttatatcccatatctatgagattctgcttattaaactcagatactgcaagacaataatccactttatcagcaagatattttgcaccttcaagtccatactcgcatatctttgtaaaacgttcatcacaattcctaaaatattccggaggtgtgatattatgataaacgactatcttacggcaattatactttgctacatcataattaagcttactaccagtagacatatgaaatatgattatatcatcctgatgcacatcagtaagtttatctacgctaacagctgtcttattatcaagcggcggtacaatactttcagcatatatttttgtatcatatcccatttcttttataattttttccatagctatagtgtcattactcaccgcatcaccatatgcgattgtcgacagcatctgaataatacgcatattattttccaccctttaattcttcaatctgcttcttaagttcggctatttccttgttctgttcatctatataacatcccatctgattcataagtcttacaagagaagcattgaatccatcctgtgccattacgataggctctacaaaaaaataaacaagctttctaataaccttcttaaagaaaactgctgctttattaccctgaagcggtctgtatggatttacctcccattcatgattagcaacatataaatcttcattaaatttaaccttatcaaacttatttacattcatagctccaacatctactataacatcatcaaagcttaaaaggtcattagtgtaacctttaacttctatttccttttttatttctttcattatatcctgaacattaatctgattattgttgtccatgaaaatcctccattctgattattacagacttacatttaattactattctggtctgtaatacgcttattcaatatatgctgtaggtaaactttaaccttgacagacctctttagaaattagcatatataaatgcctgtactccacctgtatatccaaacattattataactagtataagtacataatacaatgtccatctgatcactatattcttagaagcaatactctctcttatgtttatacccttttctttcagaacacttattataaacactactatacagccaactagtataattacataatcccttgcttcaagtcctaaagttaacagacttccatcagtaaactgagaaaaactgaaacttactactgactgtttaatcatagtgagagcagctcttaaagatgttcccatgtcaaaataccagccaatattgacaagtataaatgttcttaatatcatccataatttccatggtttagaattatttctgatatgtaacttatccaaagctttgttatataaaggttcaacaagattactaaaagcaataataacaccattgtacataccatatgctatatatttccacgaagcaccatgccatatacctactacaaagaatatcacaagattagcaaaacatataggaagtgtacgtcctacattgccaaaatgcttctttccccacttaccaaacttattcatagctttagaaagtgacataggatagaatatataatccttcatccatgtaccaagtgtaatatgccatcttctccaaaattcacctatagatttagaaaaataaggctgtctgaaattttcatccatagttatgccaaacatctgtgcggtaccaatcaccacatcaataccacctgaaaaatccatatataactgaacagaatacataagaacagccacaatattaagaagaccaccatacatatcataatcttcaaacaccatattaaccaatacagctgccctgtctgccagtataactttcttagcaagaccccagcatattctctgaagtccatactgcacattctttaattcaaatgaatttccttcgtacagctgtgatgaaagtctgtcatatcttcctataggtccctgcaggagctgaggaaagaatgaaacaaacaatccaagcttaaaaacattgttctggcatctgtactttccctgataaacatcgattatataagatgcagactggaacgtaaaaaatgaaattcctaaaggaagtgcaaactttggcagattaatcatattctgaccaccaaacagacttatgatactatttatgttttcaatagcaaagtctgtatacttaataaccgcaagttgtccaaaacaaaggagcaatacgacaagaagtgcctgtctctttctcttttttgttttatccttatatgcttttttctcttcctttgacatagatgctttattagccgttatataagcattactatctgtaataatcttatcgagccatattccacccatatatataaccaccgtagtaaataccatatatatagatgtctttatactgaatgtaaaataatatatataacttaaggcaagaagccatatccatcttatcttcttaggtaaaacataatacagcaccaatcctattaataaaaaggcaaaataacctacaaccgcaaatgacatattaaagtcctttccattcgtttccagtctctttagtgtaatcctgtttcatatttttatacatatcttcaaatgttgaataaaaatacttactctcgtcaacgccaccattttttctgtcatataaaagattagctaaagcctttgaatagatttcagcaagctgtcctcccatatgtccttcctgatcaccataatcacagtcatctcttggaacactactcataagtgctttgttaaaatcataatattcaagtccgcattcgttaacaaagaattcagacatagtatcatgtactgttgacattccaagcgttttagttactgaaggtgttataggtgatgtgacacatataagttctatattattgtctttacaaaatccaacaatgtccataaagatttcctttacagccggatctatctcatcatcatatctgtccacccatgtagctatataatcttcaccaggtggaagctttccctgttcagttccctgtctgtcaaaaaagccctttccaacatatggaccatctgcaccctctacaaagccattctcaccatatgcagactctattgtataattcttatatgcatcagatgtcttcatgctgacatttcttttaacgccacttactgacatattccaacttaacctgttaactaatacattccgcatatccagaacatcaaaattcctagccatgtactcaagctttaccatcggatcagtaaactgctgatatataaaagacttagtaaaatgtgtagtaggctgctcataataccagtactgataatcaagatcaaatataatggtcttaatgtcattattcttagctgcatcttttatgagaaaatatgaatcctgtactgattcacctggaattgcaagattaagtgtattagttccaagtttatcatctaatctttgtggatctatcgctcccctgcaatgagatgctccaactacaatcgtatcgtaaccaccctttttttcttcatggattatgaatcgtacataaccagtctgtgcaaaaacaaaatcacataccattaatataactgcaagaccagctataaatccaagaaccttaatccatggttttgcctttttcatttcacattcctttccttaataaaaccaacatttattattacattaattgctagcattatcttttgtttaatatacttatttctgttcttctttcttttctgcagtttcatgatattccacatcaagttcccaactatgaggaattctcgtaacacctacatctgtgaggtttgaaaccacttcaaacttaatagcctgcttgtaataatctacaggtattccctcaccatattcaatagttatatctacccagtaattacctggtataaggttaacatcatcaagaataaccttatatcttccatccttttcaatatcaaaattcgatattctatcaattcttgtgttagttccataacaccataatgcatcatttctgaatataccaaatccaaataccgcatctgagactttattttcaacatggtaactaagatctaatatcattttttcgccagttctgaatatacgtgattcctctcctttggcattatacatatgaatctcagtaaacttagcgtcttcactaccatatcttgaattaactttagctctttccttcttgatacgttcttcttctttctttttctccatctgttctcgttcaagctttgcctgacgtatctgttccttttcagcctgctccatacgttcctgattcatataatcaagatacttaagatgaacatcctttggagttccttctgcttctataaggccatctttaatccatatagaacggtcacatatctgttctatctgtccaagtgaatgtgaaactattactatagttgttccatctgcctttatttctcttaacttattaaaacactttgcttgatagttagcatcacctactgcaagaatctcatcaataagaagaatatctgcatcaacattgatagctacagcaaacgcaagtctcatatacatacctgatgaatatgttcttacaggattatctatataatcctcaagttcagagaacgctattatatcatcaagtcttgcatctatctctttctttgtaagtccgaatatagatgcattagtatatatattttcccttccactcatatctgggtgaaatcctgcaccaagctcaagaagacttgatactcttccacacatttcaatagaacctgtatcaggatatatgatttttgtaagcatttttaatgtggtactcttaccacatccatttttaccaacaagacctatagcctcacctttttttacagtaaaacttattccttttaatacatgtcttttctcatatctgttacgtttccagaaaagcatcttttctttaagttcgcttcccttatcataatagactttaaaatctttagttatattcttaacttcaattgcattctctttatccataccaatctccatttctgcgcacgattttgcacatatcgagtctgtctcaagcatactcagacacaaatatcgcatgtataaaacaagttatccggcttattttttatactagaactcctctgcgaatcctttctgaagtttcttaaataatatttctcctacaactataaatacaactccaacaacaacagctatcaataaagatgaaagttctggaacctcaccataataaataatctgtctgtatatcttaataataggtgtcataggattaaggttaaatataagaataagccacttaccagcccctgatctttcaaccatatcaacaccatacataactggtgtcatatactggagtgccataacaaatattccaagaatatactgaaggtctcttaaataaactgtaatagatgatactattaatgctataccaagacataatatatattccactatcataacaactggaagacataataaggccaatggattaattgacctgcctgcaactataacaactgcaaaaacaactaaaaaagtaagaatcatattaacaaatgcacttgttactgtagatataggcagcacctctcttggaaagtatatctttttgaccatatctttctcttttaaaatactggcggccccatcagtaacactagatgaaaagaacatccatggtactaacgcaacaaaaaggaacagataatactgctcatagttagcattcataataatagagaatactattgtatacacaataagctgtaacaatggattaataaatgtccataaaaatccaagtacagagcctttatatcttcctctaagatctttccttacaaggcttataatcatttccctgtattcatataattcttttatgtgctgcataagaaaatctcctctatacgtctaatatgttaattgctgttaatatcttttgaaatatgcaaatcttgcatattataatagcaacatttttctttgtcaaactaatactgattatatatacactattctacatatctcctgaatgtatagctttcagtctttcactgactatgtcagctgagcgtttatatgctagatgttccttagcatatgactgtccatttgatgctatcttattatagaaaacattatcctcatataatctcttcatataatctgccgcctcatcaacatgtgcatcagcccatacatttccttttttgaagacatcataatctttatcaagttctatcagatcatatcctaccatacatgcggtatcattattcataaactctgtatttccagaccagttagtagctatgacaggtgttccaagatacatagcctcagccataacaagcccgaaaccttctgatctatgtaacgaaacataaacatctacatctgctaagagtgaattaacctcttttttattaacatgtccacacatataatatatgttatcatctttatcaataaccgaattaataatagactcatcatcagcagatagctctgactcagcaacttttattacaagtcctgcattctgatattttttctttgtttcttcatctttacagaaagcctctttaaatgctttaatagctgccaatggattctttcgttccataacacttccgctattatacataacaagaaagaggaatttatcctctggaagtccaaaatgctttctatcataagttggttctgccttgggtgccacacagtgtggtacagtaataaccggcttatcagtatatttcttaagcgtattagtcacaaaatcagaaggtgtccatatctcatctacaagtttaaatgcaggtatccattcttctggaaatgtttcaagctcccaggcccaatatcctatattatatctgtaatcccatacctgttttcccatactgacgtatgccaccatcatctcactggcattgacgtgtattatattaacatcatacggaagcttgtctgtaagcctgtcatcatatgtatcatttgttcttgagcctcctggtggaacaaaaaaatcctttataacatgttcttcattattctcatcaagcagcctgcacattattcttgcactttgtcccaggccattatctcccttgacattaccaataacattagctccctctttgtaatatccatgttcatatttaattatcgcatcagcagaaagcttatctgctgcattattaattacccctgccttaatcctgcttaacattttcataggaataatctttgtaagtgccggtcttaatgcttcgccagcatttaaaagaatcttggatatatccatatctgacctctgtttattttttataaatatatatttattattaccaactttttaattaataagtccaaaatatggcaatagtttctaatcacagatgactatttatactatcatcttaataacatagtccataatgactcagaatattgtcacattatccgaataattttaccatacttcatatacaaattcaatatattaaaatctaaaaacaccttcacaacaaatattgtcacataaaaaattttataccatatttaaatctttcatgcacaaaaacatcccagcatcttttgttataacaaatggtcttcttaattttttctgtataaatgtcttaaaatcggaatatctgtcaagcagatactgattctggtttccatgacacgagagaatatattctaccaatggatctgccttatccactaaaagataatcatcatatctcctcatactaatccgttcaaagtatccatcaagaagctctcctccaccttcaagaccaaacttatcatacagattatcagctgccagcactattcttttatcgaattccttaacaagcttacttatttcctgcatatggtgtgaaccatatgtagcacatataaatattccacctggttttagaaccctttgaatctcaccgaatgctttatctatattatcacagtaaaacataacatgattggcaattatacaatcatatgtattatcctcatatggaatactctggcagtcagccatcccatattcgaatttctgacttatatttgaatttaaagtgaaagaagcttccctgattgcacactctatattacgccttgcatcattaaccataccttctgatatatctgttacagtaatttttttaatatgtacagcttcagcaacattagatatattatcaacccatagtcttccatcaccgcagccaagctccagtatttttttatgttctgatatattcccctcttcatatatccacctaaaccatccctgcttattaacagaatacatcgcatgcagattaattcttgctgatatatttcccgcattctgatactgtgtcttcaaactactttccatattagtaagatgaattagtgacagcatactgctccagtctattgaattatttctatctattgtttcaactgtatcctctatagcattctttaccagctccatctgtgcaatcttatcctgtataagcttaagctgtaaatgaagtgaattcttaagtatgttataatccgaatcaccgatagtcatattttttatatcatcaagtgaaaagccaagatacttaagcaataatatctgctgtaatcttgtaaaatcagaatctgtataaaaccttacacctgtatcagttacataagatggctttaatatattctgtttatcataataccttatggttcttacagtaacatttgccttctttgcgaactctcctgatgaataaaatccttccttatgcatagttttctacacctattgtaagtttcaatatttcccccatactccaatactccaatactcccttccgaatgaattgtctgtaactaaatgtattctaccattattgcctttttactgcaactttcataatttttttaaaaagaacttgaagattacgtaacgtcaccatttattatgtatttgaaataaatgaaaacaaattaacttattagacaaaatattattttaaggagaatacatatgaaaggtattattttagctggtggttctggcacacgcctttatccactcacaatggttacaagtaaacagcttcttcctatctatgataagcctatgatttattatccaatgtctgtccttatgacagcaggaataagagatattcttatcatttctactcctcaggatacacctagattcaaggaacttcttggggatggaagtcagtttggtgtcaatctttcgtatgctgtacagccatcacctgacggacttgcacaggcatttattatcggtgaagaattcataggcaatgacactgttgcaatggttcttggtgataatatatttgccggcaacggtcttaaggacagacttaagagcgctgttaagaatgctgaagatggcgttggtgcaacagtatttggatactacgttgatgatcctgaaagattcggtatcgtcgaattcaacaatgaaggaaaggcaatatctatagaagaaaagccatcaaaacctaagagcaattattgtgtaacaggtctttacttctatgataataaggttgtagaatatgctaagaatcttaaaccatcagcaagaggtgagcttgagatcacagaccttaaccgtatttatcttgagcagggcaatcttaatgtagagcttcttggtcagggctttacatggcttgacaccggtacacacgaaagtcttgttgaagctactaactttgttaagactatcgaaacccatcagcaccgtaagatcgcatgtcttgaagaaatagcttaccttaatggctggataactaaggacgatgtacttaaggtatatgaagtattaaagaaaaaccagtatggtcagtacttaaaggatgtacttgatggcaagtatattgatgtacttcatagctagttaatagcatatacggattcgtaagtgtaaaacgaataaagagtaaatttaataaagaaaggcaaatcttattatgaatattattgttaccggcggtgccggatttatcggaagtaactttattttccatatgttaaaaaaatatcctgactacagaatcatctgtcttgactgtctcacatatgcaggcaatctttcaacacttgctcctgtaatggataaccctaatttcagattcgttaaagaaagcattacagacagagaagctgtatataagctttttgaagaagaacacccagacatggttgttaactttgctgctgaatcacatgttgaccgttctatagagaatcctgaggttttccttgacactaacatcaagggtactgctgtccttatggatgcctgcagaaaatacggcatcaagcgttaccatcaggtttctactgatgaagtatatggtgatcttcctcttgacagaccagaccttttcttcacagaagaaactccaatccatacatcaagcccatacagctcatcaaaggctggtgcagatcttttagtattagcatatcacagaacctatggtcttcctgtaacaataagcagatgctctaataactacggaccatatcatttcccagaaaagcttatccctcttatgattgctaatgctcttaacgataagccacttcctgtatacggagaaggtcttaatgtacgtgactggctctatgttgaagatcattgtaaagctattgatcttatcattcataagggacgtgttggtgaagtatacaatgtcggaggacacaacgaaaagagaaatatcgacattgttaaacttatctgcaaagagcttggaaaacccgaatcacttatcgttcatgtaggcgatcgtaaaggacatgatatgcgttatgctattgatcctactaagattcataacgaactaggctggttaccagaaactaagtttgaagatggtataaagaagactatacagtggtatcttgataataaagaatggtgggagactatcatatctggcgaatatcagaattactacgaaaaaatgtattctaaccgctagaattgacattcaattcttcaataagaatgcctgttaaattccgtctgacagtatttatccacatgtcagacggattatataataatgaattacaaagaggtaataattatgggacagattaaagtaacaccttgtgatattgaaggtctttatataatagaaccaactgttcatggtgacaaccgtggatattttatggaaacatacaatcagaacgatatgcacgaagcaggtcttgatatggtattcgttcaggataaccagtcaagctctactaagggtgtacttcgcggattacattttcaaaaggaatttccacaaggcaagcttgtgcgtgttataaaaggaagcgtatttgatgttgccgttgatttacgtgccggttctaaaacttatggaaaatggtttggtgtagagctcacagaagaaaacaaaaagcagttctatataagtgaaggctttgcacacggattcctcgtattaagtgacgaagcagaattttgttataaagttactgacttctaccatcctggtgatgaaggcggtcttgcctggaatgatccaagcattggtatcgaatggccacagcttgttggtgaatatcctggaaacgcagatccatccggatataagcttgaagatggaacaccacttaacttcagcgaaaaagatactaagtgggatactcttgagaatacatttaaattcaaataattaccattaagcatttcttttaattatatatattaagcataaaaaacactcttaagcactttcttaatttttatttataaagtataattataaataaaaattaaggaggtgtgtttttttgaaacctatttttaacccttaccttccaagttacgaatacatccccgatggagaacctcacatatttaataaccgtttatacatatacggaagccacgaccgtttcaatggcacaacctactgtgaaaatgactatgtatgctggtctgcgcctgttgataatttatcagactggaggttcgaaggagaaatttataatcgtaggcaacatcctcacaaagaggaaagaatgttgctttttgcaccagatgttgtgcagggtattgataaaagatattatctttactattctattgcccactcatcacgaatgtctgtagcggtatgtgatagtcctgctggcagatttgaatatcttggcgatgtaaaaacaaaagatggacgagtatatggcatatcaccaggtgattatgtccagtttgacccaggtgtttttattgatgatgataacagcgtatatttatactcaggtttctgtcctaaaaaaacagaagatgaacatggacgtatcatgcagggtgcttttgtatgccgtcttatgccagatatgatgactatgtatgaacttccacatatcattattccaagagattttaaatgtccagaaaatgctggttttttcgaagcctcctctatgcgtaaaataggcagcacctattactttatatattctgcacgcgttaatggactgcattatgcaacaagcacttatccagatcgtgattttgtatacggaggacgtattcattccgcctctgatattggactacgcggttacactatagagaatacagcatatcctaacggcaatactcatggcagtataatagacataaatggacagtattatatattcgaccaccgttttactaacaatagttcttattgcagacagggtgtagctgagaaaataaatattgaaaaaaacggatatatacatcaggcagaagcaacaagctgtggattaaacaatacagctcttgatgcttgtggtacatatccagcatatataacctgtcacctaagaaacctctccttaacacctgatataactaaagaagacaagctcttacttatgccttatgtaacacaggatggagatgacagggaaactggtgatgatcaatatattaaaaatatacagaatggctgcataatcggatataaatactttgatttcgataaacaacaatccaaaaaaatactaattaaaatcaatattaaaggtaccgctaaaggatacataagcataacaaccgacatggattatgcagataaagaatttaaagactataataagaacgccagcacatatatagacatatctgacacattacacaataataattcagataactggaaaaccattgagctacatttaagcaatccttctggaataaagcctctttactttatgttcgagggcacaggagccttctctataaaagatttcacatttattccagactaactatataaaacaactatataaaacaaaatccctgctatctggtatcactaccagataacagggtacttttttctatatagctctatatacaggcttattaatgatgaaataatctcattcctgtgaagcacattgctatatttctcttattacatgtttcaataacattatcatcccttattgaaccgcctggctgtgctatgtacttaacaccgctcttatatgctctttcaatgttatcgccaaatgggaagaacgcatctgaaccaagtgcaacatctgtgtttgttgcaagccatgccttcttttcttctgctgtgaatacttccggcttttcagtaaatactctctcccatgctccatcttcaagaatatccatatactcatcgcctatataaaggtcaatagcattatctctgtcagctctgccaacaccttctttaaaaggaagtgcaagcaccttaggattctgtcttaagaaccagttatcagccttctgtcctgcaagtcttgtacaatggattcttgactgctgtcctgctccaataccaatagcctggccattctttgtatagcacactgaattagactgagtatacttaagtgttataagtgcaattataagatcaatcttagcctgctgtggaatatccttattgtctgtaacaacattattaagaagttcttcatcaatcttaaactcattgcgtccctgctcgaaggtcacaccatatacctgctttctttcgataggtgctggcttatatgctggatcgatcttaataacattatagttacccttcttcttagtcttaagaatctctaaagcttcaggctcgtaacctggtgctataataccatctgatacttcatgctgaataagctttgctgttgcaacatcacacacatcagaaagtgatataaaatcaccaaatgaagacattctgtcagcacctcttgctcttgcatacgcacatgctaatgcagaaagttcacctatgctttcatcaacccagtatatcttcttctcaacatctgagagtggaagtccgactgctgcacctgctggtgatacatgcttaaaagatgtcgctgctggaagtcctgttgcctcctttaactcctttacaagctgatatccattaaaggcatcaaggaaattgatatatcctggacgaccatttaatatttctactggaagctcacttccatctgccataaatattcttgaaggtttctgattaggattacatccatattttaactgaaattcgttcataataatctccattcttgcgctgcttctttgcgcactattcctctattctgtgtatttcccatacattttgaacccatatcatttatgcaaaaatacacatacacaaatattttatattacttattcttattgataattcttgtttcgtacttacctgtcttaatatcaataaatctgacaaaaagtgataccttattatcttcattaagattgttccatatcatattagtgaatgtatcaatatcaccatctatctttacccatgccggctcaccttcaaagcttggaagaggatttccatcgttcatatatgtatggataaaatgtccttctccggcaactggtgcatcataagtaaatgtatatctgtcacactggtcaggattaccattgtggctctttaatatagacattgcatagtcatatttaccgtcatcaactgtcataagacccgatattctaggagtgaaattaggtgcatcaggttcaaactctcttgttcttaacgattcttcaaatgtctttccagaactcataagatcataaactgtatctgtctggtcaccattagtaactattgtcttcttaccaagtattcttactggtgcatatattataagacttggatcctcaagcttgcttggatcaaaagcctctgttcttatgccttcaccatcttctacaaatactctgttacggctgttggcacttcttcccataatgaaatacgctgttactgccttacttccatcttccgatctgccaataacaattcctcttcctggataagcgcatcctgataattctttttccaatgttgtaatctgcatattaatcctcatttctacgcattttataaatcactatatagccatgccttatgcgttaagacactagctacactgttacctggattgtctgcttcttatataactgttaatataaactaataaaacaacagatatataaaaagccgcccatcctgagtaacctttacagggttgcccaggcggtcggctgataaacatattattactgtactccctgtgggtaatcccaccacatatacttacttcaatgcaatgatacatacttcaacaccatgctgaatgctctatctgatattctatatatgctttccgccagttgtacagcttatatcaataggttacactatattaagatatatttcaattatatttttcataaacaatgttagctatcaataatattgccattatttaatagtttccaagtagtttaatagactttgcctcttcttctatgcctcttaatgcattcataaccctcggatcatctatatttccttcaaagtcaacgaagaacttataatcccactgctttgattcacttggtcttgattctattttatacatattaagtccattatatattatatggcttaacagattatacaatgttcctgcttcattagctgtctcaaatacaatgcttgttttgtttgcattttttaagaacttacgtgagttagttattatgacaaacttagtcgtattattagataaatctgcaatacctgtctttaaaacctcaagtccatatatctgtgcagcctttttgcttgatatcgcaacatgtgttttatcattttcactaagaagcattcttgccgccatagccgtattagcctgattgattctctgccagtccttatgtgtattaaggaacttgtcacactgcataatcccctgtggatgtgaatatactgttgtaaccttatctatatcagtgccagaaagtcctacaagaacatgatctatatttacaaatgtttccgctattatgtagttatcatactcctgtaaaagatcgtatactccgacaacgcttcctgtcgtagagttttctattggaagcacaccataatctgcttctttattcttaactgcctccataacatcacgccatgtaggcacatcataattatcacaatcttctccaaaaaagttgcaggcagcttcctgtgtgtatgcacctggtattccctgatacacaatctttactccatctttttttatctcatctatggcctcatatggctgtcttaatgtctgccccattgcctctaacagctgatattgtccctttcttgaattcgccattatctgtgaaaaaagatcatcaatagcatgaacattttccttatttttaacaagctttgtgaccgactctatttttgctttttccctttccctgtcaagcacctttttacctgtctgtatcttatattctgcaacttcctttgtaagtttcattctctgctcaaaaagttctacaagctgtttatctattccgtctatttcgtttcttatctgtcctaaatccaacatatcttaacctcactaaacagtatctataatttttacatttatcactttaaactgataaaaccattgatattgtatcatattttttgtaatatgtaattagttatttctttaaatattggaggcgcttatgaaaaaaattataacagctgtcatcataatacttgcagctacaggtataggttttggtggttttatgtattatcgtcaccaccagacaaccatgaacaacgagagtgctgttggcaacacatctggcaaccttataaacgggggtcttttctgcgaatatgatggcaaaatatattttgccaaccctaatgacaataacaaattatacgttatgaattctgactgcaccagtatcacgaaactgagtgaagacagtgttgcatcacttaatgtatgtggcaggtacatatattatgttaagaataactttaacagcagtactattggcatggtattccgtggacagctttttggcttatacagatgtgaccttgatggaggcaacgccaaaatactttataatgaccgttccggctctgctgcactctgtggaaatactatatattaccagcattatgatgaccagacagcccttaccttctatcaggttggcatagatggtaaaaaagaatccaaaatcagtgacacaccttatctgcctgccagtgtatcaggtggaaaactatatttttcagaccctgaaaacaagcatcacattttaacaatggattcaaaatcaaacaagatatctgattattatgattgcaattcttatcttgcaacaatggttaatggttatgcctactatatagatctttccaagaactattcactagtaagacttaactcatcaaacaaaacacttgaattattatatgctccggaatccgggaaaataattaattataatgtttacggaaacaagcttttcttccacgttgaaggcggagataaaccaggtctttatcgtatgaatatagatggaacacaggttgaatatgttgctgttggtgaaatatctggcatacactgcacacaacgatatacatttttctcatattacactgaccagacatctttatacagagttcctaccacgggatccataacaagtatagaagaagttacaatacaataaataatatgctgtaaggggcaaaacatcctttgtcccttacagcatattataattacatctttgtttttatcttaatttcattacaaaatctaatacttcgctaatatattagtctggatattctgatgttattccaaaatattcttcaagcgatatccaatctccattattatacaacttttctgcaagctctgttccaacatatcttaaatgccatgattcatactgataacccgtatatgcatctttgcccttaggaaatcttatgcagaagccatatttataacaattattattgacccactttccttcacttgtatactgaaaactgtcctctattgagttaaggtcaaagcataagcctgtctgatgttcagagttaccaggccttgaagagtatgtatcagctgctgcctttccatcctttgcgacatatctgttatataacgatacctgataatcatatgacctatatccacttgctatatatatattaagtccgtcagctgttgcatctgcctgcatttttctaaacgctgccataagatccttatcaaggctcttattacttcttgcctctgtgacaggtgtttctggattctctggcacaaatgtacttggaagtgcatatgtcttattagctattaaatatccatctatataagttgctccatttttcacctgaatattaaagcctttagaagtctttcctatattttcaaatcctgaatcaccaccacctgctgcagaattgtcgtttgaaccagaggtattattttcattctgctctgatacagattctgtcttatctttcactgttgaagctgtactgttgttttctgtttctgtcatattgattccctgctgtgttgtttcatttaccacactgctgttattcgctttatcagcagatttctttctgtctgcacatccttttactaaaaaaacgattgcgattgcaattattataacaacagcaattaatgcagcctgtattaatctccgtcttctttcacgttcttttcttgataaccttcttctcattgtatcctgctccttattgattagttgtataggaatggtgcttttacgctgaaatcactgtcagttattacatttttcaacgcagacagctgtttatcatcacacttttttataagtcctactagtcctttggtaatcagccatgcaccatatttattaaaatgtgtattttctgatatagtatctggtttattaagctctttaataaaatcatctggccatattcccttattaactccctgcttaatagatgtatatttatgaatatctgcacatcctattgactcaaataattctaccgaatatgaaaataaatcaagaactactgtatgtgtttcttcaccaatctgtttcattgcccttatatacgcaaaatcatttccaccatgcagtccatttccatctttaatccttccatcatctgtaaactgtgtacgtgcaggtgctgtaacaagtactggtgttgcaccatgttctcttgccatatcaatatattgctttataaaccacttataacttcctttttctgcatttttagaatatggataatatccatcatgtgggtatgaattattaactgccctcacactttttataactgcttctttatctgctattgatgtatccttcataagtgcttctatatactccgcaggtatataatcctttgataccttttcccctggtatcaccggaaaacgtccctcttcatcagcttctccaagttcaacaagtctgttaaacattgttttatattctttagtggcatcatcattatgacagaactctataagaagataatctcctgcctttatattcttttcaatctcatcgaatctgccttcgttaataaacagtcttgagcttctgcctccttttgcatagttaataaccctggcatctttatttacataatatggcagatattgcccccatcctgctataaactcttcatctgtgtaattctgaactattgaatctcctgccagatatatattcataataatcctcttttctttgctcgtttttttgctggttccacacaattttagcatacttacattcaaaacgctattataaacttatcttaatattttaaactttaatattaaaaaatccagacatataatacttattcagtttttattccgaataaaatatcatatgcctggattttttgtgttttattttatgacatacatgaatgtcttttcgacactctgccctttacagcatttcgttatcataacaattattcttcatcttttttatatttctttttgcctgacaatgctaatccggctccaagtgctgataatgctgcacttattgtataccatattgttcttgtactatctgctgtcttaacactgccatcttcgctgctacctgcatctggcgttggcactggatctggcactggtgttgggtctggcactggtgttggatctggtgctggtgttgggcctggcgctggtgttggatctggcgctggtgttggatctggtgctggcgttggatctggtgctggtgaagctttctcaagcttgtttatagctgctgttatgttacctgcaagtctgtcagcctctttctgtgatatgacagttctatcagctgcctttgcctcatcaactgctttcttaacttcactaaagtccttataatctgccgcatttaaagcttctgccttctttattgtctcatcaagcactgtaaaatcagtcttttctgcagactctgttgcataattcttagcggattctgcataatagctttcagcattccaaggtgtattaaacgctgctccttctcctgattctcttgcaaatactccattaactgtaagcttttcgccttctgccctgcttaactggcgtctgttaacatttaccgcgaagcccttgccatatgactgatattcatagaactgtgctgattcatgattatttccacccatgtcatcataaccatttgtcttaatatggctgtccatatagcagttaacataagttacacatgcattagctctccatggtcttccaagtgctacactattatctgaaacactattatctttctttaataatcttgaattaataaatacataacctgttgatcttgtactgtctgtacttgctgctgttacgtagccgtctctgtttgcaactatatcacaatcatcaaatacagcctgtgcgctgccgaatatccagtctacacagccttctatataacagttcttaaagtactggcgtttaccaccatctgcttgtaatgtatcctgccatcctgtaagccttacgttattaaacacaagctggtctgctcttgtaagaagagcaactgccatttttccttctatcgtttccttaggatagtcaaatgaattggctactgttatattttccaatgtcacattattagctgcagcctctatagttaatgaagcgcttccagatgtaccataagtattgcctgttgctggatctgtctttccagctgctgcgtcatattcaagtactgtcttctggctgtcttcacctataatagttatatatggtgttgttatacggactttttcatgataatttccattctttacatatataactacctgttccttattatctgatggtacagaagctattgcatctgctatagttgcatatactggtttttcagatacatctgctgatgtttcatctcttgtgattttctgtactgcttcactctttgctgcgtttgcatctacaacaatatcatacttatcaagttttacgaaattaaatttcttatatgtctttacaccactttcatctgtaaattcaactttaacttcatttctgcctgacttaagcggaatatcagcagatatttcatctcctgctgatgtcttacctgacattatcttatcactgcctgatgtaacaacatagcttcctgctttatcatatgaccacttaatatgagcctctttatcaataaccgtatcattagatttttcaacaactttcataacagctgcctctgaaccaaacatatactcgcctgtatgtccttttgtagccattattgaaacagcagccgactggttactttcattgtcagtgcctactgcagttactctgtaaaaataaggcacttcattctgtgctgtactatctgtataagttccctgtgtagaagttcctatctgagtatatccttcatttctgctttcagaacggtatatcttatagcttactgcctctggtaccggctcccatgtaatagtattagaagcatctcctgacttagcacttatttctggtgcagtcataggaagtgagaacttaacagcctctgattccatagagttctttacctcagttccacatataccagttattctgaatctgtagcttcctgtcttttcaggtgaatatgtgtatgaattctctgctgtagtatcaacctctgtatatgttgctccattatcagttgatacctcgacacgatactttccatcaagctctgctccctcaccattccatgaaacagttattgatgagcggtcatctgatacaactggcttgtttacagctgttactgttggtgctacaccagcatccttataataatctttctggttatataagacattgccagcagcatcctttgcaacccagtcagtaatctctactcctgcacctacaagtgcaattccatatgatacagcgtcatctgctgtaagtaccatatccttccacttaaattccttcttatcagaatactttgctactccgttcgcatctacctgaagcggctttccaagacttgtaaactctgctacataacctgcatcagttcttgtaaatgtaacattatatttattattagtttcaacctcatattttggagatccattacctgaatttccattagatttcatccaataacctgaaagtgcatctgtattaaccttcttatcatagcccctgaaaccaagtgatgcaaaagccatattgtctgatgtcttgaatgcacctacaaatacacctgttctctttgctgcactgcctgttatataataatctttaatatttaaggtcattgacatagaaacgaggtccttgttttctggaagaagaatataacctgtgttagaacctgcatcaccttttttctgtgatatatatccttctttcgatgtttcctctgccttcataactgaaccaagagctgatacctttaaagcctctgaacctgaggtctttggtttaaatacattattctggtcatataatacattgccttcatcatctgtcagtaccacatcacttacagttgcacctgcactgtttatagcaataccaaactgtgctgctgtatcaggcaaaagataagaatctgatgacttgaatgtcttttcgttgattacatcactgccttcttctttaaatgtagcataataagtattgtcttttttcttctcaatacttatttcatatactgcatcctgatttatagccatctttggtgagccatttccagcgttaccatccttagcaggtgtcttagtatcatgcttaatccagtaaggtgataatgcattgccatctcctgtgctcctgaatgaaacagaattatataaataatcgccagccgtctggaaagcacctacatacacgcctgagtattttccattatcactaacaaacgaatctacctttagctttaatgtcatctttgaggcatctttagattctgggaataacacatatgaaacattgtttcctttatcaccctttttagctgtcattttgcttttagctgcactctggttaataataagcttttcatcctgctgtgttactgatacatcatctgtatcaccataagccttaagtgaatatgttatcttaacatcctcgacagccttagcacttataactatctttgcagaccttgttatactgctgcccttaacaactatactgccagtttctgcatcataagaatactcatttgcactaagctctttatcacctgctgatacctttatatccttaggaagcttgtatcctttatctgcttcaagctgtgttgtgaaatcatttcctgcaacagcataatcagctccagacgttgtaagcttatcaagctgatattcaacatcaacaaactcttcattcacctgaatattagagaattttgctgttgtcatattttcaagatcattggccgccttattcgcatctacagcaaagcctacatatatatcctgattcatttcaatagtctttgaaccaaccttaatccacttaacaccatcatctgatgcatagcctgtgaatgtatctcctcttctaacaagcttaaaccatgttccgttaaattctgcacctgtcttatagtgaagatctcttacaagtggtattccagctttacttgctgattcaggcgaatcaatagtttctgatatatctgaaatatttccatcagttttatctctgccagcaagataagttgaccatgttgtttcattacttatcttaaccatagacataccaagtgctgctgttttagcgccttgatcaagtgactccctgaacataactcctgtaaatacgtgattatctacaatagttgatgaatcaagctttgctataatctctgcatcacctgatgacttgatatatgtatactggaaatcatcggttttagcatctgcatacttacttcctgatacacttccttcactcttccccagctttccagctcccttaacagtcataactccatccttatagcttgcagttcctgctacgcctggattacctatgtcacggcttgtccactctcctgttcctgcagtactgttaatatgaagcttggatacagaagactgtgtctggttaccatcgttgtcataggctcttactgttatattatatgttccatcctcaagtcccttataatcacatgtataaggtgctttatctgcagttcctacaagctttattccattataaaactcgaccttagcaatattgcctccattattagcattggcattagcagtcacagtaactgtatcgccttcgctatactgtgcattatctttaaggtctatagttacatccggattaggtgctttatagtctgccttttcaacattttctacaagtccgttaaaatattcctcaacatatgcataacctgttgctttattaatcttcttggaatctgaaccatcgttcggattaagaccatgtgttatttcccacgcatcaggtattccatccttatcagtatcgaatgagtcttctcttacagaagcagccgcaggatatccacctacctcatcctctgtatttacatatcttcctgaatctgttctcgtctcagctacaactcttgcatcgatagcatcacgatatggatatgttgctcctgcctgtgtaagcacaggctcataacaatcctttgctgaaacaacagaaacactgtcaaagccttctgcactataaggcttatctgccacctctgtcttgtttggaccctctgtcactccggacatcttttcaccaagagcgttgtttgcacttactgcatcattaccctccatgtagtttccattaacatagaaaccacctggcttagttttctcacccatatcaacaacctggttttcaacctgttctcttgtaccaacacctgattttaaataattattaatataattagtataggcataacctccaccatagcaggtattatatccccagttatatagaacattattgcttatctgaagtgttgctgtgcttccaccatccttagtaggatcacccatgcagcctccaccaactcttggatttcttgatgtatggtttgccattaagttgttctggaatactacattatctcctccatatataccgccatatccatgacgtcccttagagtgtcctgatactgtaaggctctctgatactatacaccattgtacagttccatccttacctctatatgtagataatgtttcatctgtattccagctgaatgaacaatgatcaatcataaatgtcttgttatccctgccccataaagcatccatggaatcaccaccagtatggacattggctgctcctggcctgaatctcatatatcttataataagattctctgagttacttatattagtatcccagccagaaagtgtaataccatcaccaggtgccgtctgaccagcgactgttatattctttctgtcacggaatgtaagtgtctgcttaagcgctattgttcctccaacattaaacactatcatagttccgcctttatccttggcgaattcttctataccatatcgaagtgaaccttctataggtgtgtctcccttcgcataatcatcaaggttagttacaacataaacatcaaacccacggccacctgtcgcgaatcttcctccaccttctgcccccgcaaaagccagaagcttatcattttctgatgcaaatgcaagtgttcctgctggaagtgatattccagatgttgccataagaccagccataacaatagctgttgctttacttgcgtgagcacgtcccttatttagttttcttctctgctcacgatttttaccttcagttcccattgctacctcccataacgaaataatcaccttagaattctgctgatttacttcttaaacagcttccttctcatgtttaacgggtcttcaatccctaagttttatttcaaccctgatatcatcataatattttcatagttattttcatagatacaatacatttttatgcaaattgtaccattttagaacttatttttataaaagtattttgcaaaactgcttgcttttagaccggttataacttatgataaaaaagcgagatacatttttttacataataaaatgtatctatgctaaatattaagatgcatatatatgggattttttatgacactatcaaccattttagataagttttacacgaaggagaaatacataatatggactacaatattcttattaatggtatcatccaccagctgtttatacagaatacatatatgccagatgatgataccttaaccatactgaataaatattttaacaataccagctttactataacagcctttcgtcttatgtcagacagcgattctgataactaccagcgtgaactatctaaccttattcctaaatacgctaaaagacactgttcttaccctgtatggttttaccgaactgaggattataataaccttttactttttaatcataataatgattttaatgtagaaaaatatataaatgaaataaacgcttattttacagaaagacacaaatgttccttccactggggaataagcaggacatgccataccttatctgaattcatatttgccaaaaaagaagcgcttacatgtcttgaaaagagcttttccataaagtatcctgacattgtttcatataacagcagcatgacattttcttcagcagatacatttgagttttattatcctgaagctgctgctgccattctttataaagctgttaaatacaatgaccaatctgcaatagactatattttaaaaactctgtcagacgaaaatcttgttataagagcggttagtccaacagaaatgcttaagctgcataatgcagtaactaacacactcatgcagttaaatcctgcaaaatataacttttctgacaatctgctgcagcttaacctgcatataatatcagcacagaaagaccctgaactatattttaactatttatcagcagcatgccacgaaatagctgacaaacttaactgcaacagatctatgcgaaaaaagcttcccatacaggatattcagaactacattctttccaactataataatgcaaacctgaatctggctggaacagctagaagctttaatgtatcggagggctatttatcatctgcttttaaggaaactatgggaatatgttttgctgaataccttgaaaatatacgtattgagaaaagctgtgaacttcttcgcagctcaacagatactattgtggatatagcagaaaagacaggctataacagcgtttattcattcaggcgcgctttcaaacggctaatgcatataagcccatctgattacagaacacgtacaactacataataaaatgacatcagggtcagatagcattgattttgttcaattcaataaaatcaatgctatctggcccctcatcatagccagacagtaatttcacactctgcaagacaataatatcgccactctgctatacagtaatatcgccagcagtctcacagttatccagtgaatctccgacatacactctgaactgccctggttctataacaaaatcatcttttttaacatcaaagaactcaaatgcatccttatacagatataactgtaccttttttgattcacctggttcaagaaatactttctggtatgccgcaagctcctttataggacggtccacactgcattccacatccccgacgtaacactgtataacatcagcaccatacatatcacctatattctttaattcacagcttactactgctattgcctgtgcagcatttttatcatcacacagcttaactgttatgctgcttatttcaaagcttgtatatgataaaccatatccaaaagtatatgctggttttatgtgttctttttcataatatctgtatccggtaaatatgccctcttcacaggtaattacatcttcctttccggactgtccgtttttatatgtaactgtatcctcgatatttaccgggaatgtttctggaagctttccacttggattaacctttcctaacagaatatctgcaagggcatctcctgtttccatacccgaataataacaccatacaagagccttcactctttgaagccatggcatctgtacaggcgaacctgcaaccatgacaacaactgtatcaggattaatatcaagcaatgcattaataagctcgtcctgcccatatggaagaaccatatcatgcctgtctcttccttcaacatcataatcatggttcaagccacctatgaaaataacttcatctgcggtctttgcaagctcacaagcttcctctaaaagcttttgtctgtttttttcaatttcttttcttagctttttattatttttttcattgccttcctgtcccataacctgacgttcaaggcttgcctcctgccagttaacctcattaacatctttgtctcccgggacataatatccaacagcatattgtatatctacattgccgccaagagccttttttaaaccaagaagtggagatatttcatatatagcttttatctctgcacttccacctccatcggcatgattatgctctgcattatgtccgataactgcaatttttctcttagcaggtgctgcattattttttatcagcttatcatctttgctgcctgctttatcctcacagatcattctataaggctttattctgtcaggacttataggaagaatggcatcctcatttttcagaagcacaacagactctcttgctgtatcaagggcatcctgccaatgctccatattagaatatatgccttgttttctatcagttgcttctggtcctatcatcttcagcctgtacataagccttaatatatttttaaccttcttatcaacagcttctttggacacttctcctttatttacagccttaataagaggtctggcataatgataattgtcaaaatcaggagttacactcatctctatgtccatcgatgtactggctgattcctttgtagtatgcactgaaccccagtcacttataactactccatcatattcccatttatcccttaatatatcatcaagcagctccttattctcgctgcaatgacttccattaaccttattataagcattcattatagaataactgtgtgccttgcatactgctgccctaaagcctttaagatatagttcatgcagtgttcttttatccactattgtatcaacgtacaatctgtttgtttcctgacagttaagtgcaaaatgcttgacacatgctgcaacatcattctcctgtacaccattaatgaatggcacaacaagcgattcaactatatatggatcttcgctcatatattcaaaattccgtccacataaaggatctcttttaatgtttatccctggtgcaagtataacatccttgcctctgcctcttgcttcctctccaagatttcttccacacttatatgcaagctgtggattccatgttgcagccagcgcgctattactcggtgcataagaaacataatcatccgaatgtcctattggcacccacttatcattatagaattcatttctgacacccataggtccatcagacattgtaagtggcggtattcctagtctttcaactccctttgtcttaaagaagccagctccatgaatcatatctgttttctcttccagagttaactgatttactatgaatgtaatataatgttctcttttctctgaatccggatcccactccggctcaccttttaaactgacattattttctttcatatgcaccttcactttctgtgcagtacattctgcacactcactttcattttctggttctataaaagaatagcatactcttctcctgatttcagctttatattctgattaaataatgctttatcttctttactcatttcattgaaattctcatttttaagtatcagcccgaattctgtatctcttaaagccgtgattttaagctttatataaaaaccatccttcatgtcagtcttaagtccttctgtacctgtattaatgcaccattcaagtgaatctattcttactccggctcttgtcataagtccgcatacctttccctttggaatacggctgcttagcgctggaaataattctattgtgcttctgtcagaataaacaagcatttcatttacaataccagctataccaaacaatgtatctgtacatgctacacccttggctctgtttgtattatggtctgtaaacaatgatgtatagaatatatcactatgtactaaaagattaagtatgtcatatactgcttctgaattcttaagccttgcctcaactaaagccttatgtatccagccatgtgatgccgtatcgtcttttcctgtattctcacgatttctgttaactatcgcctgacggcaggcatctgcaagacttgtatcattctgtgtctggtatgatggccatgcacaatacagatggcttatatgtctgtgggcattattttccttatattctttcattgaccactcacgtatagcaccgctcttgtcaaactgatactctggaagctgttcatctaacagctttgcttctttaaccctgtccttataacctttttcttttaatccggcttccatatctatgtacattcttacgatatcttttgctgccgctatatccatagctgcattcgctgttattgcactcttatatccaagtggtttgttttctggtgaaaacgaaggaataataagatatttttctcctttttcaaggcatgattttcccttcttataacatgcattacctttacaatctgtataatattcggcactgcataactgcttccagaaattataagtctttcttaaaagtggagccaatatatcttttcttacatcaaatgtatctttaccatacatttttatgatatcttcatcctttgctgttattttaacatcaccataacaatccagaaattctacgattggaagcagcatccagctggcacctgcattccagtactggaatggataattcatatcatattcaaccatcatagctctatgtccgtctgtattaactggaattaaaactgcatccttcattccatataccttagcggcattgttttcccagtcatctatctgacgcataataaaccatatataacctgttgccgcctcatacatgttaccactattcattcctgacacctgtatattcacattggcatccatagtgtatgcattacgccataaaagattccattctcctacacccagtccattcagtcttggtgccgtatgccctgcacatgatatcattccatatcttgcattattgtatattctttccagaagctctaaaactatgtttttttctgatttctgcctttttaaaagtgcttcattactaacaatagtactattttgtcgtcctaagtccaaagaaaccctactatatttttcttcactagataattcgtgcttctttaacatatcctgatataaaaattcattatctttttctgattctgagccactttgatgtacatatttactgaatacattatctattctgcttatgcattttcttacaataccatattcttctatatcagtcccagctttcaactcttcgcaggtatgtgtccagtcaagataagtcacaagaacaagcttgtccgtatctgtcacctttaacacaggagcaccatcgtcaatacatgcataggccatatcactcttcattctgtcaaatgtctgtatacgtccaccattagtatatactctggtaactccggcaaagcctccattttcaagctcgcttcccttaaaagatggataatgtgcaataaaacctatcatatcctctttaacgaatcttaaatatttcattcttctttcagacgttgcagcattgttttttccagttccgaacttatgtattgattcaaaatcttctatgaaaagcttgattccgaagtcctttattccgctgatgaccgtaacaataacgtcatcatcgcaaggcacaaaggtctttctttctatatctatgccatcagctttaaacttagtaactattaccgcctttttcagatctgtatatctttcataatctgttacttctatatcctcaaaaagcgtttttctttcatcgttatgggctaccttaagcatttctattcttaactgctgaccaggatgatgacaatacatattagtacgttttctattatgtatattccatgtatcatccatattcaaaacagcctgccttgcctcttcaagctgtgatgtaacctctcctggtacatatcttggttcgtccgatggcatgacaaattctacattctgatatataagattatcatttaatggtgcacaggattctataacacctatatgtccatttcctgctatcatgccgtcatgccaggcaacatcatataaatcatattctctatatggaataatttctgtgtaaccttctgaatatgatatatcctctttcatacacattccttcctgtctactgttatatccttatactttctttatatcaggcactgttttgtcctcatgatatttatattatttatccaactacagcttataattctcatccggattaatatccaactgaactcccgattcaaacacaccatcaccatcttctgcaaacaatgaaaacagtgttcctgtaaatgtcatagtccttgttccctccgtacttaagccggcattcagacctgaacctatctgtttataagctattctggcattgacatctgttgtatcagacagtgcatatgaaaatgtatatttttccctgtcggtatcaatttttataagaagattcatattttcttcttccttgcttaaaggaatacgtgaaagctccactcccatgtcgtggatatgcttataaaaaccaatatacttttcaccatgttcacatccagcatatatttcataatggtaatcattattataatatgctgctattcctgctcttgcagcattagattttcctatattaacaacagcttttaatgttgttgtaaactctggttgtttgaatgataatattgttggtgattttcctggctcattaagtgaaatatctgttcccttgagtgtaagtcttgtgttaacactatcataaatataatgtgacatatccggatttcttgtaaactgtaatctcttatccagcttatcatcagaaaaatctatatgtacactatggtctgaatataacataggctttccacttttactgtctatgtgtatattctttttactttcctcatcttcaagtcctggaagaggtgcatccataacaagctctattgtcccatttacgttgtatccaacaaccggccatccatccttccatgtcactggtgcaagaaatgtctctctaccaagattatgaagcaatgcatgactgaatcttcttattccaaggaatacaagccaccagctgccattagcatcttctactaaatcagcatgtcctgttgcctggatttctgacttcttatactctttatgtgatattatcggattgtgtggacaaggtgtatatggtccccataccgaagcagaccgctgtatagtctctcgatgtgcatattctgttccaccctctgctatcataagataatacatgccatcttttttatatatatgtggtccttctgcacactgtcctccacagccctcactaataagatgtttatctgataatatctcacctgtcattggattgatttcaaaggctactattccacgcacaccatcaagtattcctgttgaacagtaataacatttatcatcttcatcccagaataatgaaggatcgatacctccttgatctatccacgccggatctgaccattctccatctatattatctgtatgcacaacaaaattccctttatctgttacattagttgtgatcatataaaacattcccttatgataacggatagttggtgcatatataccgcctgagttacgacaaccctctagttcaagctgtgaacgtctgttaagacaatatccctttaattcccagttaacaagattcttactatgatatactggtacacctggaaagaattcaaatgtagaattaacaagatagaaatcgtctccaacacgacatatactaggatcaggattatatcctgggataactggattcttaaaaagcatactatacctcccacttttatatactatatttatatgatgcaaggttaaaaaagccctttatgcttgcaaataagactcttgaccataacatctttatataaatttatagtaattatgattgagaataaaaacaaggggaaaaattatcagaaattggagattttacagaatttggtgtttagcacacattcaattggtgaacgtacgacataatataagtgaaaatcggtcctgcacatacatcatcgatgccagaagtttcaattggatatttctaagacttttcttataggttgtgactactgccgctaccgttcgatacgggacatccgtgtcccatatcgaacttccacagacatccgtgtctgtggatagctggggagttaagaaaaagtctaagaactatcacaattgaacttcaagtgcatctcacgatgtatgtgcaggaccgattttcacttatattatgtctgattgtgccttaatttacgaaaaatgaatgtgtggctaaatcagaggggagagacatgaggggcggaattgtgcgtaagacgcacaattccgccatgtttcgtccacattgatttaattgaatattcagtattaaattatgtcgaaacacagacaaatataagatacaggcagtccggcacactatgtgaaatgcacttgaagttcaatcgagctgaatcttagacttttctttcgctctcagctagcttcgtacacggatgtacgaagcaatgaggccgcgccacggacggcgcgtccgaatggtagcgtcacctattactacctatatgaaaagtcttagagtcagccgattgaagcttctggcatcgaacatagtgtgccggactgcctgtagcttatatttgtcgtccgttcatcaccaactaatattcgcttaaacaacaacttaattagcaaataaagctgttgataagtatctgtctcctgaatctggaagaagtgctactatattctttcccttgttttccggtctgttagcaagtattgttgctgcctttaaagctgcacctgatgagatacctacaagaataccttcacttactgcaaatgctcttccttcttcaaaagcatcatcattctcaataggaagtatttcgtcataaacctctgtatcaagaacctttggtacgaatcctgcaccaataccctgaatcttatgagcacctgctgttcccttagaaaggactgggcttgtagctggctctactgctactatcttaacatctggattctgtgacttaagatattctccaatacctgtaatagttccacctgtacctacacctgcaacaaatatatcaaccttaccatcaagctgctcccagatttcaggaccagttgttgccttgtgtgctgctggattagctggattatcaaactgacctaatatgattgaaccttcaatttctttattaagctcctcagcctttgctatagcacccttcatgcccttagcgccttctgtaagtacaagttcagcaccataagcctttaaaagatttcttctttcaactgacattgtatctggaagagtaagaatagctctgtatcccttagctgctgccactgatgcaataccgatgccagtattaccacttgttggctcaataattgtagctcctggttttaaaaggcctttcttttctgcatcattaatcatagctaatgcaattctatctttaactgagccagctggattaagatactcaagcttagcaaaaatattagcgttagtaactcctgccttcttagtatatccattcaacttaagtaatggtgtctttcctattaattctgctgcactttctacatatttactcatattattaatcctcctataatgtgttgtctttttgttttcccattaacctatatgtttaatgtgtttatgtttgaattatattctctgttatttaatctgtcaactattatttgaaattttattataaattttcttcaactttttcaagattcattataaatgtatacattgttccttacaaaaacatgccatagtttaagtaagacaaattatataacaccaacaaaaatacaaatactcattttatacaatgtaaccttcatcatatacatgcaaaaatctgaatttcaattgtacattaaatttaaaaaataaaaagtagtatagaaatcctgtcttataaacaagatttccatactactatgtcaagttatcttataatgacatgactgttaaatgtaacaatccagcctatttcttcaaacacgtaaccacaaatccgtaatcacacaacattaattatataactataatcacccgaatttctcaaccacatctgccttcataatcctatcagcatattcaacaccatatttttttacaatatacttatagcactttgacagctgtggtgttcttgatgtcgtatcatgtgcatctgaggcaatgtagtctacaacatgatcctttaaaagtgctttaacacatctttgaacactccacccattatctcctgtaaccgatgatgcatttacctgtatatcagcccctagctgctttaattcatatatataatcccagttttttactgtgcaaacatacctctcaacatgcgcaactatcggatgatatcctgtcatgataacatcaagtacagcacttcttaccttttcctcttccacattaggagaaaactctataagaactgtatccgaaccgcacattgccttttcctgaagcttatccaaatcatcaagtacttctgatctgtaatatatctctcttccaagatatacacccatatctggcagctccttttctgcaagatctgctaatatctcataattttcaactatctggctataatgtgccatacctctcttaggatgaaaatgtggtgtaagcaccatatctcttgttccatcctcatatgccattcttaacatcttaagacttgtttctatatctggtgaaccatcatctactccaaaaagtatgtggttatgtatatcagtaaatcctgtatatatagcctgttcttcaacctttttcatactgtaatataactctctttctgtactatatctataaaaagtcttatcatgcaagcacgaacaacttttcacattctgccccttacattataataagatggctctataaattccaatctgaatactctatacacaatatttttattataaaaatatcttttctatttgtcaacacgtgcattattatatcattttcacatacgaactattaatttttat

SEQ ID NO: 515 - DNA, 1288 bp, Unknown
  gut microbiota DNA sequence
gacaactgcaccttttcgtgatatgtaacctatctccattctttcatccgagtccagttttaccgcacagtaattatctccattcagttcttcacatatgattcccgagcataatgtatagccgttaagtcctaccataagattaagcatagttgctctgtcattggcttttatcagctgcttatattcatatgtactaagaacttcctccgcataataaaaagaattgtactctccctggtcaaacgaaagacaaggataatcctttaactcttcaagtgcaatcttatccttatgtgcgagaggatgaagcttactcatatacacataaacattacactctaatagcggatgaaactcaagcatgctttccacaaatattttttcaagcacttttctgttaaaatcattaagatacaatatgcctatctcacttttaccatttttcacatcttctactacttcatgtgtcttggtttcatgcactgcgaattcatattcatccatgccatactgctttaccatctctacaaatgcattaactgcaaatgtataatgctgcatagacacgctgaactttttcttcacatctgactttgatatatatctggcatccagaagctcaaactgttccataacctgccttgcatatccaaggaactccttgccatctggtgttacagctataccattctgtgaacgtctgaatatctgtatccctatttcttcctctagtgcatgtatagatgtagacaggcttggctgtgctatataaagctttcttgctgcgatgttaaaagaatctgattccgacacagctattgcatatttcaactgatttaaagtcatattcgtcctcatttctatgtacgttttttcacatatcctgattcatgtaaatgatatcatcattataaagcctgttcaacttaaattatataatgatgcgagtataaaaaaatataaaagcatctccctttttacaaaagtgtgtctgatgcatactaactcataattatacgaaacaccacacttttattcattttctattcatttccggctaatgggtattcatttttactctaagttatcatgcaatttattagaatggaatttttgaaagagccagcaccttgaatgggctgactctttcaatgtcacttgtaattgacagactggaattttcaaattagtctttgcaaataacctttgaatcttcaccatcaattacaattccctgacggttgttaattgggcatagattcaaatccgaaaactcagtcattat

SEQ ID NO: 516 - DNA, 3704 bp, Unknown
  gut microbiota DNA sequence
tttgtatcagtcctttgtattagtgtttctcctttgctatgaattctaacaatccatacatctataacagctctcaaatacagagtctgcttaaaacactatttacttctatttagtctctttattctcgttatatgccttccttgcctctgctactccagcctttattccggcaactccggctttagctacctcttttccgactttagcagcttcctttcctatgcgtgaagcttccctggcaacttcctttccaacctttgcagcttcgtttgccgccttcttagctttctcttttatctcttccatatcgatatcagctgctgctccagcaccactatctgactttctgctgtccggattagataatgcagcctgtgctgctgcaagccttgctattggcactctgaatggagaacaacttacatagtcaagtcctgccttatgacagaattcaatacttgatggatcgcctccatgttctccacatataccacacttaagttctgggcgtgtcttatgtcctttctcaacagccatcttaacaagctggcccacaccattctggtcaagtcttgcaaatgggtctgattcatatatcatgctcttatagtaagaatcaagaaactttccagcatcatctcttgaaaaaccaaatgtcatctgtgtaagatcattggttccaaatgagaagaactctgcttcttctgctatttcattagcaagaagagctgcccttggaatctctatcatagtacctatcttatacttaatatcagagttcatctctttcttaacagcttctgcctcttctataacaatatcctttacatacttcaactcttttctttctccaacaagaggtatcataatctctggtgtaatagtataccctttttcccttgatacttctatagctgcttccataaccgctctcgtctgcattctcgctatttctggatatgttactgaaagacggcatcccctatgtcccatcattggattaaattcatgaagtgtatcgcactttgcctttacctcatcaatagtaagtcccatatcatctgcaagtgccttgatatcttctgcatctgtaggcacgaactcatgaagaggtggatcaagatatcttacagtcattggtcttccttcaagcgcctcatacatagccttaaagtcagctttctggaactctcctataggcttaagtgcttcaactctttgctctactgtatcagaaagaatcattcttctaaacttaggtattctgtcttcaccaaagaacatatgctctgttctgcaaagtcctataccttctgcacctaactcaacagccttctttgtatctgccggagtatctgcattagttcttacgccaagctttctatattcatcagcccagcccataagtctctcaaagttaccgcttatagttgctgcaactgtctttatatcacctttatatatcttacctgttgaaccatccagagaaacgtaatctccctccctgaatgtatatccacctagtgtaaatacctttgcttcttcatctatattgatagcaccgcagccagatacacagcatgtacccatacctcttgcaacaacggctgcatgtgatgtcataccaccacgcactgtaagtataccctgtgcagcgtgcataccttctatatcttcaggtgatgtttcaagtcttacaagaataactctctcacctttgccgcccttaccaagctccttagcttcatcggctgtaaatacaactttacctgctgccgcacccggagatgctggaagtgcttctcctatcacctcgccgctcttaagtgcctctgcatcaaacataggatgaagtaactggtcaagcgacttcgcatctattctcataacagcctcctgtggagtaatcataccctcatcaacaagatcgcaggctatctgtatagctgcctgtgctgttctcttgccgttacgtgtctgtaagaagtaaagctttccttcttcaatagtaaactccatatcctgcatatctttataatgcttttcaagcttcatggcaaggtccataaactgtgtatagcattctggaaggtccttttcaagctgtgtgataggctgtggtgtacgtacacctgcaactacatcctcgccctgtgcattgataagatattcgccatatattccctttgcacctgttgatggatttcttgtaaatgcaacaccagttcctgatgtctcacccttattaccaaataccattgtctgtacattaactgctgttccccagcttcccggaatatcgttcattcttctgtatacaatagctcttgggttattccatgaacggaataccgcctttacagcctccataagctgtaccttagggtcttgtgggaactcctccccctttgactctttatagaaagccttaaatcttgtgataagttccttcatatcctctgctgtaagctccgtatcatacttaacgcccttagcagcctttacttcgtctataatcttttcaaattcagactttgatacttccataactacatctgaaaacatctgtatgaatcttctatatgaatcatacgcaaatcttggattacctgttttagcggcaaacccctcaactgcaacatcgttaagtccaagattgagtattgtatccatcattccaggcatagatgctcttgcaccagatcttacagatacaagcagcggatcgctattgtccccgaatttctttccgttgtattcctcaagccatgcaagtgcttcgaatatctgtgtctttatttcctctgatatattctgcccattatcgtaataattcgtacacgcttccgttgtaactgtaaagccctgtggtatcggcataccaagtcctgtcatctccgccagattagctccttttcctcctagcaacgctctcatagaagcatttccttctgaaaatctgtaaacccatttgttcataagattccctccattcataacccatgttaaattgttccgtacaatgtcattgttaaaattataacatgccctggctgattaagcaataagcttgtacggatttttatacatatagtatgattatattcatattatggaaaaatattcatgatagatgtattgttgtttaattgaatattagttggtgatgaacggacgacaaatataagctacaggcagtcctgcacactatgttcaatgccagaagctttgattggatatttctaagtctttccatataaactatgataactgacgctaccgctcagacgcgccgtccatggcgcggcttcgctgcttcgtacatccgtgtacgaagctagctggttgactaagggaaagactaagaactatcacaatcaaacttcaagtgcatttcgcatagtatgcaggactgcctgtagcttatatttgtctgtgttgcgacataatttaatactgaatattcaattaaatccacattcatttttcgtaaatcaagccacaaccagacataatataagtgaaaatcggtgctgcgcatacatcgtgagatgcacttgaagttcaattgtgatagttcttagacttttccttaactactcagctatccacagacacggatgtctgtggaagttcgatatgggacacggatgtcccgtatcgaacggtagcggaaactaccattacgtatatgaaaagtc

SEQ ID NO: 517 - DNA, 17942 bp, Unknown
  gut microbiota DNA sequence
gccggtactgtaagtataactcctatacttccggagactccctgcataatctctatacctatattatacgaattaataatctgtctgaatggaagattatatgcatagttaataacaagctcacttactgcacttcctacaaaagcaagtataagcgtatttgacatagttcccatcatatcacgtccaacattcataccgcttttaaacaattcgaagcagccaagctgtggggctttgtcatgtatttcacacattgccgatgatacagacatcgcaacatccatgacagcccccaaagaagctatgagaattcctgaaaataacagcccgcctatccggatattagttatctgccctacataagaaagcgtttctatgtttgatacattatatccgtctatatctgccaccttgccaaacagccatgctgataagcctgcaagaagcacacctgttactgttccggctattgcacatattgtttttactgtaaagccactgataagatacatagtaactattgttgttataattgtaatgatcacggcagcccagaatggagaaaatcctctgtatatgagaggtatgtatatcataaatattgacacgaacgtaaacacaagtccaactactgacttaacaccattctttccacctattatacatatgagcagtaaaaatattcctacaaatgcagccactgccactattctatcctttgagtatacggagacatttttagaactacccgatacactcatatgcactaccaccgaatctcccttttcacatactgctccgaacaggtttccctcggcacttgtagcatctactacttctcccctatactctccagatgtaagctgcacctttaacctctgatatccgacccttattccgtcaggtgacagattatcctctaccacctcgattactctggcattctcatatgaataacccagtgttgttactattggttctttatctgtaaccctcagcctgtctgccgcaaatataaatgctgcaatacatatcacaacaaccactgcttttacaaccacttgtttcttatctgacatttactttttccttcttaaagcatattaatccatatatttttactggttaagcttctttttctttctttctacaagtataatacctgcggcacctgccattgaaagacctgctgctgtgtaccatgctgctgccctagctgtatccccagtcttaaccgtgctgcctgaaccaaacgcatttgctgatgaatttcctgaaccagatgcatcctgaccagcttcaccattatcctctgtgcctgttccatttcctgtacctgcagtatcctctgttctgtttcctgctgcattgttattattttctgtattgcccttattatcattattctctacagtcacaagtcccttaactgcatcctgtaacgatgttaccgcacttgctatatctgttgttgtgctttctgcattttctgtaacagcctttgctgctgttatagtatcttcaagagtctttaaagaagcctctgtataattacctgccttcttagctgtatcatatgcagcttctgcctttgctatttctgtatcaagtgctgtcttatctgcctgctttacaatcgtatatgcagtcttaacaccgccatctgctacaagttcttcattagatgctgcatcataagtctttactgtaagagttgtatctgttatatcaagaacagaatatgtaggtctccagctctgacatcttgctgctatataatcctgctgtgtaccaataagctgataatacttactaccagttgctgaattagcctcaaaatatacagtaccttctggatctacaaccttgcttgaatcctccttgcctgacttgaggttatagcagttattatccttaatatatgcaaagaatttatctttatcatttgttgatggcatattttcttttgtatattttttatggctgtcagaaccatctgatgatatctgatatgttcttgaatatgtatgatcatgtccctgaagaactgcatctatatcatatttatctataacaggagtaagctgtgtcctaagaacaataccatctgaatctgaatggtcatagccagagccataaatatcctgatggaacataagtattctccacttcgcagaaggattcttttctgtcgcttcctttatcacattttcatgtgtagcaacattatagttgttagtatcaatacttataaataatgtattgccatatgtgaagtaataatctgtacctgcagttgtctttgatgctgtattagcatcacttgtctgcttgttaggataattaaaatgattagaatagttaactgacttagaatcatgattaccgattgttgtagcaacaggaagacttctaagtacagatggattaagaaaacctgcatattctatctgctgctccagcttatcagcatcgttggatacaccagtctggttaatctggtcacctgctgacataataaagcttaagcctgggaacttcttaaccgcattgtcaagtgtatgataccagttgtatgaatcgttcattgcatagtattctttattctggttaccaagctggttagttgaagcacctatctgtggatcacctacatacattatagagaaactgtctgttgactgtgtcttatagtcatatgtctcagaccatgctccatttacataatactggtatttgtaagacgtattctctgaaagtcctgttacagtaaccttacatggatataatgtatatgtcttgtctccatccttaacagtctcaacatcagcttcaactgactgtttaccttcatatgtctttatttcttttccagaagcatccataagcttaatcttaggagtttcatccttagttgttgaataccatgctgcattaagcttagctgcatcctcacctggagttaatgctatctgacagaagttagttcttacgctctcccacttagtcttccattctgcccattctgtgctgtttgcatatacattagacttaacattatgagcatcggtttcttttccatcctctgtataacaggcatcctttacttccatttcaacatctgctgattctgctgctgcattattccatgctgccctctttgagcttcttgcccatgtttctgttgttcccatagccagacttgctaccatcattgccgtaagtgttgctgctgcaacctttttcattcttctcatatcttcctcctgatattatgccttattgacattatgctggacatcagacatttcatattcagcctctgttgctgatttcccaacctgaaatgctggctccaacataaaaatgcaaccttaggttaatataatatttccaccctgcgatacgcattttgcagagataaaatatgtttcttaaccaaagattgcttataatataaagagtattattaaaatctatatgttttattacgtaaaatatccgtaaaggattcttaatctcttgtaatatattcactaatatattctcgttaaacactccacagctatatatttctttatcttcttttcagccactttaagtcccgatactcaccccactataaaatgtttttaaaatatcctcataagttgcaccactttctgccatattctgtgccgtgtatacaccaaccccgaaaccatctcccactcctgttgttgttatctttacgctactatccatatattctattttataattaggtgaattcagtcccagaatctttgcaaatgtgcttcctgtcatcaccatattgccaacctgcatcttagatacatatccatcactgcttaccgatacaacctgtacctgcttatcaagcccctttttatccagtgtcagaccatcgtatgctttttcaaatgcattaacaaaatccttgttattaacagtcttaacgacaaaatattcttttgcttctttatccttaggacattcaactgccataagatatgaataatcatctcctaacatatccttgccagaaagcgtaaaacctgctgttacgtatgtataccttgcctctatatattgcccgttacagcttattgtcatgccatttgtcgctgctacacagtcatttacaaggttataattatccaaatagtcctttccccactttttcttcatctgtcctgatgtcatatacgacataccaagctgactactgtctatgttcatcctttcgcccattaaacggtatatatctgtccttatcattatgctttctgcttttagaagttcaacctcatcacccatatacaatctgtcggcaagaaccattgaaacaaacttctcaacctctacagattgtgatgcatttttataattcactgttaccgtccttccatcagctatctcttcactcacagccgtatcaacaacacctgttagcttcagcgtaataaccgatggcaccagcaaataaatggcgataaatatcattacctccatacatttcctgactatactgcggcctttcctgctttctcccgtaattaatgaattattatcttctcccctcctgcttttataataattataatccttgtaatcataatttcctgcctcgcagctgcttatgacatacccttgtgtatcgttccttcttcttgccttcttatattctatatactgcttgtctgttgccgcttcatctattctttccccgattaaacccactcctctgattataatacggggtaaaaaaaatctatccagtctcatacactttatctagcctcctagataaaatgtatgaataccggatagatattattctatattttgcaacctttactttaacttaactggtgtcttagtaagcttccagatttctgttgcatactcttcaatagttctgtctgatgagaacttacctgccttaaacgagttaatcataactgtcttagcccagccagtctcatccctgtatctcttatcaatcttagcctgtgcttctgcataagaacggaagtccttaagaatgaagtaagtatctgctcttcttccctcctgtgagttaagaagtgagttgtagatatccctgaacatctctggatcttccttagaatacttaccattgataagttccataagaacctctcttatattctggtcgttgttgaagatttccataggatcatagccaccctcattctcataacggataacttcatcagaacgaagaccgaatattacggcattctcctctccaacctcctggactatctcaacattagcgccatccatagtgccaagtgttattgcaccattaagcataaacttcatgttacctgtacctgaagcctccttagatgctgtagatatctgctcagatacatctgctgctgcaaatattatctcagcgttagatactctgtaattctcgataaatactactttaatttttccattaatagattcatcattgttgatcacatctgcaacattattaataagctttatagtctgctttgcaatcttataaccagcggcagcctttgcaccaaagataaatgttctaggaacaatatccatatcaggattcttcttgatttcattgtaaaggtacataacatgaagaatattaagaagctgtctcttatattcgtgaagtctctttacctgtacatcaaatatagaatccggattaacatctattccattgtgctccttgatatactttgcaagtcttactttattcttatgcttaatctgcatgaattcctgtcttgccttttcatcattaacatatacaagcatcttttcaagctgcttaaggtctgttacccatccatcaccaatcttgtctgtaatccagtctgcaagaagtggattagcatgaagaaggaatcttctctgtgtgataccattagtcttgttgttgaacttctctggcatcatctcatagaaatccttaagctcctgcttctctaagatttctgtatgaagtcttgcaacaccattgacagaatatccggcacatatagcaagattagccatcttaacctgaccatcatatataacagccatctttctgaccttttcctggtctcctggatactttgccttaatatcttcaacgaatcttctgttgatttcctctactatctgatagattcttggaagaagtcttgagaacagctcaataggccacttctcaagtgcctcagccataatagtatggttagtatatgcaactgtcttagttgtaacctcccatgcttcatcccattcaagaccattctcatccataagaactctcataagctctgcaactgcaactgttggatgtgtatcattaagctggaatgtaaccttctcataaagcttctttacatcaccattgtgcatcttcttatatctttcaacagctctctggactgatgcagatacgaagaaatactgctgcttaagtcttaattccttacctgcataatggttatcgttaggataaagaacttctacaatattctttgcaaggttctcttcctctatagccttctggtaatcgcccttgtcaaatgagcttaagttaaatgtattaactggctctgcatcccatattctaagtgaattgactgtgttgttaccatatccgataactggaaggtcataaggaacagctataactgaacgatagtcttcctgaacgaatatatcacgtccagttgcttcatctctgtaagaacgcacatacccaccaaacttgacttcatatctgtattcagaacgcttaatctcaaatggattgccatcctttaaccagttatcaggaacctctacctgatatccgtccttaatctcctgtttgaacataccatacttatatctgataccgcatccgtaagctggatattcaagagttgcaagtgaatcaaggaaacatgctgcaagtcttccaagtccaccgttaccaagtgctgcatctggctcctgatcctcgataacattaatatcaagtccaagctcctcaagtgcttcttttatctcgttatacttagtaagattaatcatgttattaccaagtgcacgtcccataaggaactccatagacatataatatacaatcttaggatcttccttgtcatatgtcttatgtgtagctatccacttatctatgataagatccttaactgcatacgcaactgactggaacacctgctgcttatctgcctcatcaatattctttctataaagagatttacaattacttacaacttttttcttgaattcttccttgctaaaagatgcttctgtatctgtcaccatgtattcttctcctccttaatatatagatataccacaaatgtatatcattattcctgatttaactaatcgtgtctgattcaattaacattattcacaaagcacgttacacgatggttaaattatacacgattcgcacccttattgcaatttaataaaattaattgatcattattattcaagataataaagatatgcttgttctggcagtggtgcactctgtaaattccctttaccacatccagctattgcaatcaaactaacagctaataacatcatcatttttcttttcattcataccacctccattcttttaatataaatcatttatatgcaacataatcttctataacattttttatagttcttattaatttcagtatattcatccttaataatatttcaatacaattggcgtgaactgtcattttggggcgtgaattgtacctcatctcacctatttatataaaaacgaggagaaaatacgcataactgcgattttctcctcgtctttacatattataaattattaagatactgttttagttcttctcaaccgcaagcacaaccttctcaccattgatatcccaatccttagtgaatcctgctgttttacctgtttcaatagtatttgcaagaacaacgctcttaatctgctctgcattcttaaccataaggtctgctaacttgtcattaccatctacatatacagtaatcttgtccataacctcaaatccagcatccttacgcatagtctgaatcttacttacgatttctcttacgaaaccttcttcaataagctctggtgtaaggttcgtatccataacaactgtaatacccttgtcagagcttgctacaaagccttccttctgagtcatctcgataagaacatcatccttctcaagaacgatatcttcaccatcagcattgattgtaaatgaacccttagtattaagttcatccatagttgcattgccatcaagtgttgaaagtgctgctctgatagcattaagatgcttgccatactttggtccaagtgtctttaactgtggcttgaatgaatatgaagtaaatgctcttacatcatctgtgtactcaacttccttaacattaagctcatctgctatgatagctgtaaagtattcgtttaacttccagtcagccttgatgtacagcttgccgattggctgtctgttcttgatgttagttgagttacggcatgctcttccgataacaacagcatttaatacatcttccatgttatcttcaagttccttgtcaatccattcttccttaacttctgggaagtcgcagaggtggatactgataggagctgtcttatctatgctgcatacaaggtttctgtaaatgctttctgtcatgaaaggaatcataggtgctgctaccttgcaaagtgttacaagtgttgtgtaaagagtcatataagcattaatcttatcctgctccataccctttgcccagaatctttcacggcatcttcttacataccagttagaaagctcatctacaaagtcctcaagtgctcttgctgtttctgtaatcttgtagttggcaagattgttatcaacagtcttaacaagagtattaagcttagaaagaatccatttatccataactggaagcttatcatactcaagtgtgtacttagtagcatcaaattcatctatattagcataaagtacaaagaatgcatatgtgttccagatagttcccatgaactttctctgtccttctgtaacagccttatcatggaatctgttaggaagccatggtgctgagttctcgtagaaataccagcggatggcatctgcaccgtgcttctttaatgcatcaaatggatctacagcatttccctttgacttactcatcttctgtccatctgcatcctgaacatgaccaagtacgataacattttcataaggtgctttattgaaaagaagtgttgatatagcaagcagtgagtagaaccagcctcttgtctggtcaacggcttctgaaatgaacttagcagggaactgctgttcaaatacttccttattctcaaatggataatggtgctgtgcaaatggcattgaacctgagtcgaaccagcagtcgataacttctggaactctcttcatcttgcccttacacttaggacaagtacaagtaacagcatcaatatatggtctgtgaagctcgatatcatctggacagttatcagaatgttcctttaattctgccttgcttccgatagataacatttctccacaatcatcacatacccagatattaagaggagtaccccagtatctgttacgtgaaattccccagtcctgaacattttcaagccatgcgccaaaacgtccagttccgatagtttccggaatccagttgattgtcttgttgttagctattaagttagccttaacttctggatcactcatcttgataaaccaagactctcttgcatagtagataagtggtgtatcacatctccagcagaatggataatcatgctcaaacttaggagcatcgaataacttaccttccttatcaagatccttaagaacttctgggtctgccttcttaacgaaaagtcctgcatatggtgtttcctttgtaagttcaccctttccgtcaacgaactgtacgaatggaaggtcatatttacgtccaaccttggcatcatcttcaccaaatgctggtgcaatatgaacgataccagtaccatctgacatagttacatagtcatcacatgtaacaaaatgtcccttcttgtgctgcttagccgcaacatctgccgcacactggtataatggctcatattctttatattcaaggtctttacccttgtaagtttctaatacttcgtagtcaacgcctgcgccgcttccagcttccttgccttcttcgataacatttccgcctactgtctggcctgccttaactgcaagtccaccaagtaccttatcaagaagtgcttctgccatatagtaagtatagccgtctgctgccttaacctttacatatgtttcttctgggttcacgcagagtgcaacgttagatggaagtgtccaaggtgttgttgtccatgcaaggaaatatgcatcttcgcctacacacttgaaacgtactactgctgaacgctctttaacagccttgtagccctgtgctacttcgtgtgatgaaagtggtgttccacaacgtgggcagtaaggaacaatcttaaagcccttatataaaagacccttatcccatatctgctttaaagcccaccattcagactcgatgaagttatcatcatatgtgatgtatggattatccatatcagcccagaaaccaactgtagatgagaaatcttcccacatacccttgtatttccatacgctttccttacatttcttgatgaatggctcaagaccatactcttcaatctgttccttgccatcaagacctaattccttctcaagctcaagctcaactggaagtccatgtgtatcccatccggccttacgtggaaccatatagcccttcattgttctatatcttggaatcatatcctttataactcttgtaagaacatgtcctatatgtggcttaccattagctgttggaggtccatcataaaatgtatatgtttcccccttcttacggttatcaatacttttctggaatatatcattatccttccagaacttttcaacctgtttttctctgtctacgaaattcatatctgatgaaactttctcgtataccattgtgttactcctttcaaatcatttacttaatcgtaacgatgttagcttgctttattggtgctgtaacaaatgtcgttacatatgcaaaaaagcccctgccgtaatacgacaggggctgaatcaacttaacctatatcaattacgacataccatcatatgcgtcccttgtaacggtaggattaccgtcctcacttacttttcgtaatataataccatccttaatgttacccataatattatactgcaaagttctgcaaggatgcttggaagtgatattcaactatgctctactcacaccggcttccaccatcccggctcgctattgctttctttcataatctactgtcttcgtcatcgcagataatgtgattgtatataattgatcttaaaatgtcaataattaagctgtattatttattataatttatcacaaaatcacctgttattgtgttatatgatgcattcctttagccctgctatgcccgtccttttctgcgttcaattcctttttccttataatatcgcgctttatcggcatacattttatcctctgcctcacgtaacatttcatcaaagcctgttattacattctcactccagataacacctgctgccatattcacagaacgctcattcattagttcttttaactctgttatacgctttattaatgtattctcatctatctgtgtacagattacaaggaactcatctccacctatacgaaatactgcatccactccaaacacgtctgtaaggcatccacatgcgtgaagaataagtctgtcgcctgcctcatgtcccattgtatcattcacatatttcagtcctgtaacatcacagtaaacaacgcctatactctgttttttatctatactatctacacagtctctcatagcgaaacggtttccgattttggttaaagcatccttatagctcatatcttcaagctttctcatcgtattcctgcgctttatacacgatataataaaagcacccataatctccagtatacttaaggagtattcaagtgtaagcaacggaggattgtctattcccataaatgcaacaacatttccttcgttatataatggaattacaattattgaatgaaccccctgtctttttaaattatcatattgcaatggatcgctatcctttatttcttcaatatcctgaattacgatgtttccgcctttttcaaaacacttataccagttagcacatatctctggaggcagattctgaagattatccttctccggacttattccctctgccgtccactcatatgtattatcatctcttccatgtatatttttttcaaatatatatgttctttctccattaagtgctttacctatatacccaataagtgtattaatcgtttcatcaggtgtatctgctgcaagtgccactcttaaaccctcattgacaagtacttcagtttctctatacttctggataagcttatcctgtgcaagctcctcacttatatctatgcctatttccagcctgtactttctgtttccttccccctcaaccagagtatcctttattatcatatatttatctaatacaggattataataacgccattcctgaaatgtgcccggtgaaagcctgctgttattgcacatcccacatttaacagaagctttttgtaatacctcataacacttcaggccttttatatcctctattgatttcaagccatacgcttccaatgctttatgattcatatatacaagctcattggtttctatatctgttgcatatacatactcattcagatttataaaaaaatcccctatttcttttatatttttcatacgcatgtctccctttattattgaatctgtagtattccccattcattaaacgaatcagcatattctgtatataattcctttgtaacagcccctttttcttctgcattttatatcattttgacatttttttgtcaatattcagtattatatttttattattttttcattatatcataatttactctttctcaacccatacactcacgaacccgcgcttcgcgctttatcgtcctgcttcgcagcttacctttctataacacagctatgcttctttgtttttttatcataattaatcccaacaagtaatatattatctgtatatttcttaacagcctctgggtattttttctcttttatctgattgatggcggtgactgcatcctgattccacttcagctcaataattaaagccggataaccggctgtatactctggctttggtaatagtacaatatctgcaaagcctctgcctgttggcatttctcttactggcttgaaataatactgcattgcacttaaataagctaatgataaaacacagcttaaagagttctcattattatattgaatggccgatgtgtattctgtatgaattttttcaatgcaatccgctactgtatctgcatctttatcaagagttgcatctattattacctgcgactgcttttgaaatgcaattaattcattccactctgtttttttagtagcaagaataaattcctgacgaatttcctcattaggtatatatgccatttgataactgctgtcatatgccagatatccaagatgaataagcagcgtcattacatcatcttttcctgcaaagctgaccatatcattttgaaatgaattaacatcaacatttatcgaagctcctgctatcatttctattattgccgtcttaaggccatcaaagttcatattaattaacggaataatagcctcataggttcctgtttccgaccagtagctgcgatactctccccacagcataacattgaccacggccttaggattgtatatatggcagtttccaagcttatagccatcataccagttttttaccttatcataatcccttccaaatctttcacacaggcatttaacttcatcctcagtaaagcctgtatatttgtccagaacctttgcacttatcatcgtatattcatcaaaattattaagtgctgactgtgtctttattctctttattggcagaatgcctgtaagatacgccagttgtatgaactttgccggctcactccccttaaacatcccccttaagaaattaatatactgtgtctgaacatcgttattagctgcctcatcacgaataatcacatcccactcatctattattacaataaatttaattcccttgttcatgttaataagtgacatagcaccatatgccgttctcgcagaatcaaggtcgacatctggatagttttcctttaactcagctataatctgttcgttaatataatttactgttttatctggcgaaccggcatccatcatacaccattgtacatcaaaatgtattacatcatatttattaatattttctttatatgatggacttttacttatttgcagtctgtcaaatatcccttctgaatcacagcctttgctataatatgccacaagcatatctgctgtaactgactttccgaatcttcttggacggctattacatataaatgcctgattagtattaagcactctgttggtatactcgataagtccagacttatctacatatatttcagaattaagtgccattttaaatgcactattatccgtattaacaaatctccccataacttagcctcctccattccagcctatacatattataccacaagtgaaacttttatctcaataatgaaatcatttccctgtattcttgcacttatatctccattcatacgctccacaagctcttttgcaatagataaacccagtccggttgaggctctgcctcttgccacatctgctttataaaaacgctcaaacacatggcttaagtcaatattttcaggatgttccgtataattgctgattttaagcaaggcatgattatcctcacgggtaagcctgatacttatattcttttccccatgatcaagaccattttttatgacattctgtataactcttcttaagccctgcttattacctgatatatacagcatttcctcagtaatactaatctccgggaagataccctgcttcttccattcatcataataagaaaatacagcttcttttaatattctgtttatacaacattctgtaagctccagcttatatgaatcatttttcagctttgtgaatgtaaaaagctcctccagcatttcattgagactgttaagcctttctctaattatatcaagatatctcctctggtcatctatattgtcacattcctctataagctggaaatacccatccagcgatgtaagcggtgtccttatatcgtgtgaaagattagtatatgtatctgcaatcagctcttctttttttctgtactcgtttctttcttttttacgcaggtcaagaagctcattcaatttatctgaaagctcacctattccccccatatctatttcacgttgaatcagcttgttactatcatgttccataagaaacgacaactggcggcagatgtccttaatctgccgctggtatttccacataataaatgcctgtataataattattactgctaatattccaataataatcctcattctctaaatatcccttttctgaaaaatataactgcttaatgacagcattataataataaatacagctgccacacacattgaactaacaacatcatccctgcctgcattcataggaagcattgccatccttccagttactgtatacttatatatattgaagttatgaagtcccactctattgcccacataatctataagggcatacacaatgctcattatattcatggtaagacataccgataaggtcatgcttataacattgttcttaattataactgctatcgccatacatattaacacaaacgcataatgaagcataagttctgttaagaaataaggtataatctctttccagttaccccacaccacacatttaaacgcaagcatattcgctgctgcctggaatacaaatatccctgcaaaggtaattgctgtaaataaggcaagcgcaactgcccttgaaacaataagcatccccctttgtgacacctgtccaccaatattcttaatataaccgctcttaatatctgctgttgcaaacataaccgcaaatattacaagaaaaagtgcataaaactttccctgtgcattagaaaagaaaacatccattaccgtaaccttctttcccggctccgtaggtaattccacgctcataccaagattgacattatctgtattctgctgcgaaagctgttccttgttgctgtcatctgcctgttgttcctctatgtcctgtgcatttaccacatcaactgcctgcacatcaatatctgcctgactttctactgcctgctgcctctcccactctttattaactgcatcataatctatttttgaaagaaatgaggtaagcagtgctgatgccagcaatataatccatattacatacatactctttgtacgaaacattctgtatacatccatctttatcatattaagcacgattgtcaccccctgtaagccttaagaaataattctcaagctcttcacttgtaatagatattcccttaaccggaatccccgcctttgcaagctccatattcagactggcactttctcccagtctttcaaatatatgaatatgttctttatctataacctgatagctgctaaagcccatatcatcaagcacaggaatagcctgcttaggattatcaagtgtaagctctatacgctcactgcattttttcataagctcttcccttgtaagttcctgcacaagacatccattatgaataatgccataatctgtggcaagctttgataattcctccaggatatgacttgaaatacatattgtcatgccacgctccttagcaagcttctggatagtttcacgcacctccactattccctgtggatcaagtccgttaatcggctcatcgagaataagaaggtctggctcacctacaagtgcaagagcaattcccaagcgctgtttcattccaagcgaataatgctttgttttcttttctccaacagtatcaagacctactgtttttaacagttcttctatatatccttttttcttaatccctgtaagcttacatttaatgttcagattgtcatatgccgacatatttccataaagtccgggtgcttctataagacaccctactcttgaacgtaccttttgtaagtcctttcccttatatccaaacatttctatttcgccataagacggtgttgacagtccgctaatcatcttaagacaggtcgttttaccggctccgtttcttccaataaagccatatatcgcaccctttttaatgtgcatatttacaccatcaactgccttgtgtctgccatactgcttagtcagattccttgtctgcaataataattcactcaaagccttttcctccttttcttaactactcttatcataaaaaataaatcctaatcaatcgcaaataaatagtaaaaaaagagtaaattattcatgcaggcgatatccaatcccccatattgtttctatatattcatcaggtgtaacggtctttattttctttctgatattgcttatatgcacatccagtgtctttgtttcacccatatatggctcatcccacgcatattcgaatatatcctccttgctaaacacctgcttcgggtttttaagcagcaattcgagtattgcgaattcctgttttgtaatcttaggaagcaccctgccaccgatacttacctcaaaggtagagcgtgtaagcaccatatccctaaactcaagccttccgctatattgtccttcctgcatgcca

SEQ ID NO: 518 - DNA, 2432 bp, Unknown
  gut microbiota DNA sequence
tccttagtagtaaccctttcccttttactactaattttactactaacaggtagtaacaacttgcagggttctgctctgatttgccataatctgtaatttcagagtattttacaataaccccggaatcccttgcaaaatagggcattccgggtcaaaacaaggagaaacaaaacaatgataaaaatattattcatctgccacggcaggagtttttcttttgcccaaatctccttattttatgcagatttccttacaataggagagtgtattacaacgattttacaacttttgaaaaatgttccgatatgacgaaaaaggagatagtagagaatgaaatatttataccattatacaagtttagaaacattagctttgattttgagaaataaaacaatttgctttaataacttgttgtacgttgatgaccttgatgaagcagaaacagaagatatggggaagtttggaaaatttgtctatgtgagttgctggactgaagattcagaggaatctatacctttgtggaatttatatacaccgaatatgcatggcgttagaatacgaatgcctgaatttccgtttaaaaaatatagatttaaaaaaggagaatattttttatctgaagatgtagatacatatataaatttgaagaaaatatacgaagaaaacaaggctagtattgtttctacagaaccacatttagaaaagattgaatatacagattctcaagataagttatttcccaaaattagaacagaatcttgtgaagatgcagttaaaaagtttttggaagccaaaacaatgtctgatattacccagggtaatatatctatttcctattcattaaaagatataggacgatttaaaagaacaaattgggcttttcagaaagagtggagatatataatttcactttctcctatgggattaaaagaggcttatccggctagttttgaaaaacatcaagaacaaattagaagaattgaggacacattatcaaagccaccatataatcaattgtttttagaaatagatgataaagtgctagaagaaatagaaattgtatttggacctaaaatgagtgaagcggaaaaaatattagctattgcgttgattaaagaatattgtccacaagccgtatatacagaaagtgttctgaaaataagataaaatgtattatagattgagttttttactaacctaaaattcatactgctggaggagtaaaaaataatgaattgggaagcaattagtgccatagggcaaattttaggaatattaattacatttatggtagggtgtattgcaatgttaccatatatgagaaaattcaatatttatttttcttttatgtataacgtggataaaaaacctacatttgttgtaacgaacaatagtcaaaaaggacagtttataaatcgtataattttgtatagtggaaaatggagtagaaaatcattttgtgttatagaaatgttagacattcaagatgatttgctagcagataatattgaattttttgttgctccgaattcttattgtaaaattagtgctaatgccactagaatggtaaaatatattactcattgtgatgtatatttttcaaagcgtaagaaagtctatattacattagattttggagataaactttctaaaagatattgtacgcagataagaacttatgagtttttacaaatgctaattagtgaaacagaagcatatcaagacttgaatattgatacgctgttttaggaataaagtgaacaagcatgtaatcggttagttgtaaaatagggagagttttacaacttttaaaagatatttcgatatgaagatataatacgaggaaaaaacagtatgaaggcaggaaaagaattggaaaattatgtacaatttgtatatcaaaaattgttggattttatggatgaaggtgcaatggtatcatctaatgtatcagtaataggaaaatcgggagttaagcatgagtttgatgtatactatgaatttcagcatttgaatatgagacatcgtattgctatagaatgcaaagattggaatactcctgtaagtaaaggtgaggtgggagagtttttgtcaaaattaaatgatttgaataatatttcggggatgatggtggctaaatcaggttatcaagaaggcgcaaaacaatttgcagaatccaatggcattcatttaatggaaacaaaagacttaccttctttaggagaaatagttgctggtgtaattaaagaggcatttcttccagatgaagccactcaaggggctcctttctggacattaatggaaatacaatcaggtgaaataacaggaacctatttttctttgccagaaggaaagccgatagtaccattcttctattctaaagtaattgcagaaaaaatgagggaaaaattactagatgcagaaaattgggt

SEQ ID NO: 519 - DNA, 633 bp, Unknown
  gut microbiota DNA sequence
cggtgttaaatgatggcattacgctgacaaacacagaaaaaaataaatttgaaacctatgcagatgattttgaaggaaatgaaacatctttgttcctgacagaaatgaatcgtggaaaaaaatatagtacacgatctaaattattgttcttccgggatgtatatgattggattcagaatcatatttcgattatcacaccggatacgccattgattgatttggaatattattatgatgataattcgctgaagctgattaacaaattgatcaaaacatttgatacgggtatcagccaggtaaaaattgaagaaattacattggatgagttatcaaatgcattgccgaaatcagtatttgataagatgatgcagcatgtaaaaaatagaatggaagagcaggaagaaccatcattcagaatgacgatgaggtcgaaggaaactttctttaatatcgaagttgaaggacattctgaaccgaaggtcacaacaatccggttgcatcataataagtcattttatgagttcggttttgacgaagagtctgatggaacaagaagattattcgatttgatggatatgctgttgaataaacgagaagatgttctttatgttgtggatgaattggagagaagct

SEQ ID NO: 520 - DNA, 481 bp, Unknown
  gut microbiota DNA sequence
ccggtaagaagaaagttctgcggacgtttcttttccatcatcttgagcttacccggaaagaattcagggtcagcgaagtcatcaatcatatgccagcgtttcacgttgttgcgggcatagcaatatgtacaccccactgtgcagccaatgacgatattcatgttctgaatctgatctttgatacaaatactcatgacttctgccactcctcaagattctttctgatgcggtcgaggcattcctcaaaccggataatttcttcctctgaaaaacctttgtagtaaatactgcccatctcatcagatacagaatcgtactctccctttaaggcatgtgctttctcagtcagaaacagaagcgtttttcttttgtccgtttcagactgaacacggcttatcagcccttgattttccattctttccagcatcgtagtaagagatgttatcgctaatccgcatttagtcgagagtgacctgattga

SEQ ID NO: 521 - DNA, 210 bp, Unknown
  gut microbiota DNA sequence
atatctgtcggctgaaaatcggataaaatatttagaaatgcaactggcatataaagatcaggagattgagtttctaaaaaaaattgtatctttaaatccggagacgccggaataatgaaaataccagcccatgcaaagtatcagattatttatgatactttgcaaaaaaacgataatctattgaatgtagctgccatgtgcgaaattgca

SEQ ID NO: 522 - DNA, 2362 bp, Unknown
  gut microbiota DNA sequence
agaagcaccttccatgcctacttcctcagatactgtacacacgaactcaagacgtggatgtgcgatactgtcgtcatcaagtattgcaagtgcataggcaacagctattccatcatcaccaccaagcgttgttcccttagcagatatgaaatcaccatttacctcaagatccagtccatcctcatccatattcttatcacaatcaggtgtcttctcgcataccatatccatatgtccctgaagtattataggtgctgcatcctcataaccctttgaggcttcctttattatgattacattgttaagtgaatcctgataatattcaagctttctttccttagcaaaatcaacaagataattgctgattttttcttccttatatgatggatgtgggatattacatatatcctcaaaaaaagaaaatacatttttaggttctaattcagataatactctcataacactgtctcctttaaaatatttataatctacaaatctattttattcatttgtttatctgcttatttatttgcctatttaactacttatttatcttgttcatatatacaataaactgattcttatgaagcagctttataaaataacacaatctctcatacagcggctccgctttatctccaaaatgctctttcacaagctgtcctatatcataaatacttcttacaccatctatgctatgccatacaaatgtaccgaaatcatctagttcaatgtaactatatctgggttttcgtgcaataagctgcgctattctgttaaaaatccctttattgtgtactttgacttctacatgaccttttttgttttccctgcattcgaacaacgaattatgctttggaacatagtctaagtaattatccttctgcttagccataaatcaagccttctcctttaatcctagaaaataaaaatctgccggcaaaataaccggcagactcattataacatattatttattattttgtcttcttttcttttttgttaataaatgctactaatgttgcaacaagacatacaaagaatacaagtcctccgatattaccaatattaataatctttgatatattaataacatcgccaagagtagctgcaccaacaggaataatagcaaatactgctaagaggataccaaccagtccttcaccggcaataagacctgatgaataaagtattccctgattaaccttagccttacgctcttcttctgtaatacctttcttcttatcaaagtaaagtcttacaagtccaccaaccataataggtgtacttaaatagattggaaggtaaagtcctactgcaaatggaagcacaggtatctgaagaatctcaactactattgcaattgcaactcctgcaaatacaagtgaccatggaaggctgttacccataacaccttcaacaaccatcttcataagagttgcctgtggtgctggtaattctgttgaaccatagccccatgctgcattaagtaaataaagtactccaccaactgtaatagctgatacagctacaccaataagttcacctgcctgctgcttgtaaggtgttgcacctactatatagcctgtctttaaatcctgtgatgtatctcctgctatagctgcaattatacatattacagaaccgatacttatagcagcaaccatacccttcattccaacagtacctgttgctttaagaatcgctgatgaaataagaagtgtcgcaatagccatacctgatacaggattattggaactacctactaatccaaccatacgggatgatactgttgcaaaaaagaatccaaatatgataatgattattgcactaagaagatttactggaataactgggattaaccacataataatagcaagtactccgattcctaatacaacaaacatcataggaatatccttagttaatcttgattctactccatctgccttcttaccatatcccttaagtgcctgcttaaatgtccttacaataagtggtaatgacttaattaagcttaaaataccaccagctgcaactgcaccggctccaatataacgtacataattagaccatatctgtgatggcttcatctgtgaaactggaataagtgctggtccaatgatattatctccaccgaataatgcgattaatggcataatcataaaccatgcaacagaaccacctgcaagaaggtatgatgataccttaggtccacatatataaccaacacctaaaagtgcaggtaatacatctgcacctactgctgaacccttatatggtttaattgtaaaatcaacctcacttgggaacaccttaagtccatctgctataaacttataaacagcagcaataccaagac

SEQ ID NO: 523 - DNA, 1574 bp, Unknown
  gut microbiota DNA sequence
agctgcttgcagatttctggcgaacggcgaatgacgatcacgatagctgcgatagcagcggcgagtagcaaagctacgaatcgtgatataatgagcgcaagagaaaaggaagcggctgcgaagcagacatttacttttcttgcgccattaacgaacgaacagccatgcgaagcaaggcgatatagcgcgtagcgcgggttcgtgagtgtacgggttaagaaagagtaaattttgacataatgagcgcaaaaagaaaaggaagcggctgcgcagcagacatatccttttcttgcgccattaacgaacgaacagccatgcgaagcagggcgagatagcgcgtagcgcgggttcgtgagtgtacgggttaagaaagagtaaattatgacatttaactatgttttatttagtgtctatgcgcacatgacacatctaatctgtataaaatacatgcgcagaaatgaggaatattatgaataaatggcagaaagtaggcctggcagccggtatgggaacagctgttattgcaactacacatatcataaacaagtttatatttaaatacgcaacgattaataattatacatttgaaaataaatcagaaaatagttacggctggaaatttggaaatattgcttactcagcttatggtgataaaaatgcttctcctttattgcttatacacgatctgaatgcatatagctctggatatgagtggaataacgttatacagcatttatcagatacacactatgtttatgtattagatatgcttggatgtggtcactctgataaaccacacatcacttacacaacatatatgtatacacagctattaaatgattttataacaaatgttataggaaaaccaacagatataatggcaactggaagttctgctccaatagcaataggcgctgcctttactaacaatgccttatataataaaatactgctggtaagcccagaggctgtctctagagcaggaatcacaccagggaaaagggctaatataagaagaaagcttctctctattcctgtaattggaacaacaatttataatatatgtgtaggaaaaggccgattaaacaaaatacttggaaataaagtattcagtgataatcttgtacccattgattacctgaatgcctgccacgaaaatgcccacttatctggtgcatctagcaaatatcttttttcaagcacagagtgtaactatacaacagtttctatatcaaaagccgttaaagaactaaacaactgtatatatattatacatggtgataattttaatacagaaacactcaatgaatacacatctcttaatagtgcgattgaaactgttaatatatctggttcaggtttacttccacaggtagaacagcctgatgagtttataaaacagtgtgagatattgttgtttaattaaatattagttggtgacgaacggacgacaaatataagctacaggcagtcatgcacactatgttcaatgccagaagcttcaatcggctgtctctaagacttttcatataggtagttataggtgacgctaccattcggacgcgccgtccgtg

SEQ ID NO: 524 - DNA, 396 bp, Unknown
  gut microbiota DNA sequence
agggaaaggaattaataaagatgaataatgtattatcgcgtaagcagcttggaattccttatggaatattccttttattatttgttgcagcccctttgcttgtattgatatattatgcatttaccaatggacagggacagtttacagtaagtaatctctgtaatttctttacagatcctaacacacttggaacattgtgttatagttttgcactggcatttgttgtaactatggtgtgtcttttaatagcgtatccggttgcatacatacttgcacagagcgagattaaaagaaaagcagttattcttatgctttttgtgcttccaatgtggattaactttacacttagaattacagcacttaaggaagttctttcattaatagaaggtaatcttg

SEQ ID NO: 525 - DNA, 762 bp, Unknown
  gut microbiota DNA sequence
gattttcttccatttatgatactcccattgtatacaacattatcgaaaatggataacagcattatagaagcggcaaatgatctgggagctaataatttccagacatttataaggattatattgccattatctgtaccgggaattataagtggaatatcaatggtgttcctgccagcgatgactaattatgtagtgcttgatatgctttataacagtacatatattatgggtagtcttataggaagctattttagtgcatacgactggaacaatggttcaatgatagcacttatacttcttataattatatgtataatcagtcttatatcagcagacagcgataatgaaggttcaggacgcaggctgtagatatatgtgatgggaaagaggacaggtatgtttaaaaaatgtgttaaatatgcaattatcggtcttgtacttatatttatgtatgttccgattcttatattagcagtatatagttttacagattcacctaatattggagctattcattcattttcgttccataattatgtgacattatttacaacaccagagcttatagatatgattataggttcaattgcacttgcaattggaagtgcggtgcttgctacaatacttggaacaacaggtgcaattggagcattttattctaagaaaaatgttaatggtacaatgtcagttcttaaccagataccagttgttaatgccgatgtcgtgacaggtttttcattatgtattcttctggttgttgta

SEQ ID NO: 526 - DNA, 449 bp, Unknown
  gut microbiota DNA sequence
ttacgatctcagatatggtctgattcaaatagtttttacggatgtttgttaatctgtgatttcgttttaataaaagtttttcctttttgattacattatttgttttacagtaactttcccctttcttatttttctcgtaagaatgagagatactacgctgtaatctacgtttctgtttttctagtttctttactttctgactcttattaatgttcttatatttaacagcatcagagcagacagctaaatctttgattcctaagtctatgccaatcccatcatcattaagtgtttccttacaatcaggaaattccacacatacactgatccaccaattcaatccgtcaaaggatattctcggattcatatatttagcatcaatcggaatacgtccatgttctgcaagtcttacccaattctttttttgcttatttgctttcctgctggaa

SEQ ID NO: 527 - DNA, 3602 bp, Unknown
  gut microbiota DNA sequence
gaaaagtcttagaaatatccagccataataaactcgcaaagcgtgtttattatggctatcgcggcagtcgccaaggtcatatcaggaatatgactttggctcgttgctcgcgtaaattgaagcttctggcatcgttgatgtatgcacacctgcttttctcatatatgctgtcgtccgtacgttaagaatgcgtgctaaacaaccatactacttctcattcacaaccgcgttatccataactatattctgtgctttctttacaagcattgcctttactattgtattcttgtcaaacttatctgtgaatgttgttacctgtgaataaccgctgtcctttgcaaactgttcaaggtcatctttatattcatattctgttatatcaagtccttctttttctgctattgcctgatatataagctgctggcctgctgatgcctttacgaattcatcaaatgttttaccataaaggttctggcagtattcatcattagtctttccctgaagagtactataaaaactgattgattcttcaagctttgatgtctgctgtgcaaggaattcttcagggtatcctgttaccttacatacatcaagaagctgtgtaagaatagcctcattctttgcttcactcacctttgtatctatagttgatttaacatcgttcttaacatattccttatatgaatctactgattcaagaccaaagttctcttttacaaacgaatctgtgagcataggaacatttggctgctgtacgtagctcatggttagttcaaacaccactctcttacctgcataatcagtatacttagagttatctggcatagttactgttataacctttgtctgacctgctgccataccatataattcatctgcaagactcgttcctgcaactggaaaagcatcctttccaagaaccatactataatcagaacccgtgaaatcatctattgcaagtccacctgctgttcctgagtaactaaatgttaccttatctgacttctgagccccacggttaacatctgtatatgtagttacatccttcatctgctcagctatcttgtcatctataaccttgttagttatggatgtgacatcaacatcggctactattcccttgtagtttccaagctcaacataatctgaaggattatatccataatcaacctttattttactattacatgctgtagtcataagcatagaaacaaccatagctgctgctactgcatatttaacgcactttccttttaatacttttctcataacctgtctccataaatatatattatgccggattgccgacttataaactataccataatacagcctctaaagccagtattacataaatgtttcacaatattatcacaaaagccgccatacaggatataaagagttatctcatcctatatagcggcttaaatgctactaatcagaagatatccagaatctgacagatataaatctgatatataacattatatttatctttacactaattaatctaatgattaagcaatcttagacttagcaacttctgctaacttagcaaatccttctgcatcattaacagccatctcagctaatacctttctgttaaggtcgatgttagctaactttaaaccatacatgaacttgctgtatgaaagaccattcattcttgcagcagcattgattcttgcgatccataactgtctgaactgtctcttcttctgctttctacccttgtagctctctgtaagagctctcattacagactgcttagcaactctgtactgcttagatctagctcctctataacccttagcgagctttaatactctattatgcttcttctttgcgttcataccgcctttaattcttgccatttcttaatttcctcctaaaataatcaatcacagacacccatatcttataaatatggcataatcttcttcattgtctttacattagttgcatctgtcatagctgcatgtctaagatttctctttctcttagtagtcttctttgtaagaatatggctcttgtaagctttcattctctttaatttacctgttccagttactttaaaacgctttgcagctgctctttttgtctttacctttggcataataatcctcctaatttaattctcatatggaataatattttaacgtttttcagttaaaaacatagtcatgctcctgccttctaactttggagccttatctactactgctatatcacttaacttctctgcaaaatcttcaagtatatgcttacttgaatcaacatgagccatctcacgtcctctgaatctgagtgatactttaaccttatcgcctttctctatgaacttccttgctgcgttacacttagtgttaaggtcattcacatctatgttaggtgataaacgaacttctttgacttctattgttctctgttttttcttagcttccttttcttttctgacaagctcatacttatacttgccataatccacaagcttacatacaggtggctttgcggatggagctatctttacaagatcaacctctgcctctcttgctaacttcatagcatccttaggagacataactccaagctgctgtccttcttgtccaataacacgaacttccttatcgcggatctgctcgttaatcattaattcgctaatagtagtgcacctccaaaatcaaaaaaagtggatagtcagactatccactttttaatcataatgcatcttaattgctgtttatcatgcatattcttaaaaatataaacccgagtcgccttcatgcgctaaggtgagagtggatactctgcttcgtttaacaactattagagtttaacactaatagttatagctgtcaactatatttttaaacatttcaaacaaacatttcaaatatttcaaatttctgcaatacaaaaatgatacattattttattttttatcttacaactgactttcttcttaatactacgaatgcaagacctgcacatgatacaactgcgaataatacatagagtgctatattatacacatcacctgtatttattgtgttatctgatgactgtccgtttcctgttgctgctacatcttcatagcatatagcgtatgtagagaacttatctgttgtaaatgtaataactccgttttcgcagcttgtttcaagtgcctctgctacaccatcatgaattcttacaactgtatattttctttctacagatgaatctgtattcttaagactttcaggaatatcaagcttaacaacaactccagcagctgtttctgttactgatacttctttgagacttccaactttctttaataatgtaagatcaagatatgctccaactacaccattgttaagaacttccttaaccttatcttccacaagcttcttatcgctttctgatactgtagctgttacatctttgacctccatagataccgaaactgtacttccgttttctatttctttcttttcctcttctgtgaatgtgattccgctcaccggtacttcggcttttatattgatgccagcatcagccttaattactgcatttaccttatctgaatctggtgtgcttggtgtatcgcttggtgtgct

SEQ ID NO: 528 - DNA, 201 bp, Unknown
  gut microbiota DNA sequence
accaacgaaaagagtctttttcttcttctcgacagggacggacagccagttttttttcaatgggattgactaatatttgcacatattcgacatcgggtagcttttttatgcaggcggtatttacagataccttgtagttattaaacgtaaacgaaggttcgtaaatatgagcgaagaattcgccacgtacaacttgataac

SEQ ID NO: 529 - DNA, 219 bp, Unknown
  gut microbiota DNA sequence
attaccattatctctcaacagaagaccagcgaatggaaagagaggaacgggacagacaggattttcttttgattctgaaagcataccagtatcgaggatatcataaaggtgcccgtagtatatatatgaggttgttacacatggaaccgcctatagtgatgaatatcaaaaaaatccgtcggctgatgaggaaatataacttacagtgtcctatccgca

SEQ ID NO: 530 - DNA, 961 bp, Unknown
  gut microbiota DNA sequence
cagtatcgactttgcggttttgccagagacgaaaagtcaaggactttttcatcaaattcacaaagaagtcacattttgcggacttcctcacggagcagacgcttgattttgtcctccatcgtctcttttgcggtctggctgaaatggacacggacgatataggttgtcttgccgatctgctttctgacagtcgggcaagtggcggtgttagttgcggtattgttcattcaaaatcctcctgtaaatgaaaaatgcccggtgactgttcatcatcgggcggtgtcggtatgatggaacaaggcaaggcggcaacattaaggtatctataaaaaccttgccgtctttgccacgcttgccgtgttcctgttgtcagtttcggagatagcagacccatgctgtgccgtctttctcggtcacaagtctgtccccgatacggctctttgccgttctcatggtgcgtgaagaaatcccacgctcattgactgccttttccaactctgcgctcggcatacgctttccgtttgcaagcaattccagaatgagcatttgcgcctgtgcggtcttgctctcggtctttgcggtgtctgtcccggcaagaagctcgtcagcggtaatgtcataagcccctatccactcaaagcctttctcgtctcccagagaaaaggcaagggactgtccgggcggcgcaagggagcttttctcatggataagtacccttgttgtggggctgtccctcagcttgccgataaagagcagactgcggactgccgccgtaatgtcgatagaccctaatccccggtaggtgctttgcgttcctgcggctttgttgaggtgtccgatcagcacgatagcgcacccggtagcctgtgcaatgtctcccagactgcggaatatcgggcgcacttcatttgcccggttcatgtccacatctgcgcccagaaacgcctgcaccgggtcaatg

SEQ ID NO: 531 - DNA, 217 bp, Unknown
  gut microbiota DNA sequence
gattctaagagtgtgttagcttatcctgccgactggatgaatagcttcggtaataattactatactcagtctcaagcgccagaattaacagaatttacagcagacaaaaactggcagactgcttcagaaagtaaaccttataaagaacccgagctacaaaccactcccaaagaaaccattatacaaaatataaagaatattattacagaaattaaag

SEQ ID NO: 532 - DNA, 295 bp, Unknown
  gut microbiota DNA sequence
caagattagtgtacttaatctctgtttctggctttgtacctgttacagccttgattccatcaatcttgtttcctgatgcatctactaatgcaaggtctgatgtattagtgcttcctgtacttgttgctgtaactacaacatctgctgttcctgttactgtaaatgtaagtgctccttcttctttatcatcagctccctttgcaagttctgcagaaaatgtactgctgtttcctcttgttacttttccagataatgtaaagtatccttctgtaccatacttacctgctgctatatc

SEQ ID NO: 533 - DNA, 803 bp, Unknown
  gut microbiota DNA sequence
tatatgagcagaaaataacttcaagtttgccgaaatatctttctaactttccctattttacaggattttcagcccattcattagtgaaatgatatgtattttcccttatttttgcccttatgagataatcgtaagggaaataagggaaagttttatttagtcgttgcctgccactttatcaagtaactttgcggattcccgcttggcttttcttgtggaatgggcgtagacattcattgtggtactgacatctgagtgtcctaacagttcctgtacatctttcggagctgctccatttgccagaaggttgcttgtgtaggtgtgtcgcaactggtgaaaatgaaatccttcaaatccatccagtttctgagcaatcttcctgcaaacaattcctaacgtgcttggcagttccaaacttccatccggtcttaagcagacaaaggatatttccttataatcttctggaacattctctgttccgtccagatgatagaactcatagtaaactctgtttttgtcttttacttctctgtagtagtttttgtggtaaagttctccgtactgcattcggtttttaagttgttcctttcgggcattgcgaagaatctctgccagtgtatctccaaaatcaacaatccttaccttttttcgtttggttggtccgatgatattcttgtgccttgaaccatcatatcggatactgcgtctgatcgtaaggcactgttcttcaagatttacatcctgccatgccagaccacaggcttcaccgatacgaagtcctgcataataagctatctggattg

SEQ ID NO: 534 - DNA, 201 bp, Unknown
  gut microbiota DNA sequence
gttatcaagttgtacgtggcgaattcttcgctcatatttacgaaccttcgtttacgtttaataactacaaggtatctgtaaataccgcctgcataaaaaaactacccgatgtcgaatatgtgcaaatattagtcaatcccattgaaaaaaaactggctgtccgtccctgtcgagaagaagaaaaagactcttttcgttggt

SEQ ID NO: 535 - DNA, 947 bp, Unknown
  gut microbiota DNA sequence
caaaaaagaataatgatgtctggtcatccagtaccatactacaaatccttcaaaatgaacgccattgtggggatgttctggcgagaaaaacatggactcctaattatcttgaccataaatcaaggaaaaacaatcaagaccgtaatcaatacagaaaagtcggacatcacgaagctattatctcccgagatgatttcatagctgttcaaaaattaattacaaatgcaaaatatggaaataaagagattttaccagaattacatgtgatacaagaaggctctctaagtggattcataagcattaatccaagatggtctggatttaaagccagagactactttgaagcatctcaaagcgtccttaaaccggcaaatatgaatgtacctgatacaattactgcttccgccggttccttcgatttaagagactatgaagttgccagaggacaatttttctcctctgttggtcggatttctgtttctttttcatataaacagatctcttttaacaaagatgctatacggaaatttccaaacataaaatttgtcgaactgctaatacacccaagctcaaaattacttgctatccgaccatgttcctctgaaacaaaaaataaagtgcagtggtcacgtctcaaagatggtcaacttattccaaaaccaatttccggcgctgcatttttgccaacattatacgagatatttaaatgggacaaaaaatgcaaatatagaatattaggagttgcccaccaaaaagacaatgaaaatgtccttattttcaacatggacgatacagaaatacgaataccgacaagtaccaacgacgtatccgcccccaataacaacatgcctgatacaatatctgattctaagagtgtgttagcttatcctgccgactggatgaatagcttcggtaataattactatactcagtctcaagcgccagaa

SEQ ID NO: 536 - DNA, 593 bp, Unknown
  gut microbiota DNA sequence
aattcttcgcagatggtagactttccaatacgtctggctccttctatcagtaaagcttttttcccctgacactcctttttccattccagtagttttttatatatttttctttttaatatcatggttcctccagattatacgcatatatattagttctatattttatgattatacgcacattgtaatttattttttaattatacgcaagtattataaccctattttttatgattatgcgcacattctataaaatcatatgtacatgctttttctcatttcatatcataaatcttacctaattatatcgggaaaagcagtttgtattatatgctgtgttattaattttctggaatttgtgacgatatattacatatagaatagtattgattctaaacggattttgaatttatttgcagggaggcttttatatggcaatttctcgtattgtaaaatttgagattcctaggtatttagaaaatttaatagatatagttatagataaatttaatgaataaggagagaataaatttaagtttgttttattctgagtcattatcaaagataaatgattcacaagaatacttgatatagct

SEQ ID NO: 537 - DNA, 2605 bp, Unknown
  gut microbiota DNA sequence
tggtgcatttgagaataatccaggcgttgttgcagcggctgctaagaatgtagttgacaaatatatacatgcctttcgtgtaatagaatttgctgtttactgttctccaagagatagtcataattatgatgtattcaattccgttttggggaatatgaagcaaagacataaaagatagtaaatgttatatgtaacatatagtgtatttaatacatatacagcggtattgtgcatattatcagaataaagagaaatgatagaaatcctgtgtttacaaattgagagatgtcttaattataaacataggattttgttatatggcaatacaatagaagagtgtcaggaaatacttagtgagcaggggtgtaatgttgatgaaaatagcatcatggaaatgtagtagtaattttaatttaaaaagaccctaagatttgatgtgaattttataatgaattatgtttccatatttttaaagcagcctttagtgtaactggtatttgtgttatagtaatgataacgaaacatcaggaagtaagaaaaaatgagtgacaataatacattggattactacaaccagcatacagcagattttgtcaatacaactcaaaatgtggatttccatgaaatacaggaacttttcttatcgtttttgcctgcgaaagcaaaaatattggattttggatgcggttcaggaagagacactaagtattttatagataatggatatgaagttgatgcaatggatggttcaaaagaattatgtaaggcagcaacaaagtacactggtattcaggtacagcatatgcttttcgaggattttaatgctagtaatgtctatgatgggatatgggcgtgtgcatcaattcttcatttaaagaaatgcgaactgcctgatatgataaagaggctgtatcaggcacttaaaagaaatggtgtgatatatatgtcttttaagtatggtgattttgagggcgtaagaaatgaaaggtattttacatatcttacagaggaaagttttaatatgttgatggagcctataaatggatttaagaaagaaaaaatctgggtaacaggtgatgtaaggcaagacaggggtacggagcaatggctgaatattatacttcgcaaggtgataaccatttaatagttgaacaaaaatattacaacatgctggattgtcagtgaggacatggatatgtccgaaatgaggagcagaacatgacagggatatcaatgccgcgaaaaatatactgacagaaggattaaggcaaatagcataaagaaatatatagggcagggactgcccaaattaacgcctgtcgagatagtagggcgaacgacgttcagtgaacgttggttttgagccgaccgaagcggagacacgaggtcgatgaagcaggaagcccattggcttaagacaatgggtagttcacataaataaataaaaagaatataatcaaaatataaaaaaatagttaaagaggtgttggtattgaataatctgattgagtttttgaagcaggaaggtgtttctgcacagcttgtagaagaagtccggcattattcagaagaacatactgtagatgaagcattaaaaaaacgtattcctgtaccacattttcattattatggcaataaggtatgggaagaggctcttgcagtgcttctgtgtggcagaaatcttttgctggcaggagagaaggcaacgggaaaaaatgtgcttgcacagaatcttgcagcagtttttgaacgtccggcatgggatatttccttccatgttaatatggatgcggctgcgctgataggttctgatacatttcacgatggcagggttacattcagacccggaccggtgtattgctgtgcacaaagtggcggctttgggattctcgatgaaatcaatatggcaaggaatgaagcacttgcagtcttacattctgtacttgatttcagacgtgtaattgatgttccaggatatgacaggatagaggttgcagatgatacacgttttattgctacgatgaattataattatgcaggtacaagggaattaaatgaggcacttgcctcaagatttgtagttatacagatgccgccactggcaaaggaagatcttgagagactgttaaaggatcagttcccttcactggttactaagtataacaaacagtttgcacttttatttaatgaacttcagaaaaaatgtgaaaatggtgaacttacagagaaagctttggatctgcgtggattaattgatgctgtaagtcttataaaaaagggtattccaatcagggatgcattggatcttggaattaccaataagatatttgacagctatgaaaaagagcttatacgtgatgtcatagcttcaaggtttcccttaaagctgcataatacggaggtgtttgaataatgcgtaccatttcttatactgctaaggaaagacgggctgctaatcaggtatggaatgcggcggaacgctataattttgatccattgtttctggctgttgaaacaggggatttagattcagatttatatatgaatcttataattggactggcatataagtattatggtgaaaaggcaatcagcactttatttg

SEQ ID NO: 538 - DNA, 101891 bp, Unknown
  gut microbiota DNA sequence
tattggaacggagatatcagtcaggctatgctggatgatctgacatggctttatctggaacatgtactgtatacagaggaagcattaaaacgtccgtctatgactgatttacgggtttattatggaaaggctttttttgcaggtgaatataagctgtcgaggcaggagtggatgagtaaaaaccggcttgtatataatatgcagtcagccagatggagcagtgtgtcagggaaaaagaaggttctgctgacaccaaatgaacaaaagctgtatgcagaactgacaccacagataatgcctgaaacagaccggttgatagatgctgtgctggcaatttatcgcaaatttaatctttttgatggcgtaaaacatgaaaaaaaagcgttgcgactgcattttacaggggcatttgcccggataatgacaagaataatgcctgtcagctctgtaagaaataatcatgtaatggttatgcgttcttctgaggcggacaatatgactggtgaagcagcctacagtaaaaagaaagataatataacatataagaaagaaaataatgactgctcttatattgagaattgttttggaagatctgttatatcagagcagactcttattaaaatagaaaaagaactgtgtacaggcagtcatacaggatgccatttatggtttacagatggaaaatatataacaaagaaaaatataccgaaggaatttcttcatttaagagaacagtcacagctgcaggttgaaagaaatcattcatattataataaaaatgtacggctttatgatagtcttattgcacatatagtcgaacaaatccgtaatagcgaatatataagtcagaagacagatgtaatatcaggtcagagaggaaggcttgatacaaccaaagtatggcgtgcagaatatatagaagataacaggatttttcacacatatgaagatgataatcaaccgtcctttacagtggatctgcttcttgatgcatctgcttcaaggcttcagtatcaggaaatgcttgctgcgcagggagtaattatttccaaaagcctcgtggaatgtaatataccggtcagggtaacaagattttgcagtgttagaggatatacagtttttcatatattgaagtcttttagggataagaagtgcgacaatattttcaattattatgctgccggttggaatcgtgatggtcttgcttttcggggaattggtaaaatccttgatatgaacccgggggtggctgacaggcatcttgtgattattttaacagatgctgcgcctaatgacagccagcgtattctgccatcacaggacagcccgtttggacatgattatagcgacgatatttctgttaatgatgcagccgaagaggtacgtgcactgcgtgctaaaggaatacatgtatcagccgtttttatgggaaatgatgcggcggccaatagcgcagaaaagatttatggaaaagaatttacaagaatacgtcgtattgatgagctggcaaaggcggcaggaagacttatacaaaaagagattcagtcgttgacaagataattgcaaatgtgtatgtgattaggaatggagataatagggtgttgatattttatatttttaatataattgtgaaaaatgtatatatacataaaatgacaactaatataaaataaaaaaacaaaagaaatggagaatgtaatgtactgtaaaaattgcggaatgaaactggagaatgggactaagttctgcggcggatgtggaatgccaggaaatacatcaaaatagatacattttatgcttgtagtcaattatgttctgtttgcgggtatcagaatccagatacaaaaaatttgtcagtgaggacatggatatgtccgaaatgcggagcagaacatgataaaaccacacgtctgatgttaaaattggaatttgacggagtaatagatatgaaaatccgagaagtgaatgagaataaaaagcaatttatagcattattgttattagctgatgagcttcctcacgcagaaatatatgtacatgaggatgactgtacaaagcagatagatggcttcattggattgaatgatgactatatcgaaggtgtttttgtaaaagaaacaatgcaatcaaaaggtatcggaaaacaacttctaaatcatgcaaaggaattcagattaaaattaagtgtctatcaggaaaatgagaaagcaattaaattttatctacgtgagaaattggcatactttgtgccagtcaataccacataagttcgttcaagcatccagatgtttaaaactgcaaatatcagcagataaaacggcataataccaattccaatcttctcctgaatatttccaaaaatcattggcataaatgtactacccatataagctgatgccatttgaagtccaataacggctgcactatatctttcaccaaagtttgttggtgccatatgctgaatcgctggatatacaggtcccatacctgtaccaattatcacaaaaccaattgcagcaggaataaagctagccacaggtatcattacgagtagtatcccgacaacttcaacaaaaattcctattcttattagcattctgtctccaagcctatttgatacaaacccagatattaatcttcctagcatgagtccgccaaatataagcgagccaaatgatgcaataagatgatccgttagtccttcctttactcctgcaaaatagctcgaggtccaaaggaaacatgtcgcttctccagaacaatatgcaaagaatgcgattaatgtaagcactacaccgggacgttttaatgcttcacgtattcctgcaacttcttcctcctgtttattagaatcactttcattctttttccataatggaagggaaataatgcaaattaatagtataaaaatctgaatatatgcagtccaccggtatccttcattccaacttgccttacttaatgccactgccataatattcggacttatgactgcacctacaccataaaaacagtgtaaaaaattcatgacagatcctgaatagttattggccacataatggtttacagatgcatcaatagcgccagcccccataccatatggaaccgcaaaaacaaacaacatggcataagatgtagaaatagaaaaacctattaaacccataaccgttagaaatattgatacaataactatccacttcgtatggaatctttttatcattataggactaagcagcgctgaaataatcgtcataaatgaaattgccatagacacatatcctgcataggaagacggcaccgaaaatgcggcatgcattgcaggccaaccagagccaagaagtgaatccggtaaccccagactaataaatattaaatagattactgcaatcagtaatgaatacatctttttttctcctcacttcactttttcaattagattatatctttttttttccggtttataaatagaaaaaaatcacttatatttgttatataaaaaactgtaaatgaataatttttgtttgactttttgaaaaaccaccaatataatatatgaatgaacgagtagcagactagcgtaaatccagttttgctgctcgtttttttgtgtgtatctgatgtcacacaggataaaaatatatattgcagttaaaagtgtgtagcttatcagcgtaagtccagcttatatgataagtacacattttttttatgcagaaaaatgaggacaaatgcatagcaggcatttgcttcgcaaaacaaggaggctaaatcctctcctcaccaaagggttcggattttgcttcgcaaaacaaggaggattaagatggcagaaagtaataagatgaaggagatgccggtaaataagcttatggttcagatgggaataccgatgattttatctatggcattgcaggcagtttacaatattgtagatagtgcctttgttggaaacatgaaaacaggaagtgaggcagcactaaattcgttgacattggtgtttccggttcagatgctcatggtagcagttggaataggaaccggagttggaactaatgcgcttcttgcaaggacattaggacaggcaaatgagaaaaaggcagccaaagtagcaggaaacagtttatttcttggagtgattatttatgcggtatgtctgttatttgggattttaggagtaagagcatatatttcatcgcagaccattgatctggaagttattacaatgggaacaaactacttgagaatatgttgtgtaatttcatttggaattattttcttttcattatttgaaaaactgttacaggcaacagggcgttctctttattctacaataggtcaggttgttggagcagtggtgaatattatccttgatccaatcatgatttatggtatcggaccagttcctgaaatgggagtaaaaggtgccgcatatgcaacagtaaccggacaggtggtatctgcaatacttttgttcatatttcatattaagttaaataaagaatttgagcatgacataaagtatatgaaaccggatggtaaaattattaaggaaatatatgcaattgggcttcctgcaattattgcacaggcacttatgtctattatggtatatgtaatgaatctgattttgaaattcagtccttccgcacagaccgcatatggattgttttataaagtacaacagtttgtattgttcctcgcctttggacttagagatgcaatcacgccgattattgcatttgcttatggaatgagaagtaaaaagagaattcaggatggaatcaggtatggattgctctatatcgttgtattaatgattttaggaattgcaattacggaaatttttccagaagcttttgcagctttgttcaatgcaggacagtcaagggaatattttatcggagcaatgagggtgatttcaataagctttctgtttgctggaataaatgttgcttatcaggggatttatcaggcactggatggcggcatagaatcattggtaatctcgcttttaagacagcttatcattatcctgcctcttgctggcattttttctgtttttgttaaaaacggacagatgggagtttcactgatctggtgggcatttccaataacagagattattgcttgtcttgtgggatatgtatttttaaaaaaaatcagaaagaacaaagtggaaagcatgagttaaggaggaagcagttatgacaaagagaatcattacaatcagcagagaatttggaagcggtggcagatttattggtgaagaagtggcaaaaaaacttggtgttgcatactatgacaaggatattattggaaagattgcagaacagtctggcttatcacctgagtatattcaggaaaatgctgaattatctccaaagaaaggtttgtttgcctatgctttttcagggcgtgatattacaggaaaatcagtcggagatatggtgtatgaggcacaaaggaaaataattatggaaatcgctgaaaaggaaagctgtgtaatcataggaagaaatgcagattttatcttaaaggataggaatgatgtgctgaatgtgtttattcatggtgatatgccagaaaagacacagcgtattatagacttatataatgttgaagagaaggaagctgtcaaaatgatggcggacacagataaaagacgtatgacaaattataacttttatacggaacagaaatggggaaaagccagtaattatacattgtgcctgaacagttcacagcttggatatgacaggtgtgaaaggataattatggagtgtagtaaataaatagtaaattatgatataatgagcgcaagagagccagaaagctgcttgcagatttctggcgaacggcgaatgacgatcacgatagctgcgatagcagcggcgagtatcaaagctacgaatcgtgatataataaataacagcaccagaatttaatataaaaagaggttattaggtaatgaatggattatttaatgtaagaaaagcagatataagtgatattaaaactatacaaaagctgataaaaaacctggcagaatatgagaaaaggcctcaggatatgacggcaacagaggaaacgttatgttattggatttttgaaaagaaaatagcaacagtattgattgcacaatatgatgaagaaatcataggatatgctatttattacccagtgtttggctcatttgcgggcgaggcaggggtgcatcttgaggatttccttttaaaagaagaatatcgtcatcgcggcctgggtaaaaagtttttttctagaatagaagaatacgttaaagaggatggatattctaaaatagaatggagctgtcttgaatggaatacaccatcaatcgcattttataacagcatcggtgctatgcaggagcagggaagaaaatatttttcatacatttgcagctgaagtgatatatttaccaatttccaatattgatatatgagattagtgtgaaaaataagatttttcacacgcaagaatggagaattattatgcagaacagttaccgttactttaagaatgaacaatgtaaatactttccatgtcacaagatggaagaggggcaggattttaactgccttttttgttattgcccactgaaccagtatgaggattgtccaggcaatcctcagattattgagcgtgaaagtggaaagaagattaaggattgtacgaattgtacatttccacatttaccagagaattatgattacatagtaaagtttttgtcaaagaaaatgaaatgatgaaggattgctgcaaataatgatatcggaggttgtgatatcggggttaaataaatatcttgcatttaaaagaattatatggaataatatatcattataattatattttaaataattataatatagatgataacgaaataatcactgtaaacgaagtaactaatatatggagcaatatgttaaaacatatatcatttacttcagggaatcaggtgtgaatcctgaacagttccgctgctgtatacagggaggcggtatccattatgccactggagagtaatacaatacaatccgggaaggcggatatcacttatgatctgtgagtcagaagaccggtttacaggcagagttacaatagtcgttgcgagaacaacagactattgatttttatgccggcatatataaacaaagcatatctgtatatatgtgccgttcctttctgcagagaatgacgcaatcatcttccggttatcacatatacgttgataaccatacatcttcatatgaaaaaggaaaggaaaaaagaatgaagaagaaaagatttcttgcactattacttgtgctggtaatgcttgtatcaactttagtaatgggtggatgtggtacaagctcaggaaacaatgcggacaatggaaacaattatgatggtcagttagtgttcgatcattctatggagcttaagtatgcaaagcttttttctgtagattattataagggcggttataagcttcttactataactaacagagatgaagatacagctattgtatcaaagcagtctaaaatattacttgttccagatggaatgtctacaccatcaggggtagatgcagatacattagtattaaaggctcctgtaactaacatgcttgtatcatctacaccagttacatcgcttatgaatgcgagtaactgtctttcaggcataagccaggttacttatgataagaaatcatggtatatagatgccgtaaagaaagcatttgatgatggaaagcttacatatgttggtgattataaggctcctaattatgaatcaatcatagcaggttcaccttcacttgccatatattcaactatgcttacaagtgtgcctgacgttgcagctaagttaaaggaacttggagttaattatatattagaccagtctacctatgaggatcatcctttaggcagagtagagtgggctaagctatatgctgctctttgcaatgaagaggaggctgctacagctatgtttaacgaacaggctgcttatgtggatacactctctaaggcagagaatacaggaaagtctgttgcagtattctatataacatcaaagggaaagctatatgtaagaaatgcaggtgattatcttgcacagatggttaacatagcaggtggtaactatatattctctgatcttaaccctgataagacaggtacacaggagcttggaatcgagagcttctatgagaaggctaaagatgcagattacattatatatgtatggaatttaggtggtaagccatctacaatggctgattttacgtcttataacagtgtactttctgatttaaaggcagttaaggatggcaatgtatggtgtacaacaccagatttcttccagattgcagatacaatcggaagcatgatcaacgatatcaatcttatgtttaaagcagacgctggcacatcagagcttacatatttaaaaaagcttaaataaagtgaataaatattagtatcaatgactgtcacattaagcaaatacatcttaatgagacagtcattttgataagcacagggttgataaagaatgaattaatatatgatgaacgcaaagaaaaatgaggataagtgtggataacaacattaatcagaaaaataataaatttaaacagatattccgctatcagtttgtttatgttgcgctgcttatattaatggcagcagcagttataatgaatattaatacaggaaatgttcatatatctcctgtacagattggtaagataatatttttaaagggtgattctggaacacctgaatacaatattatatggaaaatacgccttccacggttatgtatggcagctattcttggtggagcattatcactatcaggttttctgctgcagacttttttcagaaatcctatagctggtcccttcgtgcttggtatatcatcaggagccaagatgtttgttgctattacgatgatatttttacttgaacatgtttccggcatgccgctttgggcacaggttgcagcagcctttgttggttcactgtttgccatgctttatgtactgttttttgccaataaggtaaaaagcatgtccatgttattagtggttggaattatgataagctatatatgttctgcaataacagatttatgtataacatttgccaatgattctaatatagctaatcttacacactgggcaatgggtagtttttctggaagctcatgggcaactgtaaagcttgcagcatttataatatttcctacagcgattgttacatttctgttttccaagccgataagcgcttatcttttaggtgagggatacgcacagagcatgggaatcaatattaaatttttcagagtatgtatagtattactttcaagtttactttcagcatgtgttacagctcttgcaggacctatatcctttgttggaatagcagtgccacatataacgagattatcacttaaaacaacgaaaccattaataaccattcctgccatattcttaagtggctcagtattctgtatgttctgcgaccttattgcaagaactatattctcaccttctgagcttgctataggaacagtgacagcaatatttggtgcgcctgttgttatatggcttatgattaagcagaaaaagtaatggcatgtttttacaataataagcagtttttaaaatgtagtataagtggagaatatatggaacagatatatgtgcagacagaagatttaagtgtaggatatcatgggaaagtgctgttatcggatatagccatgaaggtaaaaccaggcgagattcttgtacttataggacctaatggggctggtaaatcaactatacttaagaacataataagagaattgcatccaataggaggaaacatatacataaagggcagaaggactgacgagtttacaggaaaggaatatgctaaaactatgtctgttgtccttactgaaaagataaagacagagatgatgacatgccgtgatgtcgttgctatgggaagatatccttatacgaattatttcggaaagctgacaaaggaagacgaagagatagtgacagaatccttaagaaaggtttcggcggctgatatagagaataaagatttttcacagataagtgatggacagcgccagcgtattatgcttgcaagagcgatatgtcagaaaccagagattattgttttagatgagccgacgtcttttcttgatataagacataagatagagcttcttgatatattacaggatatggcagtaagagataaagttgcagttatagtatctttacatgagatagaacttgcagcaaaggtggctgattacgttatgtgtatcggtacagataaaaccatagaattcgcaagacctgaaagcatatttacagatgagcggataagcaggctttatggacttacacagggaacatataacagcctttatggaagtgcagagttaaagagaccacagggtaaggcacatgtgtttgttgttggtggtgcagggacaggtgtatttacatatagagagcttcagagggcagggatagcatttttagcaggaatactatatgaaaatgattgcgaatatcctgtagcaaagtcgcttgctgaagatgtgattgttaacaggatgtttgaaccgatagatgaagaaacatataaaaaagcatgtgcaaagatagatgaatcagactatgttgtagatacaggctgtcaggttggtgctatgaataaaagattaaaagatctgatagaatatgcaaaaaaacagggaaagaaagtgcttgtaaagccagacagagaagcacttaggcagcttgtataaaataaatatcaagtaccaacagaagaaactataaaacaaatatcacgtaccaacataagaagctataacataaatatcatgtaatacccgaaggaattaaggagaagattatatatgaaacctatggatattgaaaaacagtcatttgctataatagaaagtgaacttactactgatataccacatatatataaaccgatagtcaaaagagtcatacataccacagcagatttttcatatgagacaagtatgacattttctgatggagtagttaacaaggcacttaatgccatacgatcaggagtggatattgttacggataccaatatggcaaaatcaggaataagccataagatggctgaaaagtttggatgcctgcttaactgttatatggcagatgaagatgtggcatgtgaggctgctaaaagggaagtaacgcgggcagccatcagtgttgaaaaagcggcagaacgtaatgcaggatgcattatggttgtaggcaatgcacctactgcacttatgagaataagagaattatatgatgcagggaaattctgtccttcacttgttattggagtaccagttggctttgttaatgtagttgaagccaaagaagatattataaacagcagtatgccatatatagtagcacgtggaagaaaaggcggaagtaatgttgcagcggctgttatgaatgcattgttttatatggcagcagatgatgataaagagtggcgcagatgttagaacgatacgtatataaaaaccaacagaaaatgagatgtggatatactactggtacatgtgcctgtgctgcggcaaaggcagctgcacagatgctgttatcaggaagaaaaacagacaaagttaaagttatgacaccgtcaggagtcagtcttttactggatgttgaagatatatcaatgaatgatacgcaagtatcatgtgcgataagaaaagacagtggtgatgaccctgatgtgacgaatgggatatacgtgtatgccaaagtatcgtatgcagaagtatcatatgtagaagcatattatgataaaagacagaatgaacaaaaaaacgataagcgtataatagttgatggtggtaaaggtgtcggacgtattactaaaaaaggtttatcaagacctgtaggtgcagcagctatcaatccagcgcctttaaagatgatagaagcaggtgtgatggaggcagcagaggattactgctatgatggcggtcttcttgtggttatttcagttccggatggtgaagagatagcaaagaaaacttttaatcctaaccttggcataacaggaggcatatctatacttggaacaacaggaatagtagagcctatgagcgaacaggcacttatagatacaatccgtacagaggtcagtatgcatgttgcagaaggtgagaaaatgctgctggcagcacctggtaattatggacaggattttttactcaatactcttaatatagaattgaaaagaagtatcaaatgcagcaactatataggagatactatagatattgtgtgtgcttcgggagcagaaggcatgcttcttgtgggacacataggaaagcttgtaaagcttggagcagggattatgaatacacattcaaggattgcagatggacgtatggaggtgcttactacgtgtgcagtgcaggcaggggcaaaacctgatgtgctaaggcagcttccagggtgcgttacaacagatgcagcacttgaaatattgaaaaaatcagacatgcttgaagcggtaatggaacagcttatgatgcgtattgaaaatgtactcgaaagaaggagtgcaggcagtataaagattgctgccatagtgttttccaatgaatatggaatacttggtaaaactaagctggcagatgagctgttggaaaagataaaagattaagcataagaagtatatagaagaatggagatttatatggtgaagattgttggagcaggaccaggtgcaaaggatcttataactgtgcgtgggatgaagcttttaaatgaagcagatgttattatatatgcaggttcacttgtcaatgaagaattgcttgagtatgcaaaagaagcctgtgagatatataatagtgcatatatgaatctggatgaagttatagatgtgatagttaaggctgaaaatgagggtaaaaaggttgtacgtctgcatacgggtgacccttcattatatggggctatacgtgagcagatagaagagcttgcaaagcatggaatagcctgcgaagtatgtcctggagttagcagctttcttgcagcggcagcagctgtgcagtgtgaatatacagttccagcagtatcacagtcagttattatcacaaggatgccaggaagaacgccagtaccagacaatgaggatataggcagacttgcaaagcacaaaacatctatggttatcttccttagttcatcccatcttaaagaactcacagaaaagctgtatgaaggtgcatatacaccagatactccatgtgcattggtgtataaggcaagctggaaggatgaaaaatgtatacggacaacgcttgataaactcgcagaaacggcagaaaaagagggcataacaaagacagctcttgttatggtaggagatttccttggcgataaatatgcattttcaaaactatatgataaggattttaagacggagtatcgaagataagaatgagaactatcattattacatttacgcatgatggcatgaaggtggctaaaaaagctgcacagagcatgaaggatgatataaacaatgatataaacgatgatatgaatgttgatatatactgtcactcaagatgtgcagataattatgataacgtcatatcatttgattcggttggaagagttatacgtgagcagtttatgaattgtgacagaatactgtttatatgtgcagccgctattgcggtaagaactcttgcaccatacataaagagtaaggttacagatccggcagtattagttgctgatgaacagggaagattccttatatctcttctttcggggcatcttggaggtgcaaatgaatggtgcagccagttatcatgtaaaataggtgcagtgccagttattacaacagctacggatgcaagaggtgtctttgcagttgatatgtttgccagggagaacaatatgcgtatacttaatcctgttatgattcaggatatatcaggcagagtgctgaatggtgaacctgtcggaatagcaggtgataaagcatataaaaagctgttagaaaaaactgttaaaaagtggaatgggcagcttacaatgtttggagaggaagcagatggaacagccggacaaagcagtatagataaatatgaaagtggaatacagattataacaagtccgtctgaccatatgatattcaggcgtacattaaagcttgtgcctatggatcttttcgtaggaataggctgtaaaagaggaaaaacaagcgggcagataagaaaagcggtaagcagtacatgtgataagaatgacctgcttatggaaagaatagcggcagttgtttctgttgacagaaaagctgacgaacaggggataatagattttgcacgggaactgaaagtaccatataaaacatattcagcacaatatcttaacactatcagaggtgaattcactgcatcaggctttgttaaggataaggttggagttgataatgtgtgtgagagaagtgcatgtgcagcctcaaaagataaaaggtgtattgtaaacaaaacagtctgtgacggagtgacagtggcaatatatgcatagaatgataaattttacttcgtaaaacaaggaggtaaatacctctgctcctgcaagggcagtcgcattttacttcgtaaaacaaggaggtatgtatgcttaagatagttgggtttggaagcggggctaaagataatatgacactagaagcctttgcagctatttctgatgccaggcttatagttggatataagacatacgttaacatattaaaacagtattttcctgaaaaagagtattattctacagatatgatgcaggaaaaagagaggtgccagtacgctatagataaggcagaggaaggcctggaggtagtacttgtatgtagtggtgacagcgggatatatggcatggcaggtcttgtatatgagcttgctcaaaaaagagtacagataaaggttatctcaggtgtgacagcagcaagcagtggcgcagctattcttggagctccgttatcacatgactttgctgttataagcttaagtgactgtatgacaccatgggagcttataaagaaaagagtgagggctgctgcagacagtgacatggtaatgtgcatatataatccgtccagccgaagaagagctggatatcttaaagaggcatgtgagatcgtgtctaagatacaatcacaagatacaatatgcggatatgttaaaaatataggcagggataatgaaaaggcagagatacttacgcttaaagaactggcagaatgtgatgttgatatgtttacaactgtatatataggaaacagccatactaaggttatagatggcaggatggttacaccaagagggtacaaggttatatgatgaaaaatgttactgttatgctttttgcaggcacgacagagggaagaagactgtgcggatatctggcagaaaaaagtgatacagggtttatcacgcatgtatatgtgacgacagaatatggaaaagagattattttagagctatctgaaaatatatataaagaaaagcttcacatacatgtaggcagacttgatgaggaagctatgcaaaaggaacttgcatatataaaaccggatattgttttagatgcaacacatccatatgccagagtagtaacacgcagtataaaagatgtatgtgataaagcggatgtacagtacatcagagtgttaagagaggaaacggttcccaaagcagcatatgaggatggagcatccttagatgacaggcttgtgtatacagacactatgcaagagactgtttctattctaaacagtaaagcttatcttaaaaaaaatatattacttacaacaggaagtaagaacatccctgaatatgtcaatataaaggactataaaaagagagcttatctgaggctgctgcctgatccttgtatgcttcagaatgctatagatgcaggcttttttccagcacatcttatagcaatgcagggaccattttctacggaaataaatgcagcattaatcagacagtttcacatagatgtgctcgtgacgaaagagtcaggaaacagcggtggatacaatgagaagcttatggcagcagaacagacaggagcggatgttgtggttataaaaagacctgttgaacatgaaggaaaatgtataaaagaggtcatagagtatcttgaaaagctgtaaatatagcttatcatatggttaaaaagcagagtgatataagggagaagcagatgaaacaggtgtatatcataggaatggggccgggcagcagaaaatgtcttacacagcaggcaagtgaagcaatagaacacgcagatgttattataggttctaaaagacttcttgaggcttatagtaacacagataaaaaacttttttttgctgttacagccagggatatttacgatattataaacaaagaaaaggctttaatatatgcagttttaatgtcaggtgatacaggcttttacagcggaacaaagaagctttcagagcagctttataaagcacaggaggaaagtgttgtaaaaaagtatgatataaatattcttcctggaatatcttctgttatatatcttgcttcaaagataggacagccgtgggagatggcggcaatggtcagtctgcatggtaagaaacagaattatattccgcttgtcttaactaatgaatggacatattttcttacgcagggcgatgtttctcatatctgtaagcggctttgtgagtccggactgggcggggcagatatatggataggtgagaatctgtcatatgataatgaaaagatattatcagggcacgtaagtgaatatgcagaatatacggcagaaggactaacagttatggcggttcataatcattatccacaggcagctgttatgacaggtttgccagatgagagttttatacgtgcagatattcctatgacaaagcgcgaaatcagggcaagtgttgtaagcaggttatcaccggctaaggatgccatagtgtatgacatcggtgcaggaacaggttcggtttctgtagaacttgccatgcatgccttatatggaacagtatatgcagttgaaagaacgaaagaaggctgtgagcttatagcacaaaatgccagaaaattcggacttgataatatagatatcattaatgccagtgctgcagatgtgatagagaaactgcctgctgcggattcagtatttataggtggaagcggtggagagcttgaaaaaataatggacatagtattaaagaaaaatcctggtgtacacatagttataacagcagtgacattagaaacgcttaatgattccgtaaggcttatggaagataaaaaagtggatgttatagatattgtacagatagcagtaacacagataaagaaaagaggcagatatcatatgttagctgccaacaatccagtatttattattgaaggaagaggtaacagatgagtcgagtcatgatagctgctacaggcagtggaagcggcaaaacaactattgtatgcggcttatgccagtgtattaaagatatgggcttaatgcctttagcgttaaaatgtggacctgattatatagattcaatgtttcattcaagagtattaaacatgaaaacaggcaaccttgacagctggttctgtgatgaaaatactataaaagagctgctttttagaaaagaatcagaaagtgacataactataatagagggagttatgggctattatgatggacagggctttagcacgaagggaagctcatatgagatagctgatatcacagatacaccagttattcttgtagtgaactgccggggcatgagtaattcaataggagcggttcttaaaggttataaagaatatatagaaaacaatcatatacaaggcgttatatttaacaatctgtcttctaagttatataaggatgcaagtatggcggcacatatggctggaataaagccgcttggttatcttcctgtaaacaaggccatagcacttgaaagcagacaccttggtcttgttacatccgatgagattgaacattttaaggaaaaggttgatactattgcagctcttatgaaggagagtattgatatcaaaggtattatagaactgggacatacagccacaaagtgtaagacaggctgtgaattaaatgcttctgatagtaaagcctgcaaaaaaacagaaaaaagtaataaagaagatatcatacatattgcagtagcaagggatgaggcattttgttttctttatgaggataatcttgaattcttaagggaacatgggtgcgagcctgtatattttagtccgctgagggataagaagcttccagatgatattgatggcttattattgtatggaggctatccagagcttcatgccaaagaactatcggataatgtttccatgagaaacgatatagcggataagatacggggaggacttccatgtatagcagagtgtggtggatatctgtatcttcataagaagcttgaggcaccagataaaaaagtatatccaatggcaggagttatagatggcacaggctataatgccggccgtctgcagaggtttggatatatgacactcacagcaggcagaaatactatgcttgctgataaaggcaagagtttttcagcccacgaattccactactggaatagtgactgtaagggtgatacttattctgtgactaaagcatctgatggaagcgttgagatagaaggttatggaagtgatacattgtatgcaggttttcctcatatatattttccaggaaacaaagaagcagccagaagatttattaagacatgcagatgctacagacataaattgagtggtatagataaagatatagaaaaactggcagctatattcccagaacttacaacaataaaagctttggataataatgctatgaaacaggcagaaaagcattgggacggtatagcaaaaccacttcatggacttggaatgttcgaggatatgatagtacagatagcaggaatacaaggaaatgcagatgtatctatagacaaaaaagcagttgttgttatgtgtgcagataatggtatagtagaagaaggtgttacccagacaggacaggaggtaactgctgttgtaagctgcaacatggcagatggaatatcaagtgtatgcaggatggcagactgcgttaatgcaaaggttattccagtaaatataggaatagcacaggacctgcctggtagtcttataaaaacagaagattataaaggacttgtaaacagaagggttatgcctggaactaaaaacttcttaaaggaaccagctatgacaaagcagcagcttataaaggctgtaaaagcaggaatagagcaggttaaatgctgtaaggatgatggatataacatacttgccacaggagagatgggtataggtaatacaacaacaagtgcagcattggcatgtatacttttggacatgaatcccggggaagtaacaggcaggggagcaggtcttagcgatgaggggctgttaaaaaagacagaagtcataagaaaagcaaaagagatgtatggcatatataagaatgatcctttggaactgttaagatgcataggtggacttgatgttgcaggactgacaggagtgtatatagggggagcagtatacaggcttcctgttgtggttgatggtgttatttctgccgttgcagcacttattgcagtaaggctgtgtcctgtagtaaaggattatatacttgtatcacatcagggaaaagaaccagcgataaaggctttgcttgctgaacttgataggaaggcagttatacatgcagagcttgcactaggcgagggaacaggcgcagttatgctttttccattgcttgatatggctatgcaggtatataaggaaaatacaacgtttgaagatatacagataacagcatatgaggattatgggaaatgttgatagtagtaactggtgtaagtggcagcggaaaatctgagtatgcagaacagatatgctgcaagttatcaggagacagaaagaaatattatatagctacaatgcagccgtatggtgaagaaggaaagaaaagaatactaagacatcacaggcttcgaagtggaaaaggttttgaaactatagaacagtacatgcatatctgtgaggctgcagaaagaatttccaataagccggtagtactacttgagtgtatgtctaacctgcttgctaatgaatgctttgaaaaaggcgggaatccggataacataatagatgaatgtatgaagctgtatcaggtgtgcgggcatcttgtgattgtaactaatgaggtgttttttgatggatgcgaatatgatacagatacaaagaactatataaaaagacttggaaggcttaatatacagcttgctaaaaaagctgatgctgtagttgaagtggtgtattctattcctgtatttcataagggaaagaatatactagaggaggaaagtatatgtcagtgattaaatctttggtgatagcattttccatgtattctaaaatacctatgccacatctggaattagaagaaaaggacatgagatatgttatgggcttctttccgcttgtaggtgcagttacaggactgataatgtatgttttatataagatatcgggttatttttatgtaccatatataagtgtatcacttatacttatgattctgcctgtagttattactggcgggattcatcttgatggttacatggatacctgtgatgcacgtaactcatatggtgacgttgaaaagaagcttggaatattaaaggactcacatataggtgcgttcgcagttataagacttttggtatattatgtcgttttttttgcatttatatactgcatagtgtctaaagggtatgaaggacttgctatagcatgggcatttactttctttttatcaaggataataagcggtctggcagcagttaatcttaaaggtgctgtaaataaaggaatgctttattcatttacaagcaaagcagatagaaaacgtgtaaatataatgcttttttgtcagcttgtactgtgttttgcaggaatatgttttattaatataatacttgcatttataatctatgctgtttgtgtggcagtgtttttatattacagacatatggcatataaagagttcggtggtgttacaggtgacctggcaggatatctgctttgtgtatgtgagttgtgtataacagctgcgataggcataatctcacttcttgtctgatagcttagcttattatagtgatggagaaatacatatggaagtttattttggaggtgcatttcaggggaaacttgaatatgtactagaaaaaaagggctgtttaaaggtagctgatggcgcaggatgcagccttaaggatataaaagaagcacaggtgcttaatcacctgcatctgtatataaaaaggttaacctataaagaaggtgctgcatataacactacagttgatgacaccataacgactgatgatactataacggctgacaccacagcaaagacaatgcctgccgctgaaataataaatgatatatatgaagctaatcctgatatcatacttatatgtgatgaggtagggggtggaatagttccactgaaaaaagaagacagaatatacagggaagctgtcggaagagcgttatgctgtgcagtcaagaagtcagacagggtagagcgagttatgtgtggcataggacagtgccttaaatgtgatggaagtaataaatgaggacaatacgtgtatgaaggttatattgataaggcatggagctaccatgggaaatcaggaaaaaagatatataggaataacagatgaagctttatgcgatacaggtatagaaaagctgttaaaaaatgtacataaagacatatatccggctgcagataagatatacgtaagtccaatgaaaagatgcatccagacggcacagataatatatccaggcagagaggctgtagttgttgatgatttaaaggaatgtgattttggcaggtttgaagggaaaaactatatagagctttcaggtgattcttattatcaaaaatggatagacagcaatgctacactaccatttccagaaggagaagatattaaagctttcaggaaaagatgtacagaagcatttataagaattgtaaaacatgctaaagataatgaaattgttgctttagtcgtccatggtggaactattatgtcaatattatcggaattttatggtggtggttattatgactatcattgtggcaacgcagaaggttatatatgtgaagtaacgcagaatgtcaggataataagtgcaaagaaggtattataatatatgtttttaacgataataaaatgtcagacaatagcgatagtgcttgggtatatactggaccttatagtaggagacccacactggctgtatcatcctgtacagcttattggcaggctgataacatttcttgaaaagcttttgttaaaaaaagacgacaaagatggagagaagtacataaaaggggcagttcttgcagttcttgtgttatttgtcacaggagctgttgtgatattgtttcttgcagtgttttataatatcagcatagcagcaggctgcatagcagaaactataatgtgctatcagattcttgctgttaagtccttaagagtggaaagcatgaaagtatatactgcattaaagcaggagggaatagaacaggcaaggatagctgtatccatgatagtaggacgcgataccatgcagcttgataatcatggtgttataagggctgcggttgaaacagttgcagagaatacatcagatggtgttgtggcaccattgttttatatgcttttttttggtgcaccgggaggttttatatataaggctgtgaatactatggactccatgattgggtataagaatgataaatatatgtatttcggaagatttgcagcaaagatggatgatgtgtttaattatataccggcacgaatcggaggctgtcttatggttgtagcggcaggtgctgcacagatatgtgaaaagcttaaaggaacggataagatacattacagcattaaaaatgcatggaaaatatataaaagggataaaaaaaagcatagcagtcctaatgctgcacagacagaggcagcctgtgcaggtgcacttatggtagctttatcaggcgataattattattttggcagacttgtaaagaaaccgcagataggtgatgacataagagaacttgaaacagaggatataaaacgaagtaaccttcttctttatattacagcttttcttatggttgtcatggtgtcagtgataagacttgtactgcttttacaggccggtttttaaaaagcacaggctcttagtggagaaggaggattactgtatatggaaaaacagatacacggcggcaatatatttgataaagatattctgcttgactattctgtaaagaagcatgaggataacgaatgtcttataaagaatataatggaggtgcagtaatatatggcaaagaatcttatgattcagggaactatgtctaatgcaggaaagagcatagtgacagcaggaatattaagagtgttaaaacaggatgggtataaggctgcaccttttaaatcgcagaatatggccttgaattcttatgtgaccagggatggttatgagatgggaagggcacaggtcatgcaggcagaagctgccatgatagaacctgatatatgtatgaatccaatacttttaaagccgacaagtgatgtcggttcacaggttatagtaaatggaactccgttaaaaaatatgccggcaaaggaatatttccagtataaaaagaagcttataccggatattatgcaggcgtatgacaagcttgataaggcatatgatgttatagtgttagagggagctggaagtccggcagagattaatcttaaaaaagatgatattgtaaatatggggatggctgagcttgtagatgcaccagtacttttagtcggggacattgaccgtggaggtgtgtttgcacagcttgtcggaacgattatgcttcttgaggaaaaggaaagaaaacgtgtcaggggattagtcatgaataagttccgtggcgacaggagaatattagagcccggcatacaacagctttatgatatatgtcatataccagttacaggtgttattccttatacaaggcttgacatagaagatgaggacagtctttctgaaagaatagatacatcacataagtctgtcagcacactaaagaagcagctggatatagtagttataaggctgcctcatatatctaactttacagattttaatgcattggagcgtatggatatagttaatctaaggtacgttgataatgcagctatgataggaagtccggatctgattattattcctggaagcaagaatactataggagaccttaagtggatgagatataaccagatagaagcacagattataaggtgtctaagacaggatgttttagtgcttggaatatgtggaggttatcagatgctaggggatgtgatagatgacagctgcaacgcagagacaggtgagactataccaggaatgggactgcttccagttgtaacaacattttccagaagcaagcacaggacaagagtggaagggataatatgtaatcagtcaggcatatggagtggacttacaggaaaagtatgtggtggttatgagatacatatgggagagagtgttgtaaaaacagacgtggcatttgcaaaaataagaaatacagtggatggactggaatatatggacggatgtgtacgtggcaatgtggcaggaacatatatgcatggaatctttgatgtacaggaattctgtgatagtttcatagaaatgttatgtaaaagacggggaatatcacaagacagcactcatataagctatgatatgtataaacaggctgagtatgataagcttgcagatgttataagagccaatatggatatggattatatatatcgtgttattggtttataaaagtattaataaataaaagtattaataaaaaaagtaaacataagtaaataattacaaaaaagaacaaaagtaaataattacttgattattcaaatataatttaatagaatgatgtaagagtcaaaagtataaatcgtgtttggcaattatgattatgatagattatagggattatatatgagaaaaagattattagtatgcataagtgctatgttatgtatagttacagctgcagcgtgcagtaaagcggataaaagcacttcatcagaacagacagttagtgtgaatgaaactgttatgtcagatacagaaaaagaacagctgactaaagagaataatacagaggaaacaatcactgaagaagataatgaacaagaaacaagtatagaagcagctgacactactgacaacaatgcagctgtaaagcctgcatattctgacaaggaaggagtcgagcttgatccttcatggcagtacgctggaaatgcagtcataacaacaggaaatgcagtatattataaaagcagtagtgaacgtaaaggcataacagtagcagtgaatgcaggacatggtacagtaggtggcacaacagtaaaaacattctgtcatccggatggttcacctaagacaacaggaggaactacagcaagtggttcaacgatggctgtagcagtgtcatctggaatgacatttaacgatggtgttgctgaaagcagagtaacactccgcatggcagagatattaagagacggactgctggataacggctatgatgtacttatgttaagggattctgatgatgtacagcttgataatgtggcgaggacagttatagctaataatgcggctgattgccatatagcacttcactgggatggagataacttaagctatgataaggggtgcttttatatagctgttcctgatggcataaaggacatggaaccagttgcctcacactggcaggaacataatgcgttaggtgaagcacttatagcaggtcttagtaacaacggtgctaagataaacggacagggaagtatgaagatagatcttacacagacctcgtacagcacaataccatcagttgatatagaacttggaaatcaatgttcagatcataacgacagcaggcttgagactttaagagatggccttatagatggaataagacgttacttcgaataaattcattggaataaatttattatctaaaattatctaaaattattataaaaaaatgttgaaaaatgtctgaaatagatatatattagtctatgacaatttcgatatgaagtttgcaggaaagtgactgatgtctaccgaaggagtaacactctcaggtgccagtgtcaaggactggtgcaactgtaaatggatcgactctctggagattctgatataatacagaagccgaaggtgcaacatatacatgcgtatatgaatctctcaggcaaaaggacagagaaggccatatgttctatatattatacaagtatatataagtatatatatttatatataagtcaatataatcttaaggtcatgtattccattcaggctgaaaagcttgtcagttttccatagaaagtcatataaccggatatttgtcatttatatttatgaaaataaagaaaggtagttaggacatatgtggaatttagttaatcaggttcttacaacaattgataattttgtctggggtgtacctcttatggttcttatcatagcaggtggtatactgcttacagtacgtcttggtgtgcttcagataagaaagcttcctcttgcattaaagtggatgataaagaatgaagaagagggcgaaggtgaaatatcaagctttgcagccctgtgtacagctttaagtgccacgataggtacaggtaatatagttggtgtggcaactgctgtatgtgcaggaggtccaggagcgttattctggatgatagtggcagcattttttggaatggcaactaaatattcagaaggacttttagctgttaagtaccgtgttgtttcagaagatggacatagtctgggtggaccattttactatatagagcagggcatgggaaagaagtggaaatggcttgctaaaatatttgcattttttggtgtatgtgtaggcctttttggtataggaacgttcagtcaggtaaatggtatatcaagtgctgttaatggcttctttgatgcagataattcgcattgcgtgaatatcccatttttaggagaatattcatggtcagttgttatagcttctcttgtgcttgcagtatgcgtagctcttgttcttataggtggagttaagagaatagcaagtgtaagtcaggttattgtaccatttatggctgtgttatatgtgttgtttgttggagttcttgttataactaacataacaaaggttccaacagcatttaagattatagtggaagcagcattttcaccaagagctataacaggtggtgttgtaggaagcatgcttgtagctatgcagaagggtgttgcaagaggtatcttttctaacgaagcaggacttggtagtgcacctatagcagcggcagcagcacagacaaaagagccagtacgtcagggacttgtaagcatgacaggtacattcatagatacaatagttatatgtacacttacaggactttcaatagttataacaggagcatggcaggtagagggacttcagggtgtccaggttactacatatgcattccagaatggactgccatttcctgcacaggtttcatcctttgtgcttatgctttgtcttgtattctttgcatttactactattcttggatgggattactacagtgaaagatgtcttgaatatttaagtaacggaaatatgaagcatgtaaagatattccgctggatatacatattagcagtatttataggaccatatatgacagtaagtgctgtatggacaatagcggatatattcaatggacttatggcactccctaacatgattgcactgtttgcacttagtggagttgtagtggcagaaactaagaagttctttgagaagcacaatgctaacaattaaaaaaatagattgtaaatataaaaagatatatttacaatctattttttatatgtaagtgtgtttatttgtctgctggttttgcaggtattttcttatcagcgccaagtatgtggctggctaaccaggttacaaggaagtttacaaggtcaagcagatattgctgctggttgtcgtccatagcttcaagctcgtgtatatcaatattaacaagcttatcaatgaaagatgcatgagcctgctgctgggcctcaagtccctgataattgatgctcttcatatattcttcttcatcatggaagtggaactcagtatagtccttaagctgatcaagtaaagacattatctggtcatatttatcatggataaagtggtcatgaataagctcataggtttcatctattatttcaaacagacgcttatgttcttcatcaataaactcaatacctgttttatacttatcagtaaatgtaaaaagtttttttccatcagcatcagcagagctttcattttccttattgacaggagtacacattttaccaatcatcatatcgttactgagtatatgatggtataaccagcgtacaagaaatgaaatacattcgttaaatgaggctttagctgcttcctttgatgatgtatcaagacagaactcattaacctttttcgtaaatgcagcgtgttcttttttctgaaggcctagttcagggtcattgatgctttccatataagcctcctcatgtgcaaaatgagtggcagcatagtccttaagacctgatataaggttattagcgacaggagctatgtcatcaagctcgttgcccatagatattgcatcgttaatcattttaaataactttgcatgttcatcatcaatttctttaatgcctataaggcagtcattagtgaattcgtacatagttaatcctccattcttgcgctgattttcagcgcatctcaagtttgtgcgaagcacaaatcttgcgtgtgaaaaatcttatttttcacactaatctccatttctgcgtatgttgtcaggggattgcgcgaattatgtagcaatcctggtatttatagattaatatatcacacatttgaagaatatggtatactacaaaaaatgatttaagaaatgatttatggaattcctgtatggaagaggcattatatataaggcttctggtcaggaaaaaaggaggtttatatcgtgaaatcaactagtatcaaaaaattatcaatagcaggtatattatgtgctgctgctgttgtaggaagtctgttttcgtttccggtgtttggaagcaaatgtgcacctgtacagcatatggttaatgtattctgtgcagttcttttaggaccgggttatggtgtcatggcagcatttgtggcatcacttataagaaatatgctgggaataggaagtcttatggcatttccgggaagcatgtttggtgcattagtatgtggcgtagtgtataaaagatttcataacattatagcgacaatgataggagaagtggctggaacctctatattaggtggacttagtgcgtaccctgttgctatattccttatgggaaagaatgcagccaatctggcgttttatgtgtatgtatttccgttttttgtatcaacagcagtaggtgcgctgatatcgggaatgatagttctaagccttaaaagctcgggactgcttgcaaaaatgcagcagaatatagaataacaatgggtgttggagtaaagaataacatgtttgataatattattggaatagtgcataaaaggaagccgcttattcatagtataactaactatgtaagcatgaatgattgtgcaaatatacttctggcatgtggtggtgcagctatcatggcagaggatgcacttgaggttagacagataacagctatatgtgatggattaaatcttaatataggcatgttaaatgagaataagcttgaggcgatgctggttgctggcagaagtgcagcagctcttcatcatccggttgtgcttgatccggtaggtgcaggagcctcagatttcagaaacagtgcagccttaagaataataaaagagataagtccgactgtcataagaggaaacatatcagaaataaaagcacttgcagtaggaatggctgacattaaccactctaaaggtgtggaggctaatgatattgaccgtatcacagaggacaatatatatgatgtggcagcctttgcagaagcatttgctaaaaaaacaggggctgtgttgtgtataactggtgttatagatatagtaactgatgggaatgtagtatattgtataagaaacggacatcctatgatgagcagggtgacaggttctggatgtcagctttcagcactgataacagcctatattgcagctatcagcatggaaaatgtgtatacaggctctgcacatgtggataaaacagatgcagataaagcagatatgtgcataagtaaagagcatgatacagcaatacagggcagcatagccaaagctgtggcagcggcagtctgtgttatgggaataagtggagagacagcatataaaaggcttaacgatatggatggaaatgccacttacagaaattatgtgattgatgcggtatacaatatgacagatgatatgctggagagattatgcagagttgaggtgataaggcatgagtagttatttttattttacaagacatgggcagacgatatggaatgttgaaaacaaaatatgtggtgcaacagacattgcacttacaagtctgggacatgcccaggcgacagagcttggaaaaagaataaaagaggagcatatccatatagatgaaatcctgtattcacctttagtaagagcagcagatactgcaaagcatatatcagaggtgacaggaatagcctgccgtgaggaaataagacttaaagaacagaactttggacggtatgaatcaacagcaagagatggagaagaattcgcaaaggcaaagatgaactttgtatatgattttgatggtggagagactatgcttcatctgtgccagagaatatataatcttattgatgatattaagaatgacagtgaggataaggtttatctgcttgtagcgcataatggcatatcaagaatagtagaatcgtatttcaataatatgacaaatgaggaattctcagcatttggaataaagaactgcgaattaaagaagtataccttcagataaaggcagagtatataaaatcatgacataaacataaagaagacattaaagaagatattaaggaagatattaagtaagatgtaaggaatctatcaaggaacctataaggaaggaggaggctgagatggtgcaggcagttaagactggtgacacaaaaaaagaaactacaggaacggatgtgaagaaaacagggcagccggattataagctgcttattgatacggcggcacttgcagggactattatgttagagagcggagctgagatataccgtgtagaggaaacgataaattatatactcaaaacctcaggtcttaaaacaagtgaagcatttgtagtgtcaacaggtattatgatatcacttgatgatccatccatagatgctcttacagttataaggcgcgtgaataagggcgcgaccaatcttaatgtaatagcccaggtaaatgatatatcaagaaagttctatatgaggattatatccttagaggaggccttttcacagctcaagcatcttaagaaatcccagtatccatggtggcttaaggatatatgcacagtctttgttgtagctttctttgcagggatgtatggtggtgattttaaggatatggcagcaacggcaatagttggaatatttcttgcagcgtggcttcatatcggaaagaaaatcgcacttaatccacttataaatgatcttgtggcatcaatagtcatatcggttatagctttcgttatggtgcacgttggaataggttcgcatatcgacaggataatcataggctcgattatggtgcttgtacctggtgcagccataaccaatgccatacgagatacgcttcatggggattacgcttcaggtaatgcaaatatactgcaggcgtttacagaggcggcgatgattgcccttggagtatacgtgggattattattattgtagcctgtcaatgtgatttaaagaatggagaattatgctattacaaagtatatttgcttttggtgcaataataggcttttcagttcttattgaagcaccgaaaagatgtctggttgttaatggaatattagggatggcaggatgggctgtatatctttatacggaaaggtatacatctatgcttatggctacttttgtgtcaggactggtgctggcagtcatatcgcatattcttgcaagacttattaagacaccggtaacaacaacgcttattccgtctatacttacgattgtgccgggagcgggcatgtatgagacagtttattacctgtttacagcagatacacaggaggcactattaagtcttgtgcataccatcggggcagcaggagcgattgctcttgctatattcatagttgatgcatttgtggcagttgttaagaggctggtgtgaaagccggctcttaagcatgttagcagatatgaataaaaaagagaaaagctatagtgcaagactaccatagctagagtcttaaaagctgtattatatatgtaaagtattcttttggaaaataaacgatttttttggtttgttgcaatataaacaattttgtgatatctttaacaaaagctttttgaagaaggattgtaagggctggagaatatcggaatttgtctggcctttttataatgtgattcggaaaaagtttattattacaatataatttaaaaacaaaagaaagggaaactatatggaaaagttaagaaattggatagctaatttaagagttgcagcaaaattaaaggtatatcggatggcagtgcttgttatgacagctttttttgtaatggttgcgcttatatcaacattagtgattcgttcgaatatacatagtattacggaagtgtggtctccttcacttgagtgtctgcaggaattacaaacaataactgctaaatatagaatcaaacagtatcagcatcttgtagaaaccgatacagcagttatggcagcctgtgaaaaagaaactaatgatatggagaatcagataaaggatatatcttctaagttagagacaataattaattcaaataagaaagcacaggcaggtaaagctgattatgaaaaggcaaactctgcatgggaggattacaggtcagcctcagataaaatatataagcttagtaaagaaggcaaacaggctgatgctgccaatcttatgactggaagcgtgtatgaaagtaataaggaatttgtagaaaagttaaattcagtacgcgatgattttcaggcggaattagataaggcaaaagtaattgctaatatatgtacaataattatttttattgtcattattataacaggattagcgattgcagtgattgcaacaattataggaaagataatatcagactcaattacagaaccagtacgtcagattgatgaggcagttgccagccttagaaagggtgagctgtctaacgtggatatgcttacatatgaatctgatgatgagtttggtgaaacaattacaaagcttaaggaagctatgaatatactttcagattatgtaagcgagatttcacaggaggttaaattcatagcacagggtgatttaacaagaaatggtgatgatattacaccatttctgggtgatttttcagaattaaaggattcacttgtttacattttaaagcgttttaacagtacattgtcagaaataagcaatattgcagaacaggttacacataatgccaaggaagtagaaagtgcatcaaagtcgttagcagatggtgcaacagagcaggcaggagttattcaggaacttaatgccacaatagatacagttgttgatcttgcagaggatacagcaagtgaaacaaagaatgcatctgaacgtgtaaaggcttctgcaaacaaagcaaacgatgaaaaagaaaaaatgaatattcttctgacagaaatggagcacattacagaaatatctaaggaaataggtaatattattactgatattgaagatattgcttcgcagactaatctgttagctcttaatgcatctattgaggctgcaagggcaggtgaggcaggaaaaggctttgcagtagttgcagaccagataggaaagcttgcatcagatagtgctaagtcagcggtaaatacaagagaattaatcgataagactttagttgaaatccagaagggtaatgaaattacaagaacaacagcagatgcctttaaccagattattgcagatatggattcattcgcagaaatggcacagaatactatggagaaggcaaatacacaggcagagtcattagaacagattggacagggtattgaacagctttcaggtgtagtacagggtactgcagcatcctcagaagagaatacagcaatcagtattaacctcgcagagggtgcagataagatgaatgaacgtgtaaacagatttaagctctttaaagattaaaagtttatcataaagctattatgaaggaaaggttcttgttgtgagtgagaatatatttaaagtatttggtaagcagacaaaagaaactttattggaaataatcgcaaaatgtatggatgattatctgtttgtatatgatctgcagaatgatacaatagagctgtctgagtcggctgtggacaggtttatgatatcagaaaatgtcatgaatgatgttgccaatgatgttttacaggtagtatatgaagaagaccgtaagatgctgcaggagcatcttacggctatatatgaagggaaagaaaaagcacataatctgcattacagatggctggataaagaaggcatgccggtatgggttaactgtcgtggaatagtgattgacgattcacaggggaaaccgcaatacctggttggctgcatgaatgagacaggaaatcagagaagggcagataatgtcaccgggttgcttggaggacttgaatttaacgcctatatgcgctctcatatgaaacacatatctaagggctttcttatgcatataggaatcgatgattttggagcaatcaacagttcgcgcggagcggcttatggcaattatattctgaaaagtgtagctgactgcatgaaggaatgtctttctgatagtcagaggatatatcatcttgtagctgaccagtatgtgattgttgatctggaacattctgctggggaatatgccgcagagcttaagaaaaaaatagatgacagactttataggtttatagtatctgaaaactatgaggctgttttttcaatttctgttggtgttgtggatgccacaacagtttgtgaaggctacgatgagtgccgtaagaaattttcatttgtccttaaaaaagccaaaaaaatgggaaaaaatggattctatatctttgatgagaatgactatgaactttttttacggaaaggaagaatagtagcagcactccgtaattctgtcatgaacggatttaagggctttgatgtgcattaccagccaatcgtggattgtggtttagagcaggttattggtgcagaggcgcttatgcgcttctctatgatatccggagaagatacagaggttatttcacctatggaattcatcccattactggaggaaaccggattaattatcccggcaggaagatatatattagatgaagcagcaaagctgtgttgtgaaatacagcaatatattcctgatttcaggatgaatataaatgtttcatatgtccagatcatgcacggaaacgttgagcgtgatatattggatgtgattaaaaggtatgctttaaaaccggattccatatatattgaaatgaccgaaagtggatttatggatatgacaccgatgttttgtaagttcaggaaggcattggatgagaaccatatcagctttgtgatcgatgattttggtacaggatattctaattttcattgcattcgtgatatgaatccaagctatgtaaaaatggacaaggattttaccgcaaaggcaatggataatgaaagggattatgaattgtataaaaatataattccgatggtacatagcattaacgtcaggatatgtgcagaaggtattgaaaaaaaagaatggtgccagaaaatgaatgaaatgcaggttgattatctgcagggctattattacggcaggccatgcgcaagggaacagtttattaaacaatatacatgtggtatggatatcatatagtaaaaatatcaaatagcaaaaatatcagatagcagctaggggcatctcactaataattagtgcggtgcctatttttttatgctaaggtgaagactttattcttaatgtgtcttgatttatttccagaaatttattcctgaaaatttaggttatgctgattaattataaaaataagttgacacatcataacaatgatgataatatgcaaaatgcaaacgatttgcaaattagatcaaagctgcaaatctgttataataagtcttttatgaaaggacatgtcatgcaaaaaagttataaaacaaaggtaacccaggagatacagcagtatcttaagctgcagaagcagaaaagctttagcgcttcggatgtatatcactatcttgagagcaataacatagatgttaaccagtcaactgtatacagaacacttgacaggatgatggagcagaatatccttgtgcgttttaaaactgcaaacagtggtaactattactacagggtatcggacgaacatcataactgtgatgaacatcttcatatgcagtgcaggaaatgtggcagggttatgcatcttgactgcgattttatgaatgatataagagaacttcttatgaagcagtatggattcacacttgaatgtaatggttcaacgctgtgtggcttatgtgctgattgtaaaaaaacagaataaagagttgtaaataaatctataaaaaaattagaatgaaaggattttatatgggatttttaaagaaaaggttatcgttaataaagctgcaatcattgatgttatgtgtaatactggcagcttcattgtttacatttactggctgccagggaaatgtacagaataatggaaagattaatatagtatgtacaacttatcctcagtataactggatacagaatattattggggaagaatcagaagaattcaacctgaccctgcttgtggatggtggagcagatcttcacagctatcagccatcagcaaaagatatggcaaagatatcctcagcagatatgtttgtttatgttggtggttcatctgatgcatgggtgtttgatgctgtaagggaaacagttaacaagaacatgaaaaaagtaaatatgatggagcttcttggtgacagagccaaagaggaagaggttgttgaaggaatgcaggatgatgaacatggacatagccacacagcttctgaggatagtcatggagagcatgaagaaacagatgaaatagaatatgatgagcatatatggctgtcggtaaagaatgcagagattcttgtacagaagcttacggatgttataaaggggctggatacagataatgcagaagaataccagagtaatgcagatgcatatataaaacagctttcagatcttgataaagaatatgagtcagttataagtgctgcaagacttaagacagtagtatttggtgacagatttcctttcagatatcttgtggatgattataatcttgattattatgcagcatttgcaggatgtagtgcagagacagaggcgagctttaaaactgtaacatttcttgcgggcaaggttgatgagacaggaactaaagcgattcttactatagatggttcagatgaaaagcttgctatgactataaaagataacacaaaggataagaatcaggaaatattgcagatggattcaatgcagtcagttaagatatcagaatcagaggattataactatattaatgtgatgctaaagaatcttacggtattaaaacaggcattatcataattaacatgtaagtatatgatgtaagtgtcaaaagtataaaaattcacttttgacactcacatcattatattgcctgttataagaaaaaagaaaggggtgacacctgtatgtcatatatcgaatgtaacaatcttgctttaggatatgatggaaaggcagtagtagaaaatctgaattttaaagtgggaaaaggcgattacctgtgtgtattaggagaaaatggtgccggtaagagtacacttataaaaacaatgcttggccttatagataaagtatctggtgatattacatattcggatggacttaaggcttatgagattggatatcttccacagcagactgttgtgcagaaagattttccagcaacagtctgggaggttgtactttcaggcactcttgcttcaggcggattcaggcctttttatagaaagaaggaaaaagaacttgcaaggcagaagatggaagagcttgatatatgggaacttaggaaaaagtgttaccgtaacctttctggtggacagcagcaaagagtacttcttgcaagggcactgtgtgccacatccaaggttatacttttagatgaaccagttacaggacttgatcctaaggtgacagcagatttttatgagcttttaaagaagcttaataataaaggaataactgtaattatggtttcgcatgaccttcatgcggtgtcatatgctacgcatattctatatgtagatagtgaggacagtttctatggaacgaagaaagagttcttaaacagcgataaggcggatgttttaggaaagattaaaggagatgataagtaatgtcagattttattcaggaatttcagttttatatgtcatatccatttgtcagatatgcacttattgttggcgtgcttatcgctttatgttcatcacttcttggcgttacacttgtgcttaagagattctcattcataggtgatggcctttcacatgtggcgtttggtgcacttgcgatagcgacagttcttaagatagcagatgttaatctgtttattatgccagtgactatcatatgtgctgttcttctgctgaaaacaggaaacaacacccagattaaaggggattctgctatagcgatgctatcagttggagctatggctgttggatatcttatattaaatgttttttcagtttcatctaatgtatcaggagatgtctgctctactctttttggctcaacctccatacttacgcttacgggttcagaggttgttatgtgtatagcagcttctataatagtagtagcattttttgttatattttataacagaatattttctgttacatttgatgaggatttcacccgttctatggggaaaaatacaggcttttataatatggtgattgcagttataacagcagttattattgttcttgcgatgaatcttgtaggctctcttcttataacagcattgcttgtatttcctgcattatcggccatgcgtatcatgaaaagctttaagcttgtaataatatatgctgctgtattgtcggtacttggtgctgtacttggtattgtaatatcaatatttgcatcaacaccggttggtgctacgatagttacaatatatatactaatatatctgattaattgtgttatatcaagaatatcgggaatagcacagtaatgttcaaggtttatccctttattttaaaattttaattcaaattataataaaatatgctatacttactatcgtgggatgataatcccacgatattcatatacagatgagaatagttttgaaatataataataagggatatgttaaagtatgaaggataaaaagaattacaaggttaaaccactggttttcataatagcaggtatagctgttttagttctcatagcagcagctataaccgctggtgttatatcagagcataataaaagtaaagaaaatacagttggaatgactcttacacagaaaaatctaagaccacaggatgcagaagctgataataatgaagttaaagagataacaacagtagagatacttatggatgatactgctataccagttggaactacatttatggcagcagctatagtagaaccagcagatacagataaggcgcttatatggacaagcagtaacgacgatgtgatgactgttaaacaggatggacttgtaactgtcaaaggaacaggtacagcagcgcttactgctacagttggtgatgtatcagatgccatagctatagaaggaatagagagtgcagcagcaggctctaagaatggttatactgtatatacaggtaatggaagtattcttaagtcatcatcttctgtaccggcaggaagcagtgcaggctctggttctggtacaggaagtagttacaatgataatggcagctattcatacaacggtacaggaaacaacagcggatattcagccggtacaggaagtagtcatgaaaacagtaacagtacaggaaacaacttatcaggtacagacagcaataataatacaggaaacaatggaaacagttcatacaatccaggaaataatcaatcaggttcgtcaaacagcggtaatagtcagggaaataacaacagcacaggaagtgacggaaaaacaagcagtgatataggtgaggtgttaaacaaagaaggctttacacaggaatattccaatgtatatgtatacacagatggtggtacatattatggggagataataacacagccagatgtttcaatcatatatatcaagcagagaaatgaaggattcgatgcaagaataaaaggtgtgttagcacagctgcttccggaaagctgcaatcaggtatggaataattatgtatctgcaacaacggaccgtacatttactgtagaagacagaaaagtaagaatagtcacagcttcaagaggtggacattcgcaaatagtaatatacaattaagataaaatatggtatatttatgtaaaacttatgtagattataatgaggtgaatgttttgcttaatgaaaataaggttaaaatgatgaccaagatggctatatatgagaaaaatgaaggcagaaggatgttaaggacagccagatacttcaagggtgattatgtcgcatttgggatattaaagacattgatcactacaacacttgcctttgcgatagttgctattatgtatgtattatgcaacgcagaaggattagtcgagaatattaattcaatggattatcttgcttttggaaaaaaggtggcaatatactatataattatgcttgttatatttgctataacagcaggatttgtatacagctttcagtatgagaattcaagaaaagggcttaaaaagtatttttcaaggcttaataagcttgaaagattttataatggccagaagaaaaaaagataattgtggaggaagtgatggcagtattattagaatttaaagaaaagtttagaagattttataataagtatgatacatatcttgttcctgcgttaaagtttattgtagcgcttgtttcattcattatgctgaatgcaagcataggatatatggagaagctgaataatccggttattgcaatacttatatcggttatatgtgcatttttaccggttggttttactattgttatgttatcattgtttatggtagcacatctgtatgccatatcagttgaattcgcacttatagcactttgtgttgttctccttatgtatcttttatatttcaggtttgcatctaagtcaggatatcttctgatattaactgtgtttatgtgttggattaagatgccttttgtattacctgttgctgttggattgtgttcatctgtgatttcagttgttccggtatcttttggtgtgatcatatactatataatcaatacagcaagtgtttatgaaacagcagttactaacaagtcacttacagagagtatgcttcaggtttcatatcttatagaaagtcttgttaagaataaacagctttttcttgttatggctgctttagcagtaacgattattattgtatatatagtaagaaggcttaagatcgattatgcatggggctatgctatagcaatcggaagtgtagctcagtttgtagttgttgtattaggagaaatacttttaaaaacagggcttaatattatactgatagttatcagtgttatattaggtgcgcttgcaggttatatatgtaatatattattctttgctgtagatttcagaagaacagagtatgtacagtacgaagatgatgaatactattactatgttaaggcagtacctaagataaatgttgccggagaggatgtaagggtaaagcagataaatgcaagaaagacaaaaaaagcctcagatataagtgatgtaagacagtcaaagtctacaacagcagcaactgaggaagaagatgatatatactttattgacaggtaatcagtaagtggcagaatatttttgacatttacatcagtaagtgacagaatatttttaagccttacatcttaatataaaaaggggtgagaacgtgacaacatcgggtaatctgttacagaattacttttcaaaattatatataccaaggattacatggacagatgttatagagattattattattgcagtagttttatataatattctgttgtggattatgaacaccaaggcatgggcacttttaaagggcataatagttgtggctctttttgcggttgtagcgtatcttctcaaccttaaaactattttatggatagcaggaaagacaatcagtgtcggtattatagcattggttattatattccagccagaattaaggcgtgcacttgaacagcttggacgaaaacgctttatgctcaggttctttaactttggagataacagtgataaagatgaacgcttcagtgttaagacagcagatgagatcgtagatgcctgttataagatgggagctgtaaagacaggtgcacttatagttatagagcaggatattgtgcttgaagagtatataaagactggtatacctgtagatggtatagtgacaagccagcttcttattaatatatttgaacataatacgccacttcatgatggagctgttataatcagagggaacagggttgttgctgcaacatgttatcttccactcacagataatgttaatcttagcaaagcacttggaacaagacacagggcaggtgttggtataagtgaggcaacagatagccttaccattatagtatcagaagagactggtaaggtatctgtagcatttggtggagaacttatacatgatatagattctgattcactgaagaataaacttgaatatatcagaagaagaactatagatgtcaagtcatttaagatatggaggggcaggttgaagcatgaaagagaagatatttaataatctcagcctgaaaatcgtatctgcagtatttgcggtgatattatggacggtcattgttaatatatatgatccaaacactagctatactttcagtaatatcacagtccagctggttaatacacagagtcttactgaaaagaattatacctttgaggttgttgatggaggtaagatatctgttacagtaagtggaccaaaaagtgtggttacagatcttaagacaagtgatatagctgcaacagctgatttaagtaaggttactgcatttacagattatgtagatatacaggttcaggtggtcaaagatggacaggtgcttaataacgttgaagctgttccaagaacatcagctcttaagttaagcatagaaaacagggatacaaacacatacgctgtgaatgttaatacaacaggcactccggcaaatggatatgctgttgcatcaacaacaacatcaccaacatatattaaagtgacaggtccaacatctttagttgaaggggttgcctcagtcggagttgatgttgatgtatctggtgcaaaaggaacggttaatacacagtcagacattaatatgtatgattcagatggaaatataatagcaaatgaagaacttgaaatgtcatcagaaacagcagatgtgatagtagagatggcaagaacaaaaactgtaccagttgtagtaaaaacaagtggaacaccttcacaggattgtgttgtaacgggtacaagtcttagccagacctcggttgttataagcggacagcaggaggcattatcaaagatagataatataactattccttcatcagctgtttcggtagatgggcttagcgaagataagacgtatacattcaagctgacagactatgtaccttctggtgttaagatagtttctgattcaagactgcaggttactataaagatatctaaagcttcaacaaagacagttcacatatcatcagatgcgataaagattgaaaacgtatcatcagggtataatgctgtgattgaaggaacaggtatagatgttataatatccggaacaggaacgatgttagaaaatatcagtgctacagatataacatgcaatgttaatgcagctggactatcagccggaacacatagtgtagatgtaagtgtgagtgtgccagatggctgcagtgttttagaaagcagctcagtgaagcttacgttgtcttctaaacagcaggaaacaacagttgacaatagcagcagccagacacaacagacaactacaagatagtacacatatataagtttaattaaatgcgtaaagatatgcatagaaatgaggattgttatggtaagtgagaatattttaataaccagtcagctaggaatacatcttcgcccagccggagcaatgtgtaatgaagctgttaagtataagtctgatatatcttttaagtatggtgagggtaagacagctaatgcaaaaagtgttatttcaatacttgcatcaggtgtcaaatgtggtgaagagataacacttacagccgatggaagtgatgaagaggaagcgcttaaggctgtatcagaaagttttaaggaatcacttaaagaataaatgatagttcagattttcttaacaagtaaaacacaatatgaacacatttcgtgaatatactaaacgtatgaaaacgaaatgtgttcattttatatttcatatacaggtaaaatatatatgaccacattttctatagaaaactacaaaaaggagtgttggatatgtataataatgaagaaaacaattatgagaataataattcttataatactcagggtacaggcaataacgaaaatacaggtaataacgaaaatacaggatataaccagaactcaggctatagccagaatacagacggatataatcaaggtgctggaagcagtcagaatactggaagcagtcagaatactgaatttaatcagaataatggattcaatcagaatactggatatgcacaatacagcaatacaaataatgcaaacaacacagatacagatagccagtcaacttacagatactcatatgtagctggtaatagtacaaacaacagccagacagcagatgagcatcagaagaaacagaagaagcataaccggtttttggatggacatagtgccacaaagactacatggcctaagaagtttttaagcatagttttatcagcagctatattcggtgttgttgccggttcagctatgtatggaacttataagcttgagaaaaagtatcttggtggttctgataacagaaactatacgatatcgactgtttcaagtaatataggaactacaacagaccagttaaataccttaggagataccaatctgtcaacatcagcaatgaatgtggaaagtgtagcatctgcggcacttccagccatggttgcactcaatggtacaacatcagtgacaagcagttcatcttcaatatttaactggggtggacagcagcagtatgaggcatcaacaagcggaacaggtattatagttggtaagaatgatacagagctccttatggtaactaatgcgcatgttgttgacaaagtttccaatcttaaatgtgtatttatagacaatcagtcagtaaatgcaacagtaaaggggtctaaatctgatcaggatatagcagtagttgcagtgtctttatcagatataccttctgacacacttagtaaaatagctattgcagaacttgcagattctgatacaattacaataggtcagcaggttgttgctataggtaacgcacttggtgaaggacagtcagttacaacaggtattataagtgcattagacagatctatcacagttaacaatgtaacattttcaggtcttattatgacagatgcagctattaattctggtaacagtggtggagcacttcttaacgcaagtggtaaggttatagcaattaattttgccaagacatcaagtgatggtgtcgaaggcatggcatattcaataccagtatcaaacgtaaaggatcttataagttcacttatgagcaaacagacaagacagaaggtatcatcagataatgcaggatatcttggagtcgcagcaatagatgttacaagcacatatgcatctatgtatggatacccacagggtattatgataagaacagttgcatcaggttcagcagcagagaaggcaggactttcagcttatgatattatagtaggctttgatgaccagactataactactatgtcaggtctgcagtcaacactgcagtactatgcagctggcgaaaaagtaaagattgattactatcatcttgagggtagtgaatatgtactaaagagcacagaggttacattaggtaagaaaagctgataactcctctgatgcggaatagaggaatatatgagtgataataataataacgatgaatatgaaaaagtatgctatgtatgcagaaggacagaatctaaagcaggcaagatgataagcatgccaggtggattatatgtctgccctgattgcatgcaaaagacctttgatgcaataaacaacaatgacatagattataacgagcttatgaaaggaatcccaaacatgcctaacatggggatgtttggtggtttcaatatgatgggaaataatatgtcagataagcagaaggttaagaaaaagaaggaggaaagcaaagaaaataataaagataagaaagaagaaaagcttgatcttaaaaagcttcctgcaccacatgaaatcaagcgtatgcttgatgagtatgttataggacaggagcatgccaagaaggtcatgtcagttgctgtatacaatcattataagcgtgtagcaacaaataccatggatgacatagagatagaaaagtccaacatgcttatgataggacctacaggtagtggtaagacgtatcttgtaaagacacttgcaagactccttcaggtgccacttgctattactgatgctacttctcttacagaagcaggatatataggtgatgatatagaaagcgtggtatcgaagcttctagctgcggcagataatgacgttgaaaaggctgaaagaggcattatctttatagatgagattgataagatagccaagaagaaggaaacaagaagcagggatgtaagtggagaatcagtacagcagggaatgcttaagctcttagagggaagcgatgtggaggttccagtaggtgcaacaagcaagaatgccatggttccacaggttactgttaatacaagaaatatattgtttatatgtggaggagcttttccggagcttgaaagcataataaaggcaaggcttaataaacagtcatccataggctttaatgcagaccttaaggataagtatgataatgacagcaacatattatcaaaggttgagttagaggatttaagagagtttggaatgataccagaatttttaggaagacttcctatcgtattctcgcttgatggacttacagaggatatgcttgtaaagattatgaaagagcctaagaatgccatacttaagcagtatcagaagcttcttgagcttgatgaggtaagtcttgagtttgatgatagcgcactttcagctatcgctaagaaagcgatggagaagaaaacaggagcaagagccctgcgttcaatcattgaagagtatatgctggatataatgtatgagatacctaaggatgataatataggttctgtgcttataacagaggattatattaacaacaagggtgtacctgttataatgatgcgtggacaggaagcacttccaggtatgtaatcatatcttattattattaaacatataatgtccttgaagaatatctttaaggacattatttttatatgtcagagtgtagtaagatgattatggatgaagatatctatgattacatagttgtcaatattccgatagtcagtaaaatatttgaaaacaatcctgatgtatgcatccagcaggttgatgaacagtggattataatgcatagcaggctgccagaaaacagggagttaaatataagctctttaggatactatacaatacctaagatatatggacttatggagctgtctgacagacaggctgttttaggtgctgatatatcaagtatggaagaaactggtgcagttaatataacaagccagccttttcttaatgcaagaggccagggtgttatcataggctttattgatacaggaatagattacttaagaaataactttaaggacagctctggcaatacaagaatactggctatatgggaccagacagtcgaatatgaggcttcaagtcttgtaagctatggaagagtgtatgaagccgatgctataaatactgccatacgggcttatgaagccggagaagatccatatagccacgtcaaaagccaggatattaacggacatggtacttttatggcggggatagcagcttcatcatatactgacggctatataggtgttgcaccagaggcagatatagtatgtgttaagcttaaaggtgccaaaagatatttaagggattatttttatataaaagatgatgtgccagcttttcaggaaagcgatataatgcttgcagcaacatttctaaaggattatgcacagagaagaaataagccgcttgttataatatcaggtgttgggagcggttctggttcaagaacaggagcaacaccacttgcagatgtttttgatgcatatacaaagcttacgaatacatgcgttgttgttccagcaggaaatgaggctgtaagcagaacacattttagtggttatgcaggtatagcagcagatagcaaatctatggagattaatgtagataaaagaggaaagggttttgttatagaaatatgggcaaaaagcctggatgttctttctgtatccatagtctcgccaacgggcgagattataccccgtataccagcaagaatagggatgagcagtgaatatgcctttttacttgagaattcaagaatatatgttgattatcagataacagaaagtgttgcagggcaggaaataatatttatgagatttgaaagtcctgcggagggagtatggaaagtacttatttatagtcttaccagcctgccaggatattttaatgcgtggataacgcctaggtttcttagtgcctcagatgcgtattttcttgaatctgatgttgatataacattagtagagccagcctgtgctgcaagggtaataacagttggagcatataatcataatactggtggaagtgatataaacagcagcaggggatatacagctgataacagggtaaaaccagatatagtggcaccgggtgtcgatgtatatggtgttggaggcgtaaaaggctataaaagaatgtcgggaacaagtatagcagccgcacatgcagcaggagcggccgcactgtttttaagctggggtgtgactaataaaaacagggaggtaatcggaaatacggagattaaatcatacctgataagaggcgctaaaaggcagaacagtgagcaatatccaaatgtaacagctggttatggtatgcttgacatatcaggtgcttttgaccagatgagaattaattaataagttgtaattcatacatttatatgttaaagtttctattggtaaaaatataaagacagtatgatggagaagttatgaagtacaaagcaatagcacttgatcttgatggaacacttacagatcataataaaaaattacctgctaagaatatagaagcagtagataaagctatagatattggtgtaaaggttatacttgcatctggaagaccgctttttgggataacacctatagcagatgaattaaagctttctgataaaggaggatatatacttgcatataatggtggaaagatagtggactgtgtgacaggagagactatagtaagccatcaactgccaaaagagtgtatagatgatatatgtgattttgcgaaagctaacgacgtatatgcattaacttattcagatggaaagattgtatcagagagtgatacagacgaatatgttttaaaggaagcattctgtaatgccgctgcaatcataaaaacagataacctgaaggcttatgtaaactatcctgtatctaagtttctagtagttggaaaacacgagaagcttattcctgtacaggaggcattgctttcaaaatatcatggagtgatagatgccttctattcagaggattattttcttgaagttgttccatatggtgtggctaaggataattcgctgaaggagctgcttgcaaagcttgatataacagaagctgagcttatagcatgtggagatggcatgaacgatataccgatgttaaagatagctggcttatcagctgttatggaaaatgcatatcctgaggtaaaaaaatatgcagactatattgcaccttctaatgatgatgcaggagtggccgatataataaaaagatatatattagatatggagaatgcagcaaatgggtaaagataatgttcagaatgatgaagttgagattgatataggacatatattatcaatattatgggaaaagatattggtgattattgcaacaggtattatagtcggacttgcaggttttcttgtttctaagtttcttataacacctaagtatgaatcagaaactaagctatatgtccttaacagagcaaacgacagtgcaactacattgtcggatgtacagctttcaacacagcttacaaaagattatcagatacttgttacaagcgcaccagttatgaatcaggttattaaagaacttgggcttaacatgaaagcctctgagctggcgtcaactatatctgtggatacaccatcagataccagagtacttcagataacagtcacaagtaatgatcctaaaagagcaaaggatatagctgataaggtggcgcaggtttcatcaaagaagatatgcgatatcatgaagatagagcaggttaatgttatcgaagaaggttcactgtcagaagaaccggcagttgatacagtacagaaatggacacttataggtttagcgttaggtatagtgttatcatgtgccgttataataatcaggtcaatgttagatgatacggttaaaactactgaagatgttgagaagtattttgatcttagcacacttgcagttattcctatatcagaagagatggatgatggtctgggaaagaataaaaagtctagaaagacaaagaagaaaagaagcaagtaaacaggagtgtaaaagatatgcagacgattaacatagaacgcttaagaaagcttgattacagagctaacgaagcatataagaacttaagaactaacatacagctatgcggctctgatgtaaaagttatcatgcttacaagcacaacaccgggtgaaggcaagtcaacagtgtcctttaacctggcagtatctttggcagaagcaggcaagaaggttatattcatagatgcagatttaagaaaatctgtacttgttggacgatataagattaatacatctgttaaggggcttactcactttttatcaggaataaacaagtttgaggaagttatgtatgcaacgaatgttgagaactttaatgtggtattctcaggacctgtgccaccgaatcctacagagcttcttggtaacaaggtgttcaagacacttataaaggtcttaagagatctgtatgattacataataatagatacacctccaatcggaagtgttatagacagtgcaatcgttgcacaggaatgtgatggtgttgcatatgttatggcatctaacagtgtcagctataaatatgcacagaaagggcttgagcagataaaaaagacagactgcaagttacttggagttgttcttaacaaggttgatatggatgataataagtactatggcaagtactatggtaagtattatggtaagtatggcgaacatgcccaaaagtaataaaaataaaaaagtggcagctgtgatatgtcttgtatgatacatatcacagctgccacttttttgttataaattaattataaaagaaaaatcttaaggagcagtacgctcaacatcgcttatattaccagcttcagcctttggagcctcagcagcggcagcagtagttgtagcggcagttgcttctgttgttttctgtgttggagcctcagtagcaacggtaggttttacgggagcaggttctgttgcctttgtagttgttatttcttcctctgtggcagcagtagttgtaatgcttcgtcttgtcgtagcaggctgtgtttctttaacagcagaagtagtttttgtagtattgctgctgttgttagagctgctgttagaagaaataccatttagcttataaaaagaattatagtttggtatattctttacctcagcttcatagtattcatctacattgaatacatctccattctcaatcttatctataagcttctttgccatctctacatcaccagtatatagctttgacatagaagcattagttcctaactgtaagctaggaagtgaatcaggttcagctcctatactgaacttctgtacattccattctcttgtatctgcaagctgtccttttacaagggcggttatatcagatgtaggcatacttgtaagaatcatgttacctacagaatcaagtatagagctgtacttagtaagaatagcaggtgaagtaagcttatttataaccgctgtaagagcagataactggttacggcctctctggtaatcaccatcaaggaaagcctttctttcacggcagaaggcaagagtctgttcaccattacattcgttatcaccgacaacgaagtgatatgtttcaggagcagcttcccatccgttctcaaaatcaacatcagagttgatagttacaccgccaagtgcattaactacagctacacagccagtaaagttaaccttgacactgtagtctatattacattcgtaaagtctgttaagagttgcaatagaataatctattccccagttgccggcatgggtaagcttatccatacccttccagcctttttcagtattttccatatatacataagcatctcttggtgttgttataagaagtatctgtcttgaaacaggattaacaacacataacacgtttacatcacttcgtcctgtagtcttaatctctccttcttcatcgtttcctgatatatatataatgaaaggttcttcatttactttcttgtcagaagcgctgagttcaatctttcttgtgagctttatcgtaccaataatctttatagaatcttttaaatcatcgttttcttcatataacatctgcagggaatcatcattgataataacagcctgtatatcagtaccgctgttaagtgcatcaaacatatcaagccatacctgatattctttagttttgatagcagcagtattatcgtaattaatcctctttatagcatctttgttgtcatctgaattggcagttgagttatatccaaaggtgtaacctatggcatcttttatggaagctgctttatcattctttaaaacaacaacatcaacaatatctgtagttgttttaacattacttattttgttgagtgtttcatcaacctttgaagtaaataaaaatgtatataataagacaccagataacaacaccgcaagtatcttacctatgatatgtgttttagtaaactgtgaagcaaagttatatattgctataataacaagtatgatatctaagatgattgcatacttaagtggaagtatatccagcttgtatagctttaataatgtaagaacagtaaacacaagctgtacgatcaccagtacaattcctataacagtagaccaggctcttagcttacgtttcttttcaccttctgtaaggtcagttcccttcttgaagagataatgcatatccccttttaccctgtcaataattcctgacataaaactcgacataaaacctcctgaaatccacgaagtatattcgatatgtgtatacatatcgttactcttaacatagcagtaagagagtatcttcgatagtattttgtcaaatgtaacaattgtgttaaaaaagtatgaaaaaagaatgacatacaaaatataatataccatatataagaaaaaaaataaataaaatagctataaaaaaagtgtgtaaaatgtattattttctgaatgagccttaatgatggattaatgattaaactatataagcaaaatgaataattattaacttaaaaatgcttaataatgtaaagataaaataagtgaaaattaatgattagcctaatttaacttaataatattcaaaaatgttctattttattatgtcaaacatataaaaaacttgcaaaaattaagttgaatttatataatattatttgggtaacgtactaaagcgtacgaatattaattaaaaggagttatacggttatgggatatgttgatgaagtattagaattagtttctaagaaaaatgcagatcagccagaatttttacaggctgtaacagaggttcttgagtctttaagaccagtcgttgaggctaacgaggaagtttacagaaagaacgctgttcttgaaagaattacagagccagatcgtcagatcatgttcagagttccttgggtagatgacaagggacaggtacaggtaaacagaggtttccgtgtacagttcaataatgctattggaccatacaagggtggtttaagattacatccttcagtaaacttaggcatcatcaagttcttaggtttcgaacaggtattcaagaactcactcacaactcttccaatcggtggtggcaagggtggttctgattttgatcctaagggcaagtcagacagagaaatcatggcattctgccagagctttatgacagaactttacaaatatatcggcgctgatgtcgatgttccagctggagatatcggaacaggcgcaagagagattggtttcatgttcggtcagtacaagagaatccgtggtacatttgaaggcgtacttacaggtaagggacttacatatggtggatcacttgcaagaacagaagctacaggatatggtttattataccttactaatgctttatggaaagacaatggaatgtcacttgagggcaagacagcagctgtatctggttcaggtaatgttgctatctatgctatccagaaggcacagcagttaggtgttaaggttgttacatgctcagactcaacaggctggatttatgatccagaaggaattgatgttgcacttcttaaggaagttaaggaagttaagagagcacgtcttacagaatatgctgctgctaagccatcagctcagtactttgctaagcagaatggtgagcacggagtatggcagtacaaggtagaccttgctcttccatgcgctacacagaatgagttagacatcgaggatgctaagatgctcgttgctaatggtgttgtatctgtaacagagggtgctaacatgcctacaacattagaagctactaagtaccttcaggagaatggagttctcttcgtaggtggtaaggctgctaacgctggtggtgttgctacatctgctcttgagatgagccagaactcagagagactttcatggacattcgaagaagttgatggaaagcttaagggaatcatggaaacaatctacgctaacatttcagatgctgctaagagatatgacatgacagttggtggaaagacagactatgtagctggtgctaatatcgctggtttcgagaaggttgttaatgcaatgcttgctcagggcgtttgctaattaccccataactaatttaatcaatataaataaacagagctgctaagccgtatggctggcagctctttttgaaattttaaagaatgtcacataaaaaactatagactttttgaccttttgtttattacatcatataataaaagaacatatataagatatagaagatattttgtgcagttacagttcctgtaaattaaaaaacataagggggcatttatgacagatatattcactctaattaaccagctgtcagatgatgatataaggcttcagcttgccttttttgacagcgttacgcttatgagtgctgcaaaggaaacaggctcaagactgttatctggaatggcagaggctgcaagttcattggcgcagatatttacagataagttaaagatgggttatgactataaaaaagtatcagatatggttgaaggaaggctgactgagcttaagcccgtaaaaagagaacagcttcttaagcttatggatattaaacttatggagcttgtatcattatcacagcagatagatataaatacgcaggaaggcagagagaagctttcaatacttgttatagatacagcaggtagtggatattctataagccagtatatggcaccagcacataaaatgcgtattataactgataagtataatgaggcatttatggataatcttatgcagagtcttaagaatatgacacctgaccagcttaaggagtggtcgccgattatggataaggctataggtatggctgatatagaaactaaaagagtggtacataaggagcttatgccggatgcgtttaatggcatgggagtgcttaagtgcttaagaaaacagaagtcacctacgaagctgaagcttgtaatagactgctttggaatagaagcctttgattataagtctgttgagataaagacaatgtatcaggctttaagacattttaacagaatatcagtattccagcttgcaaggcttataagtgttgcggttaagaagtatgacagacctttatatgcagcagatgagcttatgccatcatatgttgctgatagtgacagagtaaaggcagacaatgatgagaaggaatatcgggcacttgcaaagcagataagcgggcttgacgaaaaaaaggcaaggtgtataaaggagcttgagactaaaaagaagcagttagaggaagctgataagcgtgcagatgctgcatctgagaattatacaaaagtttcacttgagtttagtgagcttgaactaaagaaagatgaatatataaatggtggacacacagaagccgaaactaaaagttattatgccagggttaatgatgtaaaacgccagttagacaggggattagaggatagtgagctaaagaaaagaaagaaagatgaattaagtaatcaggtcattatagcacaggatagattagagttacaggaaaaggaagggcaggagctcagggcagaatataagacacagacagatataaggaagaataacttaaaaagactgtggaatgcatattattataagtttcattttggtgatagactgtttttgcatgttgcgatgaactatacaagaagccagatagttacaatagaagctatgttaaaagaagtacatgatagcagggactggaaggtatatttaaaagaggacaggttgtatgtgtatacaggagataaaaaaccgctgataataaaatgcagcgaagatatactagaggatgttatagagtgagatatttataataaaagactggataataaaagataattatgtgtaaaataaatatgttatgcgtaaaataaataagatacatctaaggtatgcaatatagtacagggaaggatacagaaggtaatacatcatggattataacgaaatatgcagatatcttgattctctgggccagtttaatgaaggaactggagttgaaaggggaagaaagctgcttaatataataggaaatcctgaaaaggaacttaaagtaatacatgtagcaggtactaacggcaagggctcagtatgctcttatatagaaagctgtttaaggaatgaaggatataaggtaggactttttacatctccacatcttaatactataagggaacgtatacagattaacagagaactcatatcagaagaggattttacacaatattttaataagatatatgctgctgcaggtaggaataatgcaggacttgcatattttgacttttttttcgggatagctatgttatatttcaaggagcagaatgtggactacgttgtcttagagacagggcttggtggaaaacttgatgctactaatgcagtagaaagacctatatgctctgtaataacagcaataggtcttgaacatacagcgattcttggcgatactctaaaaaaaatagcaggagaaaaggctggaatcataaaacaaggtgttccggtcgtgtatacagataatgaagctgtggttacaggtgttataaaacagaaggcggatatgatgaaaagtttttcatatggcgttaccccacagcagtatacaatagttaaaaacttaaatggttgtattgattttttaattgataatgagtattatagtaatgattgttttcatctggaaacgcctgccttgtatcaggttgagaatgcagccctggcacttactgtatgtgcagtgttaaaaagtacgtatggggtaaagctgcatgatgagaatatgaaaacagcacttgcttataacagctggcaggggcgtatggaaaaggtaactgataatatatatgtggatggtgcacataaccctcatggtataagaagatttgtccagtcagttgatgctatgtatgaatcatctggtaaaaaggcatcgcttcttttctcggttgtgagtgataagaactttgaggagatgatagggattttatgttcatctaaagcatttgacagaatagcagttactgttactggtggaaaaagacagcttgacaggcagtatataaaagaagcatttaacaggcatacagatatggatatagaagtatatgataatgcagcagctgcagtcaacgctcttaaagatgaggatatggtgttttgtgcaggttcactttatcttgttgcagatataaagagtgccatcataagccagtaaggtcttagcagtaacgtattattatggatattacacgaattcacagataggagaataaatatgttggattttgatgaagagattaaaaagtttcagcctagtcttgaggttgaagatgcagaagatgctatatacaataacgatgttcctgatattacagacttaataactaagattatcgatggaaagagtgagaaataattatgagatgttacaaatgcggcagcgttctgtcagcgaatgacatatgtcctaaatgccagacagacgtttctatatataagaaaacagctatggtctcagatatatactataacaagggactggaaaaggcgagagtaagagatctttctggtgctatagagacacttaaagtaagtcttatgataaacaagtataatatcaatgcaagaaaccttcttggtcttatatattgtgagatgggtgaagtggtagaagcactttcacagtgggtgatgagtaagaatcttgcacctgaggataatgttgctgatagttatatcagaaagatacagtctaaccagaataagttcgaggctgttacgaatgctattaagaagtttaatatatcccttaattatgccaaggataagaattatgacatggctgttatacagctgaaaaaaatagttgcagctaatccacattttgttaaggcacatcttcttttagcagttatatatattaaggataacgagtattcaagagctaaaaagcttcttaatgcagtactccatatagataaaaacaatacactggcatgtaagtacatggatgaaataaaccaggtacagacagctaaggacaatgatgcttctggaagcttcctgccaagaaaaaaggttaaggaagaggaaagtaagcctcttaacggtaatgatgttatacttccaaggtcatcttataaagaaccaagcaatggtgctattactattatcaatgttcttgttggtattgttattggtgcagcacttatatggttccttgttatgccatcaagatataaaggcataacagaagagtataacagaaacctggctgattatagcgagaagctgtcatcaggtaatgtagagcttaatagtctggaaaatgagcttaagacagttaaggcagacaaagaagcactccaggaacagttaagtaaggtaaatggcacagaaggcggtaacaagcttctgatatcagttatagaagctgctaatgaatatatagcaaataaccgtacagcggcagcagagaagatagtggatatagatgtaagtgcgcttccatctgattcagctaaatccctgtataatactatatcaggtgcaacatttgcatcggctgcttctgagttctacaacaaagcgcagacagcatatgctaagtcggattatgcctcagcagtccaggattatgttaaggcgtttaagtgtgattcaactaacgttaatgctgcttattatgcggctaaatgttatgttgcgctatcacagacagacaatgcaaagaagtactatggatatatagttaatgactttaagaaaagtggatattataaagaagctaatgattatgtgtcatcacattgattaactgactaaagatagccctctgacgattttaataaccgtcagggggtatttttattgccagaacaaggaaaaataaacagggagttatgggtagaagaagataggaggatgtggattatggaagataatatattgtcttgccaggaggatgagttatcagaagaaatgaaaaggacagactatatttatatggtaagcaggaagaatcttatcataagcctgaatgcagagcttgatcatcatcttgcggatgagatgagagaggtgattgatgagataattgatgagagaggcgttaacaggattataatagacttttccaaggtgggatttatggatagtgcaggaatagggcttattatggggcgttataagaaaataagggataaaggtgatatatctgttgttggagctgatgagagtattaaaaggatacttcttatatcgggacttcataaaatcgtatatatatatgacaatctgatggatgcagtgaaaaaggaaaacaggagggatgtataagatgtatgaaaataatgtggagatagtatttgatgcaaagtcagaaaatgaaagctttgcaagggtggctgcggcagcgtttgttacaaaactggatcctacactagaggagatatctgatataaaaactgctgtgtcggaggcagtaacaaacagtatagtccacggatatgagggcagagagggaaaagtatatatgatacttggtgcaaaggataatgaggtcaccattaagataaaggatgagggtgttggaatagagaatatacatagggctatggagccgttgtttacaacaaagcctgagcttgaacgctcgggtatgggattttcttttatggaagcatttatggatgaacttgaagtgcagtctaaagtgcagaaggggacaaccattattatgaagaaaaagataggagatagtagcagatagaatggatgtgcatgcttgtgatcacactaaagagctgattatgaaagcacacaatgatgataagcaggcaagagaacagctgattattgagaacagcggtcttatatggagcataatccagagatttaaaggaagaggtgttgagacagaggatttatttcagataggctgcataggtcttataaaggcagtggataattttaatatggaatatgatgtaaggttttcaacttatgccgtacctatgattacaggtgaaataaaaagattccttagagatgatggaataataaaagtgagccgcagcattaaagaaaacagctataaatgtatgctggcatcagaaaagcttaagactgtattaaacagagagccgacattagaagagatatcagaagagacaggtatagggatagaagatataatagtgacactcggtgctaatgagacagtagaatccatatataagactgtgtatcagaaggatggcaacgagatatgtcttttagataagcttgaggggaaggataattatagtgacagagttgttgacaatgttgttgtaagagagcttatagcagaacttagcgaaagagagcagaaaatcataaaaatgagatattttgatgattatacacagacacaggttgctgacatacttggaatatcacaggtacaggtatcacgtcttgagaaaaaaatacttgtgaaaatgagaaataatctcatgtaaagaaaatgaaaaaatatgtgtatatatagataaaactgttaatacttcatatatcaggctttggccttaaatggaggaataacatgtcaaagacagtatatcttaagttaagacagcttacgaagactaacaaagcggatgtatatctgtctgatattgcagatgtatatgcggataagaagatacttgcacgtataaaaagcataaaggtagcgtgcttttataaggtgaaaaaggacagggcgtgtataaatgtcatgcaggtaatatcctgcataaaccagcttgatgatacgcttgagataaataatataggtgaaagtgatgcagtaatagaatataaaaaaaatgaccagccggcatggatgaatatcgttatgacagtaatcgtctgtataataatatttattgggagcgcgtatgctattatggcatacaacaatgatgttaatacagccgaaatatttgaaaaggtatacagtatgtcaggtgcgggatatctttcagagtataatgtgctggagatatcgtatgccataggattatttgtaggaatagctgtattttatgatcattttatgggacacaggttaagcaaggcaccaacacctatagaggttgcgatgaaccagtatgttaaagatgagaatcagacacttatagacagctataacgaaatgcctaaggctgtaagaaatcattatgacggagtgaaaaaatgctgatgttaaaagtagcatgccttattgtaacaggtattgcaagcgggcttgttactgcaacaggactttttgcacttatatcaagtatagggcttatcaacagatatgcagatgtaaccaatacaaaggagcatatattactatatgaggagatgataatagcaggagcaggtataggaaatatatggtttgtttttgaactgccatgtcatacaggtatagcaggactgctgatatatggttttgtagcaggaatatttataggaacattcttattatgtcttgcagaaacagtaaaagcacttccaatacttacgcaccggttgtgcataaaaaaaggaataggctttattattatgtttattgcagttggaaaatgtgttggacatctgatatactatcttttagcttatgtataagagatgatattggaggattgtatatattatgtttaatagaaaagaactgtctgaaagggcggtgaaggtactaaaagcacattatggtatttttcttatagtatgtcttatcgcagcatttattgggagtgaatttacagaaaccttcagtcttttaagaatgcctgtgtcagtatataagaatatagcggacaatgcagacgataaagaagcgatagaagagcagggtgttacttttgtcacatctgatatagataacaggacaaaaagtgcaatgcttaatgcacttatatccgtctttatgaataacgaagaacaggggaaaatcaattcagaaaacataatagaaaatgcaaaggcaaatgcaggagagattctaggaagaacatctggtatattatcctctgttgtaaacagtttttcatcaggtgcggttgtttttatgatagttgatattatatatggaataactggttcaaggcatgtagttgtcatattgctgcttatactttcacttttcgtatactttgtgatccggtatatgattaagatgagttatattgtcatatcaagaagaatttttcttgagagcaggacgtataaaaaggtcggagttggcaagtttatgtttcttatgcgtattaagagatggatgcacgttgcctgggtgctttttgtaaaagatgtatttaccatattatggtctttaactatagcaggagcatttatcaagccgttttcataccagcttgtcccttatatcatagcggagaatccggatttaagtgccacagaggcaatcacattgtcaagaaatatgatgaatggctataaatggaaaagtttttgttacaatatatcgtttataggctggtctgtgctatgctttttaaccttcggacttgtcggagtgttttttgcgaatccttacaggactgccttttttacagaaatgtatgtagaaatcaggaaattggcgaaaacagagaatataaaagatatagataagcttaacgatatatatctatatgagatggcatcagaaaatgaacttaaaatagcatatgcagatatatatgaatatatgaatcaggaggatccggaagaaagattcatagatgatatatcaaagtctgatataaaatattttataaggctaagaaaagtacttgcggactggtttggggttatacttattaattctaaagaagagaagcggtttgaagacgataaggctgaacagataaaagctgacagatgtaagcaggagattttaagagaggtatatccatcaagattatttacacttaaggagcatagagcgaattttgaaagtacggtatatatgaggaattattcaataccatcacttatacttatattcttctgtatgtcgtttattggatggttctgggaagtatcatcacatgttgtgctgtatcattcgtttgccaacaggggagtgctgcatggaccatggcttcctatatatggtgtgggtggtctgctcatacttatgcttttaaagaaattcagggaaaaaccagtggttgaattcttacttgcagtgttgttatgtggtgttgttgaatatttcacagggcttgtgttagagcttacacatgacggacaaaaatggtgggattatacaggtttctttcttaatcttaatggaagaatatgtgctgaaggactgcttgcatttgggataggcggtatggctatcgtatattttgtagcaccatttcttgataattatttcaggaaaataaagcttgagattatacttcctatatgtgcagcacttatgcttatattcgtatcagaccagctgtatacaagaaagcatcctaatacaggtgaagggataacatgtatgcaggatatagatgaaaaatatatgaataatatctgttaaatcagacatcataatattaagaaagctgaaaatatgcatggaaatgaggaatattatggtgcaggatgtcaataaaagaaatgaaagctataacgaatatgtcaaaacagtaactaaaaaggcagattgtctgctcaactgtctgaaagcctttattatgggtggctgtatatgtacacttggacagcttgttacgaatctacttatgaggggaggcttatcaatggatgatgcttcctcatatacaacgataacacttgtgttcttaagtgccctttttacaggactgggaatatacccaaagttggcaaactggggaggggctggaagtcttgtgcctattacaggctttgctaacagtgtggcatcgcctgctattgaatacaagaaagaagggcaggtgtttggtataggctgcaagatatttactatagcaggacctgttatactatatggtatattctttagctggatagcaggattaatatactgggtgttgaagcttttttaagataatatgaaataaaatacaaaaacagaggtaaagataacaatggcaatgaccgaattggaacagcattataataagtttaatgaagagaaacggcttgactcaagacatgggcaggtcgagtacataacatcgatgaaatatatccacaaatatatcgacagcttaaagaaagaaacaggatgcggtaatgctggcataaagattcttgatataggagctggtactggaagatacagcgttcctcttgcagaggaaggatatgatgtaactgctgttgaactggtaaagcacaatctagggcttcttaaggcaaagaattcatcggttaaagcttatcagggcaatgcactaaaactgaaaaaatttggcaatgatcagtttgacatggcactactttttggaccaatgtatcatcttttttcacatgaagacaagcttaaggctcttaatgaagctaaaagagttgtaagaccaggcggtattatccttgttgcatatcttatgaatgagtatagtgttataacatatgcatttaaggagcagcacataatggagtgtcttagagagggaaggttaacagcagattatcatactgtgtcatcagaaaaggatctgtatgattatatgagaacagaggatatagcaagacttaacgaagaggcaggacttacaagagtacagataatatcaccggatggagcagctaattatataagaccataccttaataagctgacagatgaggagtttaatgagtttatcaaatatcatctgtcaacctgtgaaagagctgatatgcttggagcagcagcacatacgcttgatatattgagaaaataaaaatgtataataaaaaaaatactgtttacactatataatatgatgtgagtgtcaaaagtaaattttgccactcactgatgtatcaggattgctacattgctatgcaattcacacaatccttaaacacctcaaactttcataaaatgccgtattcacgacattttattccgttttcggtgtttagcgtgtcccaagtaaaaaagcctttttctgcaagcagaaacgactttttatacttttgacacttacatcataatacagaaaatatttaggtatcaggagtgtgtagtggtgtatgatagtagggaaacaaagtatacgtttcgataataatgtatatattaaggcaggggctggtgtggtaggaagcaaagaaaagcagggaccacttggctgctgctttgatgttgtgtctgatgatgatatgtttggcatgaacacatgggaggaagcagaaagcagactgcagagtcttgcttttgagacacttttgactaaagcagggcatatgcctgatatgataaggtatatatatgcaggagatttactagggcagcttatagcaacatcctttgggctaagagcttatgatataccattgtttggactttatggagcgtgttcgactataggtgagtctttatctttagctgcgatgtgtattgatgcaggttatgcaaaggatgttgtggctcttgcatcaagtcattttgcgagtgcagaaaagcagttcagatttccgttaggctatggtaaccagagacctctaagctctacttggacggttacaggcgctggcgcatatataataagcagtaacagtgaggacaggctgggatgctataaagaatacggatatgatatcatagtgaaggggataactacaggaaagatagtggattatggggttaaagattccatgaatatgggagcctgcatggcacctgcagctgcagagcttataacagcaaactacagtgattttgaaataaaagatgactactatgacatgattataacaggtgatcttggagatataggaagaacaatactgctggatctgttaagggaaaaaggaatcaatatatccgacatatatacagactgtggactgcagatatatgattgtaaaaaacagaatactatgtcaggtggaagtggctgtggctgtagtgctgttgttttagaagcgtatgtgcttaaaagaatgcgcagtggagaaattaaaagagtgctttttgttccaacaggagcattgctttctcaggtgagctttaacgagggcagatcagttccaggaatagcacatggagttatacttgaagctgtaaaaaagaatgataaagaaagaatgataaagaaagaatgagtggctgttgaatgcatggttgatgaatgatatatgataaagtagaagtagaagaaaatgaaaaaaagaaggagatgtggctatggactatataaaagcatttatagttggtgggataatatgtgccattacacaggtgcttatggaaaaaacaaagcttatgccaggacgcataatggttatacttgtaacatcgggtattgtacttggagcttgtggaatatatgaacctcttgtaaaatatgccggctgcggtgccagtgttccgcttaccgggtttggcaatgttttgtggaagggtatgaaaatgtcagtggataattcaggctttcttggattattcaagggtggctttacagcatgtgccgttggcgtatcggctgcactgatagccggttatattgcctcttgcgtatttgagccaaagatgaaaaaatagatataaaaagtctgctgtcctggatgttacaggcagcagactttatttttgattattgttttaattatgtttagttgttttttctgtacttccggatgaaccagagctgttagtagtacctgatgcacttgttgtaggagtggtactgttgtttttgttgctgttatttgtgcttgtactgccagaactgctgttagttgaagatgttgcagctctctggtgcagcgtacacagctttgtaagtttgtcttcggttattgaatattcagcatctcttgttgtatatcctgaatcgttgcttccgatagaatcacttgatggtttctttgtaagtattcttgtagaaacgcttgtgcatccggtgttagcgatatcacctgaaacattacatatattaaccttaacgtgtgtgtcacagctttctgttggctggttatcagcggcaaaatattctgttattatacagcttccacgaggatcctggtcacataagccctctacaggcagcttgcccgacttggagcatacctggacttcaacaatatcctcaggctttgtgaattcacctgaaggaagacctgaatgtatctgttccataatagaacgccagatagatgtatggttaacagagcttacctgtcttgagttatcatcatagcctacccatatagatgctgtatagtaaggtgtaaaaccacagaaccatatatctgtatcgaactgtgtggtaccggttttaccagcagttggctggttagacacctttgcccttgtagcagtaccagagcttacgacagattccataccgcttgtaagaagccatgctgaagattctttaagaaccttatgtgtttctggtattgagttatctattattacgttgccttcactgtcaataacctttgtatagtatataggcttggtataaacacctttgtttgcaatagcagcataagctgcagtcatatctatgttacttactcccttagtcataccgccaagtgcaagagattgtactacatcgtggtttccattcacagcattttgtggagatacaagcgttgacagaccaaacttctgcaggtagctgaagccaacagctggtgttatctgtgtaagtacttttacagctggtacgttctgtgaacgggtaagagcagcacgtacagtaatataaccaagatattcaccttcagtatagttctttacaagtcttgcatcggtgcctgaatagtagtaaggtgcatcatcaatagcagaagcaagcgttatggctcctgtatcaagtcctggaccatatgcaacaagaggcttgatagatgaacctggctgtcttgcaacatcatctgtagcacggttaaggcctctgtctgtgttcttgtcaccacggccgccaacaagtacttttacatatccggttgactgctccataacagaaaatgatatctgtggctgtacaacaaagtgggattcttcaaatgtaacagtaccaccattagctgtcatggcttccttatatgtgtcaatatagttttgtgccttttctttattgcttaaagtcaggctgaaagaagaatctccgttatcgttataccatttttccatattgttttgtgaataatatgaaaatgagccgtcagtctcttttactgtaaggttataattgattgtaaaattgttacctgggtaataatcaggatcattaagcactgtatcagcagcttcctgcatacgcatgtcctgtgtggtgtacactgaaagtccacctgcgtaaatcaagcttgttgcctgctgcttagagtagcccttctgctgcataagatcagttataagctgttctataacttcatctacaaaatatgaatagtttgatgaagatgaggaagaggacacatcaataccttcaagccgtgcatatacatcatcttcaacggcttcactatattcttctgtagagatatattcctgtcttagcatattgttaagaacagcaagctgacgttctttgttatcatcaggatttcttaaagggttaagccttgaaggatttttagtaatagaggcaaggactgcacattcacttaaagtaagctcagatacatccttattaaaatatccgttggcagcagcctgtacaccatagtaaccattacctaaattaatagtattcagatagttttcaaggatattatcctttgacataactgtttcaagctttatggcaaggtactgttcctgaacctttcttttgattttctccatagtagattcgttatatgcattgaatacattgttcttaaggagctgctgtgtgattgtacttgcaccctgtgacatctcaccatctgatacagtgatcatagcagcacgcataataccttgaagatcaataccattgtgcttgtaaaaacgttcatcctctatagcaacgaatgcatgctgaagctcgattggtatctggtcgagcgatgcatatatacggttggcaccggtttttgcaagagtctgtatttcatttccttcattatcatatatctttgtggcaaagccttctggtgagacattaatagatgatatgtcaggcgcactctgtataataccctgcgcagcaccaaaaaccaggcatgaacctcctattacaactgctatagcacatacaagcaacagtttgacaaaaaatatgcctaactttgtcttgaacttggtagcagcagaattaagaagctttttctttcgttttatgccgtttccaccataattcataaatgtaaaacctccatattgttctgaatggcaaatatgtgatattataccatatatttatataagggtcaaagagctttaaaaagtgagatatttcttaagattaagtaacaattaacggagagatgataatgaatattgtattaaagaatggcacaggagaaatagaagaaaagaaatcaaggtttatagcacatgtatataatgtaagcagtgatgaggaagcggaacagtatattaatgctgtgaaaaagaaatactgggatgcaaggcataattgttatgcttatataataggagataaagggcaggtacaaagattttcagatgatggtgagccgcagggaacagcaggaaagcccattcttgatattatagctgccacaggacttgtgaattgtcttataattgtcacaagatattttggcggtgtactgcttggaactggtggccttataagggcttatcaggcttctgcaaaggcagggcttgactcatcagatgtgtcagctgtatgtgcaggcataaaagcaaatataactgctgattataattcttatggaaagctgcagtatatatgtaacgaacagggggttgatgttcttaacactggttttggtgcagatgttgatatggaacttgtggtaaaagcagaaacggctggcacttttgagaaaaaaatcacagatgctttttcggggaatataacattgaaaaataaaaaaaatgtgaatttctgcaaaaaaaaatctggagaaataatatttttgtaaaatatgatgaaaaatactgacagcagtttttataaaagtatgaataaaaaattaacactggtaaataagcacaatacaaaagttttatttgggaaaaatgtaaggatgattgttaaagtgatgtaaaaaaatactaaaatgacagttataatagtgcaaaatttacataaaatatcagattttaaaaatgtataaaatataacaacagaatataaaaacttatccaagttcataaaatgtttaaaatatgaatccgcaaagccgcataaatactggtattcacaaaaaaatcaaaaaaaatacaagaattgttaaaaatagtcttgttaaaatagtacaaaaatggtaatatatctatgtcaaaaacatattaagtgggtcagatccccacaagaaccaatatagggaggtttacaagtttatgagaaagacagttaaaaaacttactgctgtaggtttaacacttacttcagtaatgggtcttgtagcatgtggaaacaacaatgcttcaacagaaaacaagtcaacagtagattgggcaagcgtagaaaagccagaagctttcactgttatggttgatggtacagttcctcagatggaagaatggggtgacaagtttgatgaacagctcaaggaattaacaggccttgacttcacagtaacacgtccagaccacaactcatactatgatgcagtagctaactcaatgctcgatgcaagcgctatgccagatgttatcattctttcatctgactacttagcactttatgccagccagggtcttctctgggatatgacagatgcttggaacaattcagcaacaaaggcatcaggaagacttattgcagatgcagaaaagatcatgcaggctaactatgttagaggcgtagatggtgagaaggctctttacggattcgtacctacacgtggtaatggatgctgtacatatgtaaaggaagcttgggctacagctgctggttatacaaaggcagatcttcagaagcagatgtcatatgatgaattctatacaatgcttaagaagatgaaggaagctaagggcgttgattatgtaatttcagctcctggtttctattcaaaggaagcaccttatacaaactatcttcctgaattctatcagaatgcacagtttacattctactatgatcagaaggctggacagtatgtggatggtttcactcagcaggagatgaaggatgctcttcagagaatccagaacgctgttaaagatggacttatcaacaaggaatcaagtacaaagacaacagctacagcacgtaacgatttcaagtcatcagatgttaagacagaatcaggtgtatttacatactgggctggacagtgggctgagactttaaggggctacttaaagacagctggtcttgatgattcaatcattcctatccttccagttaaggaacttggtaagtacgcagaaagactttcaccatcatggtgtatcacatctcatgctgctgagacaggaaaggcagaaggaatctttaagtacttccttgatacgatgttaaatggtggcgatatccagacactttgggaatatggtcctaagggatattactacaacgtaaaggatgatggttcattcgaattccttggtaagaagactaaccctaagacattgtactctaaggctcatcttgactgcaacctcgttcttgcaggatactctgacggaaagaaggatccaggaaaggcagatcagccagctaacgttatagagtgctcagaaatgttcttcaagaactctcagttagttgattctcctgctatgacagaagaagttggtaagcttgttggtgatatcaatacacagagatatacagtagttgataaggtagccagaggcgaatggactgttgatgaaggtatgaagcagtatacagatacagttggttctaaggttgatgcagctcttaagtcattaaatacaaagttcgctggtaagtaattagtgatttaagctacttaatatgtattattagtgatacctgctatcacatatggtcgtgccaggagacctggtcttctggcacgatattttgcttaataagcattgttactataatattaggaaagaagggtataaagatgcagtgtaagtcttgtggaacagagcttcctaagaaggcaaagatttgccctaagtgtggagcacttaatggtaagccagctggtaataccagatatttagctattatcggtatggtaatcatgttattaggcggattgcttccatttgttcagtcaaatgaagaacttatggacggttatacacctaaggcatactcatttggtttcatgaatatcagcgttatatttatgtggtatctttttatgttgcttatcgttgctggtattcttttagttgttgctaagaaagaaaaattatcaattgtaacatcagtacttgctacagttgttgcatttgtatctatgtttgcattccagttctctagtacagatggtaaaactaagactggtgcattaaagtatgtataccataatgtatctgatttattatcaaacggatatggtggtaatacttattcaatcggttcaggtgtatatgttatcatacttggacttatcgttgctatcataggtgtattctgggatgttgttaagttattcaagaaggatctcggagtagatagcaagtatttatctaactcattaaatcagagtattacgcagaagatgttctactacagaggattctatattatgttcctcccagtatttatcatgatattattattcttctactggccaatgttaggatgtcgttatgcgttcacatcatatgtattagctaacccatattatataggtattttccacttccagactatgttaagattcgatacatatttctggcaggcattcagaaatacacttgtattatcaatcgttaagttaatacttaatacaggtgccgcagttattatctcacttcttcttaacgagattactaacatggcattcaagaaatcagtacagacaatcatctacttacctcacttcatgtcttgggttgtagttgctgctgtatttaagatgattctttcagttaacagctcaggtgttgttaacggtgctttaattaacatgggacttatcgataatcctatcgatttccttggtagttctaagtactggacaggcacattcttcatgatgaacgtatggaaggatacaggatggggaactattcttttccttgctacattatcaggtatcagtcctgacctttatgaagctgcacagattgatggtgctaacagattcaagagacttatatatattactcttccagctttagctaacactatcatcacagtattcattcttaaccttgctaaggttatgaaccttttcgaatcagtattcgttacacagagtgctggtacatacgatgtatcacaggtattacagacatacgtatacaacaagactttctcagcttcattctctgattacggttatacaacagccgtaggtctgtttaagtcatttgtaggtatgattctcgtacttggttgtaactacgcaagtaaaaaagtccgtggacgtggaattgtataggaggttagacgatgagtgaagaacagttagtttataaaaagaaaaagaaaaaatttaaaatcttcccaatagtcaatgcaatcttctttatattggtttcattgttaattcttttccctatgtggaaggttattgtagattcatttgatgctcattcagcaacaagttttagatggtggccaaatgcattctctgtaggtggttataatgctattttctcaagatcagctttatatagtccatttgttatctcagtagtaacaacattagttggtacattcatgggattgttacttgctacacttggtggttacgttcttattcagtgggatatgccaggaagaaacttctttgcatatatgttattattcacaatgattttcgatggtggtatggttcctaagtacttagttatgcagaacttacacttacttgatacattgtgggcagtaattctacctatgtctatcaacgtatataacttagtacttatgagaaacttctttgaaggtattccagaatcacttttcgaagctgctcagattgatggatgctcacctatgggtatattctttaagattgtgttaccactttctaaggctgcccttgcttcaatcggtcttatgtttgccgtaacattctggaatgattatacaaacttcaagatttatatcagaacagataagttatacaacttccagattaaacttcgtaacatggttatggatagtaatattcctaacgacgattcagtagatcctaacactattgctaatgcatctacagttgttgctatcttacctttcatgatcatctatccattctgccagaagtactttgtacagggtgttaatgtaggtgccgttaaggagtaatgagcattgttatataacatatatggtgatgtacggaagttattatattgaatatgacttatgttaaaataaaaaggcggaaatggtaataccatttccgtcttttttgttttatcggactttttatatgtagtaatagcatagtcagtatgataaaattagaaaatagaaatagagtaaagatagtgaagataaggtggtgtatgatgagaaagttagtagatgcgatttatcttgagaatatagacgaggtcagaactatacttgaaaacgaaccggggcttatagatgaaaaagatgagcatggtgtgcttatggcacttcttgcagctaagacaggtaatattgagcttgttaaatatattgtagaatattcaagagcaagcatgaacatccatgatgacaacaataaaaacatgttacactatgcggctatgtcaagtgatgtaaaaacctgtaagtatcttgtagaaagagtaggtatgtcaccattatcaggtgatataaatttacttacaccatttgagattgcacataagaatcattttattgagctggaagaatattttgagcaggcagtaggacacaagctgtctgatatgtatcacaatcctataaggacaggaatgtatccagatccatctattgtcagagttggtgaagattattatatggttaattcatcatttatattctatccttgtattccagtatcacattcaaaggatcttgtgcactggaagattataggatatgcgataactaatcctgaatgggctgggattaatgaacttgaaggaggaagaggatactgggcacctgatatatcttactataaaggtaagttttatattacagctacatacaggctgaatgatacaggcaatgtatatagaaagcagatagtagtaagctcagaacatccagaaggaccatacagcaagccggcagttatagatgaggatggtatagatccatctatattcaatgatgaggatggaagaagatatatgcttcttaacagaggtgccagaatattcgagctgaacgaggatgcaacaaagcagatatcaaaggcagagcttctatattatggagacaataaaagagcaccagagggaccacatcttttaaagaaagatggctggtattatctgtttgaggctgagggtggaacaggaccaggacatagaataactgtgtcaagaagccgtgaattaaaaggaatatatgagccttgtccttataatcctattatgagacagaataatccagatgagatcatacaaagatgtggacatggcaagccagtacagacacaaaacggtcagtggtacatggtttacttatgtggcagaaaaataggtgatggctacagcatattaggaagagaaacagcacttgatcctataacatggactgctgatggatggcctatagtaaacaatcttaatggaccaagtgccctgcaggttaagccggatcttccagaaacaatatgggaagcagaagcagatgatgattttaatgagtcatcactaagtaatgaatggtggttctcgagagttcctgagatggatggaataaagcttgcagattcacatgtatatgtaaagggaagtgagtatgatcttgactcaatgaaatcaagaaatatactccttagaagacagaagcattttaagtttgatgctatatgttgtatgaagatgccagaactatatccgggccagaactgtggaatgacctgttattatgatgagaatacttatattaagtttgcagtatttgctacgctggatgaagaaccaaggttgatgttaaatatagttgaaaaaatcggcgaagaagttataacacatgaaggcataatggttgataacagcaatccttatatatatcttaagtgtgagacgaattatctaagacgtgtattttcatatagttataatgagaaggactataaaaaagtagctacacttgacaatgtatattatctatgtgatgaaggctataataagggaaaaagatttaccggagccatgataggtatgtatgcatttgctggaacatatggaagccagtacacagatactgaaggaagacatggaattgatgaatattatgcagcatttgattattttaaatatatagaaaagtagatttaaaatcatataatgtaagtaaaatatcgggaaatggagaaataatatgataattaacagagatgcagaattagaaaaaaatatgttttcaaaattatcagacattgataatatcatgcataagaaggatgcatatgcacttggattaagacttaatgcactttcttctctttgcagggcattaagaaccaaggaagcagtgcgtgcgcttacagctgcacttgataagctggaagctgattattttacaggtgatattagtgtggatggacttaagagctttatgccaggtactgcgttatatacagcttatgattttacaggtgatgaaaagtataagaatgcagcagtaaagcttgcagaaggctttaagaatctttcaagaaatgataagggatatttcaaggatgaagatgaaaagaagtgtctttgcaaggcatacatgtatgaaccattttatatggcatatgagacaaaggatggcggaaaagagcagtataacgatgttatagcccagtataatgcaatgaatgatgagctttttgcaacagctaaatattcaaaggatacggccaaggctttaagaagtctgtcaatatatgcagcagcacttattgatactatggaagtcatggatcagatgatatatgaaatatataggaagatgcaggattattataaagcatcagtaaaggcagtattagaagccggatacggtgttgatggctttgaagatatggatgatgaaacagagctcatgtttgcatatgctgtattaaagggctgcagaatgaaggctgtccatacagaaaaatacgaaggaacagtattaggtgtatgtgataaggttatgtctggtgagatatttacagacgaggatgataaggctgatgataatatagtcagcatggcagcattagtatatagtgaaacagtcagaaacagggaatatcaggattatggccgtggtaagggaggagcattatggagttagtattggtaactaatacagcaagaagtgctgttgtggaattaacagaagcaggaaagtattattcagaaaaggaatatgatatttacgtaaatggagagcattttgcacatacagataagcagataacatcattatatggttttaagccggatacagaatatgagataactgcggtgtatgatggaaaagaatatggaccagtagtatttcgtacagattatgagtttgttactcttaatgtaagggactttggagcatatggtgatggaaaacatgatgataccaatgccatacagtgtgctattatggcatctaagaagaatacaagagtgcttgttccagaaggtacatatagaatatcaagtatattcttaaaggatgatcttacgctggagcttgctaagggtgctacattgttagcttttacagatagagaaaaattcgcaattcttcctggaatgattgagtcatatgatgaaaagtcagaatataatctttcttcatgggaaggtaatcctgtagattcatttgcagctattatatgtggacttaatgttaagaatgtaacaataacaggagagggtactatagatggtggtacaacacatgataactggtggaagaactgtaaggtacgtaacattgcgtggagacctaatctgttctttattaatcactgtgaatatgtaacattacagggaattacagtacagaattcaccatgctggacacttcatccatatttcagtaatcatcttaagtttatagatgttaagattaaagcacctgctgattcacataacacagatggtttagaccctgaaagttgtgatgatgtacttgtacttggaacatatatttcagtaggtgatgattgtatagctattaagtcaggaaagatatacatggctgaaaagtacaatatcccaactactaatatgatagtaagacagtgctgtatgagagatggacatggtgctgtaacagttggtagtgagatagctgcaggagttatggatgttcatattaaagattgtctgtttatgaatactgatagaggacttcgagttaagacaagaagaggaagaggaaaacgttcaattcttgatgatatttcatttgagaatatcgatatggataatgttatgacaccttttgttgttaacagcttctatttctgtgatccagatggtaagacagaatatgtcggttcaagaaagccacttccagtagatgacagaacaccatccataaagaaattcgtatttaagaatatcaatgcaaagaactgtcatgtagcaggaacatatatatgtggtcttccagaaagcaagatagaagaacttgtatttgaaaatattaatataacatatgctgataatgcaaagtctggagttgcagccatgatgttaggatgtgatgaggcaagcagacagggtatggtagtaagtaatataaaaaatcttatattaaaaaatgtacatgttaccggctgcgatggtgaagaaatcatcgctgacaatgtagatgcaatagtaaaagaataagccggaatatatgaaagcaggtgagaaaattgaatctgaaagcacctaagggaatagatgttgaaagctggtttatagaatgttacagaaaacatcagggacatcccatgcagatattattaggtctttataaaggaaactatcataagttttttcttgcagttatatttttctttataaagcatgctccagtatgggtgctcccaatagttacagctaatattataaatgatattacaagcggttcaccagaaacataccagaatatactgattcaggctgttataatggtggcacttgtagcattgaatgtgccgatgaattatatgtatactagatataaatcattagcaacaaggtatgcagaaacgggacttcgtaaggcacttgtacgtaagctgcagcagctttcaatatcatatcataaggaaacgcagtcaggacgattgcaatccaagattatgagagatgttgaggccgtagaaacgctgtcaacgcagatgtttttaagtatacttaatattgctttaaatataggaatagcgcttatagtaactgtgaataagagtatggttgtattcatattctttcttcttacaacaccaatagcagcggccactatggtattctttagaaatgtcatgaagaaaagaaatactgagttccgtaaggaaatggaagaaacctcggcaagagttatggaaatggtagagcttattccagtaacgcgtgcacatgcacttgaagaagaggaagtccataaaatgagtgggcagctttttgccgttgcagaaaaaggatacagactggatgtcatacaggcgctgtttggttctgttggatgggcgatatttcaggtgtttcaggtcatatgtctcggatttacaggttttcttgctattaaaggaacagtaatgccaggtgatataacactttatcagagttattttgcaactatagtaagccaggtatcatcacttatgtcgctgatacctactatagcaaaaggtatagaatcagtgaattctataggtgaagtgctgctagaagaggatatagagcataacgaaggaaaagaagttcttgatgatatagaaggagaattcgattttaaaaatgttatgttcagatataacaatatagacagaccagtattgcatgagcttaatcttcatgttgataaaggtgaaacaatagctttagttggagagtccggagcaggcaagtctacaatattgaatcttgttattggatttaaccttgctaataagggtgaggtgcttgtagatggacatgatatgaataagattgatttaagatcatatagaaaacatatagcagttgttccgcagacatctatactcttttcaggtacgataagggataatataacatatggtacagaaaatgtggatgatgctacacttgataaagtagtaaaagctgctaatcttacagatcttatagaatctcttccagatggactagatactatggttggagagcatggaggaaagctgtctggtggacaaagacagagaatatccatagcaagagcacttatcagaaatccgaaggttatagttctggatgaggcaacatccgctcttgacagtatatcagaaaagcttattcaggaagctcttaacaatcttacaaaggataggacaacatttatagttgcacatagattatcaaccataaaagatgcagacaggatagcagttatagctgatggtcactgtgttgagtatggcacatatgatgagcttatggaacttaagggtgaattctatcagatgaagaaaatacaatcataaattaaaagccgttaacatcaagtgtgttaacggctttttgtaacgtataagctgattataactgttagttgaactattaattattagtttaactgttaactattagttattaatccagattcttaatgtagaaattaacttttccttagtatcagaatcaagcttagatactaactgcataatctcgttatcaagtgctgtgttctggtagttcttatcaacactgccagcaagataatcaagagaaacaccagtaagttctgcatagtatgaaagcattcttaatgtcataagattacgtccattttctacgttgctgatataaccaggtgttacatcgagagcctttgctacatcttcctgtgttaatccctgagaaattcttaactttttaacttttgctcctaaatcgctatccatagtagacctccattaataattataaattgttagtgttagttttatatagtatcagataggggatatacatcactatagcaatgtatgatatctgatattttaaaattagattttactttattacttcttgttagctctgtatcttgctgtagaatcaagaatcttcttacggattcttaagtgtgttggagttacttcaagtaactcatcagtatcaatataatcaagtgcctgttcaagacttaatatcttaggtggtacaagtcttaatgcttcatcagcactagaagaacgtgtgttagtaagatgctttgtcttacatacattaacttcaatatcttctgttcttgggttctcaccgatgatcataccagcatataccttttcgccaggtcctatgaataaagtacctctgtcctgtgcgttgaaaaggccataagtaacagcttcgccatcttcataagcaataagcgaaccagtttttctgtaagatatatcacccttgtattcttcgtagccttcaaaagaagtgtttataataccatttcccttagtatcagtaaggaactcgcctctgtaaccgataagaccacgagatggaatagagaactgaagtcttgtatatcctccgttgataggagtcatgccaagaagctcaccctttctctggcttaacttctggataacagaaccagtgaattcatctggaacatcgatataagcaagttccataggctcaagcttctttcctctttcatctgtatgataaagaacttctgccttacttaccgcaaattcatagccttcacgacgcatgttttcgataagaactgaaagatgaagttctccacgtcctgataccttgaatgagttctctgaaccaggattttcttctactcttaaacttacatcagtgttaagctccttgaaaagtctgtcacggatatgtcttgatgtaacaaacttaccttctttaccagcaagaggactatcgtttaccataaagtccatagaaagagtaggttcagatatcttctggaatggaatagcaacagggttctcaacagaacagagtgtatcaccaatcttaagatctgcaataccagatacagcaacgatgtcaccaaagccagcttcattaacctctaccttgttaagtccgttgaatgtgtaaagcttagttacacggactctctttcttaaatcagggtcgtggtggttgacaatagccacctcctgattaaccttaattttaccattctcaatcttacctacaccgatacgtccaacgaattcgttgtaatcaatagtagatataagcatctgggtatcagcatcaggatcaccctctggtgctggaatgttgttaataatacattcaaataaaggctgcatatcctttctttcatcgttaatgtcagccatagcgtagcctgactttgcagatgcaaatataaaaggacaatcaagctgttcttcgttggcatcaagatctatgaataattcaagaatctcatctataacctcagtaggtcttgcttctggtctgtcaatcttgttaatacatacaattacagaaagatttaaatcaagtgccttctgaagtacgaacttagtctgtggcataacgccttcaaatgcatctactacaagtacaacaccgttaaccatctttaatacacgttcaacctcaccgccaaaatcagcatggcctggagtatcaatgatattaatcttagtgtctttatagtgaatagcagtattctttgagagtatagtaatacctctttcacgttcaatatcgttagaatccataacacgttcagcaacttcctggttagcacggaaagtaccactctgtttaagaagttcatctacaagagttgttttaccatggtcaacgtgggcaataatagcgatattacgaatatcttcgcgtttagtcttcattatagtatcctttcattaataatctgcagctatagtgtatctggtgtaagctttacattatatttgcgtaaagaaatgtatcagataacaaatatagttacatgaatcaaataatacatcatatctaccaacaatatatattatacactagctggttatgattagcaacttttatattctatcacaaagcttataaaatacaatagtataaatactaaaaatattgtacattatttgatacataattaatcggacattactataacacgaaattgtatataagtataccggtatacttatatgttttaaaaaaaatacatagaataaaaaaatatctgaaacataataaaaaataaaaatattaatttgcataaagctgtataaatgtagtaatatagcggtgttggaacataatctttacaattattaacccacatatttaataatatttaaaaaaaaataataatttgtacacaacttcttcaaaaaaaatgtgtaatattacagctgaatggaacatatacatatggagaataaaaataaagcacatgattgcttctaatatcatattaatcatcaggaagcagtcaaagaagggagaaatacttatgcttgataaggtaattgaaaacaacagggtatgcatcattggagaagtggtatcagaattcacgttcagccacgaagtatttggagaaggcttttatattgccaatgtatctgtaaacagacttagtgatatggtggatattattccgcttatgataagtgaaagacttatagacgtcactaaagactacagaggaagaaaaatagaagtgtcaggtcagttcagatcttataaccgccatgagggtgttaagaataagcttgtactttctattttcgtaagagagttaagatttatagaagatgacgaagttccagaagaacagtcaaaatcaaatcagatatttcttgatggttatgtatgtaaaccacctatatatagaaagacaccacttggaagagaaatcgctgatattcttgtcgcagtaaacagaccatatggaaagtctgactacataccatgtattgcatggggaagaaatgcaagatttgcaggtggtcttgaggtaggaagccatctccagatatgtggaagagtacagtcaagagaatatacaaagaaaataggcgaagaagaggttgaaaagagagtagcctatgaggtgtctgtaagcaagatagatcttgttgaggatgaagaatagaatatagcttggtatgactatgtacaaagcatatataaataagaaataaaaagtcagaatggttgacaatgatatatacaagtgttatattcatgttaactttttaattctacgaagtagaggtcgcacgattcaatagtaactgtactgatgtccccaagcatatgatgtgcagcgaaaggggagagtgccgaagcagattatgtgggaagttatctgctgggcgtaagattaataatcttatgactgtcattatagacatgtttatgtcatatgatggagggctacgcaaggatttctgattttttgaatggattcttttaagccggtctgtcatggaaccggctttttttaatgctgatgaatgaaaataaacttttattcattatatctggctttgggtgctaccggaatagaattgaaataatataataatacaacggataaacgttggaatggaggatttatgtcaatatttacaggtgcaggtgttgctattgtcacacctatgaaagctaatggagagattaactatgataagcttgcagagcttcttgattttcagattaacaattcaacagatgcaatagttatctgcggaacaactggtgaatctgcaacaatgacagaaaaagagcatgttgaagctataaggtttacagcagattatgttaagaagagagttccagttgtagcaggaacaggctctaactgtacacagacagcagtagaactgtcaaaggaggcacaggcagctggtgttgatgcatgccttgtagttacaccatattataacaaggcatcacagaagggccttatagaacactatacaacaatagccaaatcaatcgatcttcctattatcatgtataacgttccaagcagaacaggatgtaatatacttccagaaacagcagttaagcttgcaaaggaagttgataatatagtagctataaaagccgcaacaggtaatctttcacaggaatcaaagacaatgatgcttgcagaaggatgtcttgatatgtattctggcgaggatggccttatagttccacttatgtcaataggtgctaagggtgttatatcagtgttatctaatgtagctcctaagcagacacatgatatatgtgcagaattctttgctggaaatgttgagaagagccgtcagttacagtttgaggcgcttgagcttgtagacgctttattctgtgaggttaaccctattccagttaagacagctcttaatcttatgggtatggaagtaggaccactcagaatgcctctttgcgaaatggaggaagctaaccttaataagttaaagacagcacttaagaattatggacttataaagtaatgtaagaatctataatttggcagataaaagaaatgtgcgaacacaaacattgaaataataaagaaaataatgtatggaggctatgataatgacaagaattattatgcatggctgtaatggacatatgggaagagttattacagaccttgtaagcaaagatgatgaatgtaagatagtagcaggaattgatccattcgacgatggacataatgattatccagtatttgcatcagttaaggactgcgatgtagaagcagatgttataattgactttgcagcagcaaaggcagaggatgcacttcttgattattgtgaggaaaagcagattccggttgtagtatgtacaacaggacttacagatgagcagattgaacatgtaagaaagacagcctgcaaagtagcagttcttaagtctgctaatatgtcacttggcattaatatgcttatgaagcttttacaggatgcaactaagattcttgcaccagcaggatttgatgtggagatagttgaaaagcatcataataaaaaggttgatgcaccaagtggtacagcacttgcacttgctgattccataaaggaagtgcttggtgatgactactattacaagtatgacagaagccaggaaagagcagcaagagatcctaaggaaataggtatcagtgcagtccgtggaggtactattgtaggtgttcatgatgttatctttgcaggggaagatgaagttattgaattcacacacacagcatattctaagtcagtattcgctaagggtgcgatagaagcagctaagttccttgcaggtaagagtgcaggaatgtatgatatgtctgatgttatagcagcaagatagcatataaacaatatcaaataatcaggtattgaattataaaatttgcaataaataagtgcctattatattttaattatatgatagacacttattttgctatgctcatattaaattattaagatttaacgtatagtatttaatctcctcagcaacagtgaacccctctgacttataaagattaaccgcaggtatattagtgcctgaaacatgaagaataagaggaagtttatgataattgcttttatttttccaatcttttatgaattctgataataaatgtctggcataaccgcattttctcatatcaggagcagtccatacatcatgtatacatatgtgtgtatcgaagatgtcaaatgcaactgatgatataagcgcgtcagatgtatttgatacaagctggtattcgtcatcatattttaacagttccaaggtatcaggaagagaggaaagagcagcagcttctgtatattcctgtgtgttatgcagagacataagataatcactataggcatattttatattaatagtgcctgcattggaactatcaatgaaattatcttttatagatgcgatatatcttatattattattgttaatcttgctattcttattacaattgttatgactatcagatatagaactgattgtattaatagtattaataagtgcctgaaataatcttataaaaatatgctggcgtctgtattcaggagcaaccattgcagtgatttctatagttgtattatctgatatattgcctgctgtattatttagctcaggttttaaacaggaaataaagccgacaagagagtgggaatcacttgaaaaagcggcaagctgtattaaatcatctgctgtatattcgtcaaaatatggttcgtagccgcatagtctggaaagttttaatacatcatcatatgagaatacattttctatactgatattagaattggtaatattatcggcatatgcgttattataaatatttgaattgttgttgtgcttaaggctgcaagctttatgatttactgacattgtttgatccccttggctggcgttattgtttattatttgtatatcatttagatgacattgattcgctattgttcatagtggctgaattttgaacagtaacgcaatttgttaatatgatgtaaattttattcgaaaaatattgtagcaaattaaaagataatgtacaataatagataatatttgttttatattacaagcagatacgaataaacagctatatttcacagcatattaagtggaatgtgaataatagaaagggcgatttatgagtaaagtagcaatattaacagacagcaatagcggtattacacaggcacaggctagggaagtgggtataacagttatacctatgcctttttttattgatggtgtggaataccttgaggatattaatcttacacaggaagaattctatgaaaagttgaaaaatgatgcagacatatctacatcacagccatctataggaacattgcaggaatattttgatgaattgttaaaggacaatgacgaggttgtatttatacctatgtcaagtggacttagcggtacatgtcagacagcaactatggtagctggtgattatgatggcaaagtacaggttgtcaataaccagcgtatatcagtaactatgcgccagtcagtcatagatgcaaaggctttggcagataaaggaatgaatgccggagagattaagaacatacttgagaaacacaagatggattcaagcatatatattactcttgagacacttaagtatcttaaaaagggtggaaggataacacctgcagctgcggcaatcggaactatgttaaagcttaatcctgtattacagattcagggagagaagcttgatgcttttgctaaggcaagaggtaaggcttctgctaagaagattatgcttaaagctatgaaggatgactgtgagaacagatttaaagattatgcagctgaagcaaagcttcatatggaagttgcatatactggtaatgaagaagaagctaaggaatgggctgaggctgtaaaagaagcatttccagaatatgattttcatatggatccgctctcgttaagtgttgcctgccatattggatatggttcattggcaatagcagtgtcagcttatgtaccggaggcagaataatggcagcacctttaagaagtgagattgataatgagttcaaatgggcagttaatgacatctactcatcagataatgtgtgggaggaagattaccagaagcttattaaacaggcgggcgaaccctgtgaatatcagtctgttttaactgagtcggctgataatctttataatgtattaagggaattaaatgatacagattatcttgttgagagattatatgtatatgcttttatgagatattatgaggatacagctaattcaatgtatcaggatatgtcaggcagggcgcaggcggcagcagctaaatgtgcagaaaagtacgcatttgttgagccggcaatattaagtatggatgaaaatgttctctatgaatatttaaaagatgacagactcaagctgtataagcatatgattgatgatatgttaagccagaaagaacattcactatctgagaaggaagaagttcttcttgcaaaggcatcgcaggtaatgtctgttcctaatgagatattctccaaatttaataacgcagatgtccattttggcagtataattgatgaatctgggaataaggttgagctgactaacgcaacatatgtaaaatatatgcagagccagcaaagaagtgtaagaaaagaggcctttgagtgtctttataaggaatatgagcagcatatcaatacgcttgcagcctgcttttatggcaacgtaaaacaggcagtatttaatactgaagcaagaaaatatgaatcaacattacatatgtatctgtctgatgcatttattcctgtagatgtatacaagaatctcattaatactgtagatgacaatcttaatctcatgcacagatatgttgacataagaaagaaagctttaggggttgatgagcttcatttttatgatatatatgctcctatggtagcggactatgagtggaaggttacttatgatgaagccagacagatggttcttgaagctttagcacctatgggcgaagagtatgttgctaaggttaaagaaggctttgaaacaggctgggtcgatgtatatgagaataaaggaaagcggacaggagcattttcgtggggtgcatatggaacacacccttatgtatttcttaatttttctggaacattagatgatgtatttacgattatccatgaaatgggtcacgcgatgcacacatattattctaattccagccagccatatatatatgccggttacaagatattcgttgcagaagttgcctctacatgtaatgaagcacttcttatgaattatctgttggaaagctgtaagaatgacaaagatgataagagaagaaaatatcttcttaaccattattttgagcagtttaagggtactttgttcagacagacaatgtttgctgaattcgagatgacagcccataaaatggtcgaagaaggcaatgtccttactgctgacaatctgtgtgatgtatacagaaagcttaatgaaaagtattttggaagtgagtgtgttattgatgatgagatagcatacgagtgggcaagaataccacatttttatactccattttatgtataccagtatgcaacaggatattctgctgctattgcgatagctgctggaatattaaagggcgataaaaacattaaggaaggatataggaaattcctttcaggtggctgcagcatgcatcctatagagcttcttaagctgtgcggaatagatatggaaaaaccggatgttgttcagtcagcgcttgatgtgtttaaagaactgcttacagaatggggttaagttattaacacattttgttctataaccctgatctgcaatttgttctataatcctaagaatagtaaatagtaaatagtaaaagaaccctgcggtatagcagggttcttttttagaggtgtaaaatatgataaacaaaaaatttaagtagttgtctgttaaataaggctcttataaagctctgttatctcttcaacgcttgtttctcttgggttaccaggtctgcatgcatcatcataagctgactgtgcaaggaatggaatatcctcttctttaacaatatctttaagatcagcaggaataccaacatcctgtgacagcttcttaacagcatctacagcagcttttctgtattcttcctgtgtcatatcatctgtacctttaacacccatagctttcgcaatatcacgatatttctcaccagttgctggagcgttgtattccataactgttggaaggataatagcgttagcaacaccgtgtggtgtatcatagagagcaccaagtgggtgagccatggaatgaacaataccaagacctacgttagagaatcccatacctgctatatactggccaagtgccatgccttctcttccctcaggtgtgttttcaacagcacctctaaggctcttagaaatgatttcaatagctttaagatggaacatatcggataattcccatgcaccagctgtgatgtatccttcgatagcatgtgtgagggcatccatacctgtagcggctgtaagtcccttaggcatacttgacatcatgtcaggatcaactactgcaacaacaggaatgtcatgtgggtcaacacataccatcttacgattcttgcttgtatctgtgataacgtagttgatagtaacctctgcggctgtaccagcagtagtaggaacagcgatgataggtactgcaggtttcttagtaggagcaacaccttcaagacttacaacatctgcaaactcagggttgttgatgatgatgccgatagccttggctgtatccatagaagaaccgccaccgatagcgataagataatcagtaccggcatccttgaatgcctgaacaccagtctttacattctctactgttggattaggcttgatatctgaatatacttcataagctaagttgttttcatcaagtacatcaagaacctttttagttacaccgaacttgataaggtctggatctgaacaaacaaaagctttcttaaatccccttgcaacagcttctgtagctatttccttaatagctccctttccatgataagatgtaccattaagaataaatctctgtgccataataaatatttacctccattcacgttttaattcatagttacattttaacactttgtcagaaatatacaagcaaaaatatcaaaaaatgcaaaattgtgtctaaattcataaaaaacattatatatatgtatacaatcgagcacataaaacgaaaaaaatgattattcatgtcgaaaaaattgtaattcatgcagattgttccacagacgtggattaattatgtattataagcatagtatcagggaactgttatccaaagataagtcaaagataagtataagggtgagatttatttttattcttttattgtaatctttatagatgatggttaaagcgggaattaaataaatacatataatttaccaatatataaggaggcgttaatatgaaaaggtttttgagtgtacttttgtgtacggcaatgctgattacagcagtacctggaatgtattatgcacaggggtttggcagtcagactgtatatgcacaggaaaaaagcgacagtgatatacaggaaatcgattaccagcttaatggaggccactatgtaagtggatatgatgctcctgtgaattatccagttcaggaacttcctgataaagataaaataattaatcagggatatgagtttggaggctggtatgataatgcacagtttgaaggagagcctgttactaagattgatcagggtgattatacaggtgtagttgtgctttatgccagatggatagaaagatattattatattgatatacctaagaatgttgatacagctggtaaggagactggtgaaatacaggtttctggacatgcaggaggtttatatgaaaaggataaggtgagtgtttcagtatcatcagataataagtggaagcttattaataaaaatacttcatatactgatattatgctggattatggactttatccggatggtaacaacaaagcgcttgtggataattctatcgtatcagagctttctaaaacaaagcttgataacacaagtaagtactttgtaagattgacagatgcaccggagtatgctggtacatattcagacagtcttacatttgatatatcctttgaaacaactaattataatataaagtatgttacaaacggaggaactctttattcaaagaataaggatgaacagcatggcagcgtagaactgacggaagagacctttgaagctggtactaagctttcgcagcttccatcacctggaaaggatggtgcggtatttcttggctggtgttatgattcgacatgtacagattatgtaagctcagaggacaggctgttaagcgatgtagtgttgtatgcagcatggactgacacacaggagttaaggactgtaagccttgaatcatttgcaagaagttatgatgttgatgcagatagtttttcaataactgtaactgataagacaggcagtcttacacaggatgatgtaagaagccttataacaataaagaatacaagtgacctgtctgatgagacatcagcagttgtgtctgcaaaggctgttttagatggagaatatacattttcagtagaaagcaatacaggctggcagcagggcagttcatatcgtcttgagcttaatgatgacagattatattttacaggttatgatacaactataagagagtacgattttactgtttataagccagaggtgaaaaatgccgggctgaataaggatataaagtatataagttcaggcagtcttagcaatcttatggttgatggcaagtcagtagataatatatctgtttctgccatgacagttggtgttgatggaactataacagattcaacaaaggttaccggaagttttacatatgtacagggtacattaagcttaggagataagatagctgtatatgaaggaaatgttattccttcacttgatacaacatcagtttcagatgatgatgtgtcattttttgagataattgcggtagatggaagcagttattcatacaggggacttgcagctaaggaaatactttttgttcctgatgtacttcctgttaatatgatagatgataaagacaatgatgctgataacaatagtgtcacgatagcacaggacaagctgtcttataataatgatactaacagtacagatgataatccgtcactaggtgaaaatacaactatagataatggggattatctggctttatatagtgatacagaggataatatccagtatgcagttataacagaggtttctaaaacagatacagattatataattttatacaatatggttacctgggaagaagtacaggcagctatggatatatatcagacagacaacatcaaaggtgatgatatattaaagaaccaggatgttaacgagattgaaagaagtgttgaacagcaggcagcagatagtgggtttgcacagagtgttgccaacgaagtcgcaaaggctgttgttatgacagattcttaccaggagctgaaagaatacttatcagacaaactttcagctgatataagtgtcagtgcagtcaatgatgaagaagatgattatgctatgcagtcagttgacgatggtatagcagcatatgcagatgataataaaccatctgtaagcatcgatcatataaaagcagatctttcaacaaagcttaagcactttgataatataagtggattaaggcttgcacttgatattggtgtagagattgagttctctaatatgaaggtagttgtttctgctgcgtttgagcaggaagtaaagatgaatatcaatgtaagcggtaaagctgtatggaaaaagtgggaggatataataccttatatagacgattacagagttgcagtttcgttggatctttatgattatacaggcattaattttaatgttgatgtaaaaacagcagaaggcgatgacgaagaagatgaagattcaacaaagcttgatatagtagtcaataaaatagcagaagaattaaagaatatgatggagcttggaactacatatatttctgagaattctgatatatcaacaaggctggaagatataaatgacttaaagaaagatgataatgaagatgattcagaggatgacaaggaaatatcagtggcaaaaagtcttgccgagagatattctgatatgcttgaaaatgaatctgactgggtggatttatacacgaagtcgcttacatcatcacatgtaagggttatagggatcatagatgtagcttttgatgttgaattcgtagtatcggctaatgttaatatatccatgggaatgacatactggtaccagaatggtaaaaggtatgtatacagcataatggtattcagtaaaaatgttacaagtgacactatagatttaagtgaagaaaagtatgagctctctgtatatgccataggaactataggcataagagctggtatacgtctgagtgtcagtgttggtcttatatcaacgaagcttgccagtgtaggattttcggcagaggttggtggatacgcacagatatggggatatctatactatcagcttaagtatgcggcatcagagggaagaaacagcagctctatgggagcgatatatatggaagtaggcgtatatatgcaggttgatttcctcgcacaggctttggcaggaacgttcagttataatccgacactttttgagaagcagtggcctttatacagtgtaggtattgttgaaaatgtatgcgatttcacacatgaccaggaagagtataaggatataaaacttaagcgtgatattaaggcagtgcgtataccggaaacatattttagtatgcagtatctggatatgaaggaaggtcttgacgatggtgagtattccaacaagatatttgctgatgacagcagatactatgctattacaatgactaatcctgcatttacatatgatccattaaccaatgtcataactgttgacccaggtgataaaccagagcaggacggagagatgataataacatggaagagccagaagggttccttcaatactaaacctattacaagaagaatctctcttcactgggataacttaagagatggatattatatagcattccagactaatggaggctctatagtagatacagtagtggctaagtatggaaaagaagtggctaaacctgaggatccggttaagactggttacacatttgcaggctggtatgaggatgaagctcttactaagaagtatgaaataccagatactatgcctaatgaggatagaatagtatatgctaagtgggaagcagcagatatgacatatagtgttgctgactatgtagaaggcacagatggcgtatatagtatggcatctatacgtacagaaactgcaaagactgatgatacggtaacagtacagccttcagaaagaagcggatttattacaccacctgtattatcatatgtagtgcaggctgatggaagcacaagatttaactactattatgcaagaaacaagtataatgttaagtttgtatcagaaggagagacagtttctgagggcagctacacatatggaacacagatgccgacaccttccgtatacagaccaggatatgagtttgcaggatgggaaccagaagtgagttatacagttcctgcaagagatgtgacttatacagctatatggaaagagtcagatgatgttgtgtatacaacaaagtattatcttgaagatgagaatggcggctatgtgatagataaggctggcatatcaaagggaacaacaggacagaatgttacagctgcagctgcggattatgatgaaggcagttatatcgtaaaagatataccttctggtatagtaaaggcggatggcagtcttgttcttaaagtatactatgacagaagtacatatgatattacatatgatacaacaggcggcaagcttgagaataacaagcagtcagttaagtggggaacaaaggttattacacaggttcctgtaagagatggttatgcatttgctggctggtatacggataaggagtgtacaaacagctttaatggtgttatgcctaaagagaatataacgctttatgcaaagtgggatatgtcaaaggttaattatactgttgaacattatatggaaaaaacagatggaagtggatatgagcttacagacagacaggtttatacaactgatgtagaaagtacagtcactcctgatgtgaaaaatgttaagggctttacatctccacaaaaacagtccgtaaaggttacagacagtacaaagattgttaagtactactataagagaaatgtacataagcttacactaaagtataataatggagaaaatgatggagtttatgagtacagatatggtactaagttatctgtaggacagccagtaagaaaaggttatatatttacaggctgggataaagatatagcagaaactatgccggatgaagatataacatatactgcaggctggaatatagcaaagtttactataagctttaaaacggatggtggaagtaagatagactctataacacaggattataatacagctataagcgctcctgctgctccggttaagaagggttacacatttacaggctgggataaggatattccagaccgcatgccggcagaaaatatgcttcttacagcaaagtggagtaaagatgtatataagatagtgtataatctgaatggtggagaagcagataacccaggtacttatgaggttgacagcagtgttattacacttaagacaccagtgcgtaaaggttatacgtttacaggctggagtggaacaggcatagatagcacaagtaaagaagtagttataacaacaggttctacaggagacaggacatatacagctaactggaaggaaaacagctatactgtacagtttataccttatggtgatggaacaacaggttctatgaaagaaatgtcacttatgtatacagctgaggcagctatagaggataataagtttgtaagacctggttatacatttgcaggctggtctgttgaagcaggcggcgagaagaagtatgagcctggtgaggttataagcagacttaagtcaggtgatggcgaaagaatcactctgtatccagtatggacagcgaatgaatatactgtacattttgatacaggtgccggtgaaaagcctgatgatatggtttatacatatgataaagaatatgaactgccagtcactacaagaagcggctacaggtttatgggctggagtgttgaggatggtggagcagttatatatcttccaggagcatcagcatctaatctggcatgcgaaggtgaagtgacattgtatgcaagctggcttaaggtagagtttaactatagcacatataacagctatcatgttacagatgatagtaaagaaacaccagtcaagttccattttatgataggtggaagccaggcgggcaattcatcaacagatggtggacgtaccaatgttatatatatggatggaatgaatttggaagagttaaagcgcgtatgcagtacaatgacatttactattacatataagcttgatatggacaaagatggatgggcagatatggatataacgtataggaaagcttctaaccagagctggcatggatttgcagaaaaagatatagatataaagaagaataatggtaaaacattaacttacacgtattctataaatatttcagatgtggatgctatatgctatagatttgatgcacatggagatttagctgataaatattggcttagaaatatcagattcaatgcaaagtttcattaaagagtatcaataatatataaagaagtttataattaaaatttgggctgtcacactgattgatcagattagtgtggcagctctttttgacaagagcgcgagccgggtgccagaaccaaggtccagtggaccttggctttggcacgaccgaggggcgctttagcgtcccgagaaatcgaacccttgctgtaaaacagcatgggttagagaagtgca

SEQ ID NO: 539 - DNA, 490 bp, Unknown
  gut microbiota DNA sequence
atgttattcgtgataagaacaacaatgctttggtgtttgatacggtagacaatgctttacttagaaatcctagtgcgcagccactgtttcacagtgacaggggatttcaatatacaaacaggctatttcatacaaaacttataaatgctggaataacgcaaagcatgtcgcgagttgctaaatgtatcgacaatggaccaatggaaggcttttggggaattctgaagagagagcgatactatggaaaacgattcactgatagaggtactctcgtaaaaatgatcgaagattatatagattactacaacaataaacgcttgcaaaggaatctcggaattttaacaccaatggaaaaacacaaaatttacttgcaagctgcataaaactgccagcagataatttctactggcaggaaaaatttatattttttcaattgtctacttgacggggagcagttcaaaattcctgttgtcatatattgataatactc

SEQ ID NO: 540 - DNA, 953 bp, Unknown
  gut microbiota DNA sequence
taattatttatgcggcagaaaatataaagtgatatttataaatgatggagaaatagtaaataatattgaacagcctgataatcagatatacgttggacttattcccaaaaacaggctggctgcatacacaccatggccatataaagcgataagagagggggctgaagactttggtggtgagtgcagggaatatcataaccagcttgttggggaaatagttccatacatccgcaagcattataatgtgtatgcagaatcaatggcatatggagggtattcactggggggtcttgctgctatatatagcctgtattttgatgaaacattttctactatattttcagtctgcggttcgttctggtatccgggttttgcagactacgtagttaataataatgtaaaaaacagaaatgcagctgtttatcttctcaatggtgaacaggagggggtaaatcacggaaatctgcttgaacaggcacccgtaaaggcacatatggttcatgagcatcttatgtcggttatgaatgctgtaagtatatttgatgaatatggacatcacgaaaataagtctgaaagaattaataggttattatctgttctcaccggcatggaaggaagttatgagaatggtgggaaagaaacaaaatgaaggtgagaagaatctggcgtaagtaagattgcaggcttgcgaaaatagtgcaataagattgataaaaaattaaagaccagcaaatcatcaacatacaactatatataataactttgatataaagaagcagagcaagtactaaggcaacgaaaacctttcagtacttgctcttattttatcactaatgcttacataaaaatcattacacaaaatagagcaaagactttgtgagttgaataagaaaaaattttgtgagttgaataagaaaaaattgattgacataacaaaataatctgcttataat

SEQ ID NO: 541 - DNA, 1166 bp, Unknown
  gut microbiota DNA sequence
agatgcatttcatcttgtgccaagaattatcagagcagtatgtggaagtagtgataagataaagaaacagctaggaattggattgcagatatcttctattacaatgacagctttttatattattttgatgtttatctggaaatttacatttccagggtttacaataccagtaataattgaggttataatatggatatcagcaattgttagaattgtaatatgtatgttcccacagaataactggtgtacagatgagggaaatatgaaattatccgttattagaaattcagtttttgcagttactggcataggcgtaattattctgtatttgatttcaggaaatgcttatggatatcatctgacaaggatggtagcagcaattattatttcatttggatgctatataccagtaaccttattcagtaaaaccaaaccaaaggttggacttttaatgattccgaagacttgtgcatatatgtggattatagctatgggacttcagcttttgttttagaattgtaagaattataataaaatattatcacatggaggtataacattatgatgaaaattaaaaattttgtagatcttatgactggtgagtttgataacaaagagcagtttatggaaatgaaggaggctggtaaaagctttccatacgcacaacatgtaaatactgtctgcaatgataaaataaaaaatattccagaggattttaatggaatatttgttgtagaggaaagttattatgaaacagatggaaaacgtcatgcatcaccacatttatttctaattacagatagtaatgatggaattatactttcttcttatgaaattcctgcaggagaagacaagaatacattttcctataactcaatgaagagtgtagattatagtgaacttagaaaatctgagaagtttacgccagcattatataaggaaaataatggaagctgggagggaggaagcgtaagccagtttactcctgttatgatattcagattatgggaacgtttttcagaagcttgtcttgaggtatcagaaagcatggaagtgaatggaaagagaactttcggatatgatgttcctattatttataagagagtataaagtaattgtttagtcagagagaatacaatgcacagtatttaatattgccagccgga

SEQ ID NO: 542 - DNA, 605 bp, Unknown
  gut microbiota DNA sequence
gccaaaccacttcgcagtgcggcagtataagaaatataagctggcagccggtgttgtatgctctaaaagacttcttaatcaagcggttgggaagtctcttagaacacacaacctaaaaccgaagaaaggagcgcaagttatgaaaaaaaacgagaaaatcacagctctgtacgaacgactgagccgtgatgactttggcaaagatgatgaccaacagcgtgagagcaattccatttccaatcaaaaggctatgttggaggagttcgccgcacggcagggctttacaaacattgtccatttcacggacgatggcattagcggcacctgctttgaccgtcccggatttttggcaatgatgaaagaggttgaagccgggaatgtggagtatctgtgtatcaaggacatgagccgcatgggtcgtgattatctgaaagtcggtcagattatggaaatcctgcgtcagcgtggcgttcgccttatcgccatcaatgacggtgtggacagtgccagaggggacgatgattttacccctttccgcaacattatgaacgagtattacgccagagacaccagccgtaaaatccgttccactttccagtccaaag

SEQ ID NO: 543 - DNA, 657 bp, Unknown
  gut microbiota DNA sequence
tgttcacaaaagatgtatacttaattctaatgaatcattgtactcatctcgaaattctaaaaagaattttcaaggttgtctttctgttcagttatcaaagagctttgttgttagcaatcagcgttgctcgctgacagctatgatagaataacattgattcagaagtttgtcaagcagttttttaaaaaactttttaactttattttcacaaataatacattgtgttaacgtcatctttacgtaccaattgtatattgtagaaaatcttcttctgtgttactccgtaccgcagaacttttatatcctttggcataaaaaaaccatctaagaagttatagatggttttcagcggagaggatgggattcgaacccatgcgcccgtgaagacaaacggttttcaagaccgccccgttatgaccacttcggtacctctccatattccacatattctgtgttttctttgtcgttgtttgctgtaccgcaccgacgactttgttataatatcatcctgtatatagtttgtcaacacattttttaaacttttttgttatttttttgctttttgttcgtaaatccgcttatttactgggtttgctggcattttatttttttatatttttatgataatttacttcattttaaaatgtaccctataga

SEQ ID NO: 544 - DNA, 2051 bp, Unknown
  gut microbiota DNA sequence
ataactacctatatgaaaagtcttagagacagccgattgaagcttctggcattgaacatagtgtgcagaactgcctgtagcttatatttgtcgtccgttcatcaccaactaatattcaattaaacaacaattataccaacgcagctccaagcttcctgcattccgccttggcatcatcatccggtgcctcattacagattacaggagctgtgacaatgtcagcacctgcattcttgcatctttctgcccagtcatccatccattcaccacttccccagccatatgagccaaaaagtgcaatcttcttaccggaaaggcttccctcacattcagtgaacataggctcaaattctgattcctcaagattctctgctcccatggcagggcagccgaaagctactgcatcatatgcggcaagatcagatgcactgaattccgatgcagtaaaagttgttacctctgcacctttttcctttgctccttctgccacttcattagccatagcctctgtattacctgtaccactccaatatactactgcaattttactcatttcttgtatcctccatataattatattattctttttgcaataacatcatctgatatgttatatgccatatatgctgagtgaatgcagattctatgcattcacggtcaactgatttaatgttcttccttctgtaaacaccttgtggtataccattgaacattttttaaaacgctcaaagattcttatactttcctgctcgttagaatacaccttccacacgccacagaacttacaattctgccccttgttgatgataaaatctttgacatcctgtgcaggatatcctaaaaaaagaccaatctcatgaggaaaacatggattttcataaagacgaagctttaatctttttataacttcttctacatttctggacgtatatccataatcagaaagaatattccatacttcatccttattaatatccctgaataaaagacttcttctgtatacatatataagtgcacttgcatcaccacatctaagaacttctatatataatcccttaacgttaagttgtttatttgcctctgcaagctcctgcataaactcttccctgctactatatttataattaaacagatttgctgtttttatgcctgccagtgtaggtgcacattctcttaccagctgtgtttcaagtcctttactcattgccatcctccatgcacttatttttacttgtagtttttcgttaccagtctttattaacatgccttgttttcagctacatattcctgaagtacagcattaagcgatgaggcgctgcttgaatgtgcacgtacaatatggatatccttactcttagcttctgtaacagcgctatgcaccatcttatgtgaaactgtatttgtaaaaagtatcataagatccggatttcctatctgtttactgaatccgcttttttcctttacaaatacctttgctttacatccatgcttcttacatattttttcatattgacataccatgcactcatttccaccaattataactacgctcatgcttatcctccttgttctataaattataaatctgttcgttttgtataaagattgataatatatcctaaacagctagttaatgtttttctaacttttattagtttactctaaccttattcttataaataaacgggtctggatacccgtttatttataaaatgtatataggcacatgcttgttagttttatctaaccaccattatgataatctaacttatagtttttgtcaacctttttttaatcataataccatggtcacccttttttatcatgataccatggtcatgataccaggatcaaaaggtctacacctacatgagcttgctcacagatgagtaaaataccttggaaccccgacatcatatcatacttctaatcacattttacccatgacttattatcaaaagtcatgaatagctaaaaaaagatatcagttttatgaatctgccataaaactgatatctttccatcacttatataagctgcaacacatactc

SEQ ID NO: 545 - DNA, 3634 bp, Unknown
  gut microbiota DNA sequence
ctttcctgaacccgatacacctgttacacatgtaaatactccgagtggtatatcaacatcaatatttttaagattattctcccttgcacccttaacagttatccagcctgtcggctttcttctcttagccggcactggaatcctgattcttccgctaagatatgcacctgtaagtgaatccttgcatgccataatatcagctgctgttcctgtcgcaacaacttctcctccattacgtccggcacccggtcctatatcaacaatataatctgcggcacgcatagtatcttcatcgtgttcaaccacaataactgagttaccaagatcacgcaaatgtataagtgtcccaagcagcttgtcgttatctctctgatgaagtccgatacttggctcatcaagtatataagccacaccaacaagtcctgaacctatctgtgtcgcaagtcttattctctgtgcctctcctcctgaaagcgtacctgttgctcttgataatgaaagataatcaagtcctacatccataagaaactgtattcttgccttaatctccttaagtatatctgcaccgataaacttctgtctgtctgtaagttcaagcttatctaagaacttctttaacttaacaatagacatatccgtaatctgatatatattcttatctgctatcgtaacagcaagagatgatggctttaatctctgtccgtggcaggatttacaaggtcttatgcgcatgaattcctcatactgctgctttgcactgtctgagtaagtttccctatatcttttctccatattatggataaggccttcaaatgctatatcatactctccaacgcctctctggcctttgtaatgcactttaacactcctgccattagtaccatttataatcatattcttaatatcatctggataatccttaaatggtgttgataaactgaagttatattcctttgcaagtgcactcataatagcccttgaaaagctgccctcatcctttacagactgccatcccataccaactatagctccctcatcgatgcttaatgaatcatctggtataagaagctctgcatcaaaattcattgtataaccaagtccgtaacaatctggacacgcaccaaatggattattgaatgaaaagcttcttggctctatctcatctatgcttatgccacaatccggacacgaaaagctctgtgaaaagttaatcggctcaccgtctataacgtcaactgtcataagtccctctgcaagcttaagtgctgtttctattgagtctgtaagtcttttgttaattccatctttaactacaagacggtcaacaacaatttctatattatgcttcttgttcttatcaagatttatctcatctgtaagctcatacatattgccatcagcaataactcttacataaccactctttttagcctgttcaaaaagcttcttatgttcaccttttcttcctcttacaactggagctaatatctgtatctttgttctttctggaagctccataatagtatcaaccatctggtctacagtctgcttgttgattaccttaccacactttggacaatgtggagtacctattcttgcatataataatctgaaataatcatatatctctgtaacagttccaactgttgaacgtggatttctgttagttgacttctggtctatggaaatagctggtgaaagtccttctatgctctctaccgccggcttttccatctgtcctaagaattgccttgcatatgaagataatgactccatatatcttctctggccttctgcatatatagtatcaaaggcaagacttgacttaccagaaccagacagacccgtaagtactacaagactgtcccttggtatatctacatcaatatttttaagattatgctcacttgcacctcttattcttatataattcctgtaatcgcctttttccatattctattttctccgttatttcttctttattaatccttaaccgcctcaattaaaaagactttttctgtaagcagcaaatgcttttatacatttgacacctacatcatataataccataatgataatatctgcctgccattactgactgcataacattgcttttgaactcgtagcttaatctggcttaattgatatcaagctataaatgagcaaatttaaaatattgtacaattatgttcctgttatgaagatatattttacctaatctattgaaatgtatgtcaaccacaaacaaaaacgattatttaaaaaactgtaaaatatatcctcttatcacttgcctgacttcttatcctcataaatatacttattaatctcgatcatcttatcacgaagcatagccgcctgttcaaaatcaagctctgctgcagccttacgcatatttttctcaatctgcttcttaaccttttcaagatctttaatactcatagattcataatctacatcaagccttccatttgaattatctgcttctgctgccttagatatacttataagatctcttactgccttctttatagtctgaggggttattccgtgtacctcattgtactcctgctgtatctttctacgtctttctgtctcagatatagccttttccatagactctgttatagtatctgcatacataataacgtgtccctctgcatttctggcagctcgtcctatcgtctggataagtgaagtctctgttcttaagaagccctctttatcagcatcaagaatagccacaagacttatctctggaatatcaagtccctctctaagcagattgataccaacaagcacatcgaatccgtcaagtctcatatcccttataatcttctgtcgctctagtgtatcaatatccgcatgaagatacttgactcttatgccgacttccttaagataatctgtgagatcctctgccatacgcttggtaagtgtagttacaagtatcttattctttttctcaacttccttattaatctcacttataagatcatctatctgaccctctattggtctaactgttatctctggatcaagaagtcctgtaggccttataatctgctctgccctcataagttcatgttcttcctcatacctgctaggcgtagcagatacaaaaagcatctgtgatatcttgctctcaaactcctgaaaattaagcggtctgttatccttcgctgaaggaagcctgaagccatagtctacaagtgtcgtctttcttgcctgatcgcctgcatacattccccttatctgtggaatagtaatatgtgactcatcgacaataatcataaaatcatctggaaaatagtccataagcgtatatggtggacaccctgccggaagccctgctaaatgtcttgaataattctcaatacctgaacagaagcctgtttcctgcatcatctctatatcaaagttcgttctttcttctattctctgtgcctcaagaagcttatcctcactcttaaaatactctattctctctgcaagctctttctttatattctcaatcgccttttccatcttctctttttcaacaacataatgtgaattaggaaatatagcaacatggtcaaggttacatttaacctcaccggtaagagaatcaatctcgcttatcctgtctatc

SEQ ID NO: 546 - DNA, 3882 bp, Unknown
  gut microbiota DNA sequence
gctgacggatatatctctacaacatctccccttaccctgaaggttcctcgcttaaaatcctggtcattgcgcatatactgtatatctataagctttcttatcatctcatctctgtctttttccatacctggacgaagtgagataaccatattcttataatcaataggtgcacctaatccatatatacatgaaactgaagcaactatgattacatcatttctttcagacagtgccgctgttgctgaatgtcttaacttatctatctcgtcattaatcgaagaatccttggctatataagtatcgctctgtggcacataagcctccggctgataataatcataataagaaacaaaatactctactgcattctcaggaaagaactctttcatctcagagtacagctgtgctgctaatgttttattatgactgattataagagtaggcttctgtacatgctggataatgtttgccatagtaaatgtcttaccagagcctgtaactccaactaaagtttcaaactgattaccttcattaaatccttctacaagttcctctatagcctggggctggtcgcctgttggctcatatggggcatgtaacttaaactccataatgccatctccttcctgaaataagattcctacaaaacatttctaaaaaaagacaaagtcaatatttcatagtatgcacttacatgcttaattctactacaaaaaatagactttgtctatctaatacagaacatctgttcctattttattagtggataatccattaacattccttttataaacagaacatttatctgcacctgttattatatttcgttttcattcagtatcatgcaaggtctgaatactactaacaatactaacaatactaacaatactaataatgctaataacaatattaataatactaacaatattaataataatacagcttaattcataactgccttcaggctgtctatagctgcgttaaactgtgtatcctcatcagcattcttatcaaattccacaacaacatccggggtaacaccatttccatgtatatcctgtcccttaggtgtaaaatacttggctattgtaaacttaattgcacttccatcggtaagcggctttagtgtctgtacaataccctttccatatgtctgcgttccaactatgatacctttttcgtaatcctgtatagcacctgcaaatatttctgaagcactcgcactatttccattgacaagtactgcaagtggaatatccagttcttcattatcactatcgctgtattcttttctatttcctgccttatcttctgtatacacaataagaccatttggaagtatatatttaagcatagtaactacagttgtaagcaagcctcctggattatttcttatatctataactattcctttagctccctgccccttaaggtcttcaatagctgccttaaactgttttgccgtaacactttcaaactgtgaaattgctatatatcctatggaatcatctgtcattgcatagtttacagtctggacttcaacttcgtcccttaccactgtgtaatcacaagtaaccccttctcttacaataccaagtctgactgttgtacctttctcacctttgacaagtgcaactgcagaggacaaatccatatcagtaacatctgtatcatctactttgactatcctatctccagttcttaatccggccttatatcctgcaccattatcatatacatctacaagcaggattccgccttcttcacttaactgacagacagctcctattccgtaaaatgtaccatttgtagtttccttaagtttattatactcatcagctgtataataaacagtatatttatctccataagaactaagataagctttatatatgttattcttggccttttcctcatcaacttcgtcaaaatagaaagaatccaggacagaatctatagcattcagcttagcctcaacctcacttcctattccacttccatctgtaactgcatctgactggatatatacatcaccattaacacctatatgaatatatcccttctgtatacacacaccagccacacttacaacaattataaccattacaagaaatgcagctactataccaagcagcaatccattcttaaaataatgagacctttctctttttttctcatactttgctgcttgttcaaatatgttatcttcatttcctgctatctgttcttttgtatggattgatatatcatcttccttattatccataacaacctccattatcatataaatgatgtcgggggcaaaagcccacgactttgatacctacgaattgctccgtgctacgcactcccacaattctccccaatattcgcatatcgtgggattatcatcccacttttatgctcatatcggggcgggtcccaaggtctaaacccacctatgagcaagctcatgtgggtttagaccttttgaccctggtatcatataaataccgaaacaagtatcaaatatcatcataaaaataatttcatatcataatattgacatcttatgatgtaagtgtcgaaatgaattttaacactcacatcgttttattatactacaaaaacattttcagatatattaatatttataataatatgtgaaatttttatgataatttactatttatgtgccatacacactataactatcccactctccctgcttttgtttttactttattcttatacatggactcatcagctctctttactacttccagcacatctcttccgtaacccttcgccattcctactgcactcgtaatctttaagttacttcctgcattggccttttcaatcatgtctgctgccgatattgatatttcttttccttcatactcgccaggattatctattatcataacgaattcatccccaccaattctatatacacgccttctgtcatctgaaaatgaatatagcacggatgataatctttcaatcgctttatctccatattcatgaccatatgtatcattaatcatcttaagattattcatatcccagaaaataactcttatattatctatataaggataatatgttaaaaccatttcctcatacttattcttgttaaatacctttgttcttgaatctgtctccttcatatatgtaagctgggctatccttgcggcatcctcacttccaccaacgactatatcctgaagtataaatgtaatagccaaaagaatcatgcatcttggtatcacaccaaaaacaataataacaaacagtggattcgaattaaatacatacccggttccactttctaatacattaatataccagtctcttttatgacttccctcaaacaatatattaagatcacagattccataataaaatcccagtgtcatacttaaaaacacagaaactgaattaataagtgatgtaaaccacaatatctttttctgtctgtaatgagcagcgaataataatggaatgacatacaaaagtactgcatgatatgacaaaagagcacacattacccctgttgcagtacatattaacgtcagacctatatatttataacattcttttgatgtatcttctttcataatcatgaacacaataggaatcaataatattatagaaataataactgcaaccgttatcgttcttctgtctatttcaaatattcctattgcgttcaatgcccatactacaagctctaaggctattaacataacaacgccatttaatgtatatttattagacttctcttcctgatatttaagttctttatcatactgtttcttaaaatcactcattctttctcccccgaaatatctcctctgattccataaacgtattttttattttatcactatttcatat

SEQ ID NO: 547 - DNA, 809 bp, Unknown
  gut microbiota DNA sequence
atttataaaattaattgatggaatattatctttatgtatacaggcatacaacctgtcaatataaagatattctcttgcatattcaacaatcttactgcacacctcatatgctattcctcgtctctggtattttctcccaacaagatatcccagctcctgacagtttacaccatctatgctcctgttttctatccccatacgtccaacaagttcccctgtttttttatcaaatacaagccacagaccataatcaaagaaaccatacatattagaaatatatgctgataaaaactctttctcacgctctgcttcatacaatggctctataaaagaacaatctgacaatgtatcatataatctgtatagttcctcaagatcattttcacattcttccctgactatataattattagtctctaagatataggctggtgtatgtgtttttctggcatatatatgttcacaatacatatcagttatatcttcataatcatatacaacatacgctgcacttcctctatattcttttccaacccccacatcttcacatatatcttttccaattgttatgctatgttttaatccatcacttataattatatctttatcatgatgatatccatccagactgttaaatataattttatgcttttttaacaagcctgcacttattgtattttttatatcttcgtaatcgcttcttttatctgaaattatcacatatattttttcaagtcctgattcgtatttcacacttatccaatccttattccttataacttttatatctgcctttattctttatattt

SEQ ID NO: 548 - DNA, 1052 bp, Unknown
  gut microbiota DNA sequence
tgcctctgattgattgtttttaccttttgctttagggattatcagtggataaattcctgttgtcagatattgataatattcaacaggtgacaaccttgctaagtcccattgataacgttctgtattataatattctgtccaatccctaactgcgtttaatatctcctcatagccgtagcactctgatagatctaattcatctttcatatgaccaaagaatgattcctgaggagcattgtcccaacagtttgctctacgtgacatagactgtctcagttcgttatcctttaacaattggataaatttaatgctggtatagtgagaaccctgatcgctatgtattaatgtttctgtgcttaaatcagttccatgtttttctattaactgctttactgtttctaatacaaaatcaatttctagtgattcgctgagaacccatgacagaagttccttggtacaggcatctataattgttgacatatagcaccggggtgcttttccatttataatatacgtgatatccgttaacagaatttttcttggtccgtgttcctcgaattcacggtttactatattgggtgcggtatatgcagttgccattgcttttgccattctccgatagggatttgccttgcggataaggcactgtaagttgtacttcttcatcaaccgccggatttttttgatattcatcactatcggcgtttccatgtgtaacagcctcatatatatgctacgggcacctttatgatatcctcggtactggtatgctttcagaatcagaagaaaatcctgtctgtcctgttcctccctttccattcgctggtcttctgttgagagataatggtaatatcccgaacgggatactcctgcaatttcgcacatggcagctacattcaatagattatcgtttttttgcatggtatcataaataatctgatactttgcatgggctggtattttcattattccggagcctccggatttaaagatacaattttttttagaaactcaatctcctgatctttatatgccagttgcatttctaaata

SEQ ID NO: 549 - DNA, 954 bp, Unknown
  gut microbiota DNA sequence
gggcactgtaagttgtacttcttcatcagccgccggatttttttgatattcatcactatcggcggttccatgtgtaacagcctcatatatatgctacgggcacctttatgatatcctcggtactggtatgctttcagaatcaaaagaaaatcctgtctgtcccgttcctccctttccattcgctggtcttctgttgagagataatggtaatatcccgaacgggatactcctgcaatttcgcacatggcagctacattcaatagattattgtttttttgcacggtatcataaataatttgatactttgcatgtgctggtattttcattattccggagcctccggatttaaagatacaattttttttagaaactcaatctcctgatctttatatgccagttgcatttctaaatattttatccgattttcagccgaaagatatccgttgcagccctgtgcataggtgttaagatcacgaaaaccatttcccttttttacttcatttccaatcatggttttcagaccatttattctggaatcccccaggatatttggatctatcccaagagtcgaaacaatctcacgtggaagcctgccctttgacagttcctcccaaaatagttttttaaattctgccgagaaatgtacaatgctcggtgatacatccaatacatatttactatttctcagtgtgagcatttcctgttctgtaaactttttgtttgccataatttcctccaattcatttttattgtaatatcaatctgaatcggagtcaaaaagcgattttgtccaaaataaaggggttcatcaaaaccatgtccgaatttaagggttccctgtaaactcattgtctagatttaagggttttcattaaaacttactgtccaatggtaaggttttttaaaactcaaactgtctaatctatagggtacattttattaagagatttaata

SEQ ID NO: 550 - DNA, 990 bp, Unknown
  gut microbiota DNA sequence
cctccgccatatttttactaaggatatcctttagtacattatcgcgtattgcttcatcaattgcaagtgctactgcctctgcaaatatttctttcttattgattgacttcatttcttttttatattcttttgtcaatgtatcacttttcattcttacaagtgtgataaatctggaatactccataagcttctgacacttttccatcagctcctgattacacccatagttgatattcaataattgtacgactacttctacgcttggtttatttgttttgtcagcctctgtacctgctgtatcttttaagccttccccttctggcacctgcacaaatgcatctgataatcttagttcctgctcctccggctgctcttctgttccattatagaaaacaacatatcttggaaatggcagcttaacaagccgctcattatatataagcagattattctgatctatatatcccttatacagctcagcaaaataaatcagccctcttacaggcatattgggattaacgctgctctgatgctcataaagattcaattcactgttaataatgaacgaaatatcattcttatagcctatatatatggcatcctctatcgtggtaattgttataaggctgtaatccatatgctctgtattattcaatgcgttgtacaaactaagcaaatcctttttatactttcgttgtaatcgacccaatatatgttgtaatcaacttattttttgttcattaaacaaatcatatcaaaatagaaaatataagataataaaaacggttactatattatcgctatgtaatatagtaaccgttattttaagctattcaattgtgttttcctccaaatcattattcttttaattaactattctacaatgaatttaattattcataatgcttggtatgtgtcatatttccattggactataccttcctttctcactcaattccttacatctatattaacattcttaatgaatgg

SEQ ID NO: 551 - DNA, 399 bp, Unknown
  gut microbiota DNA sequence
ccataatctgaccgactttcagatagtcacgacccatgcggctcatgtccttgatacacaggtactccacattcccggcttccacttctttcatcattgccagaaatccgggacggtcaaagcaagtaccactaatgccatcgtccgtgaaatggacaatgttcgtaaacccctgccgtgcggcgaactcctccaacatagccttttgattggaaatggaattgctctcacgctgctggtcatcatctttgccaaagtcatcacggctcaatcgctcgtaaagagctgtgattttctcgttttttctcataacttgcgctcctttcttcggttttaggttgtgtgttctaagagacttcccaaccgcttgattaagaagtcttttagagcatacaacac

SEQ ID NO: 552 - DNA, 217 bp, Unknown
  gut microbiota DNA sequence
gattctaagagtgtgttagcttatcctgccgactggatgaatagcttcggtaataattactatactcagtctcaagcgccagaattaacagaatttacagtggacaaaaactggcaaactgcttcagaaagtaaaccttataaagaacccgagctacaaaccactcccaaagaaaccattatacaaaatataaagaatattattacagaaattaaag

SEQ ID NO: 553 - DNA, 399 bp, Unknown
  gut microbiota DNA sequence
gtgttgtatgctctaaaagacttcttaatcaagcggttgggaagtctcttagaacacacaacctaaaaccgaagaaaggagcgcaagttatgagaaaaaatgagaaaatcacagctctgtacgaacgactgagccgtgatgactttggcaaagatgatgaccaacagcgtgagagcaattccatatccaatcaaaaggcaatgttggaggagttcgccgcacggcagggctttacaaacattgtccatttcacggacgatggcattagtggtacttgctttgaccgtcccggatttttagcaatgatgaaagaagtggaagccgggaatgtggagtacctgtgtatcaaggacatgagccgcatgggtcgtgactatctgaaagtcggtcagattatgg

SEQ ID NO: 554 - DNA, 247 bp, Unknown
  gut microbiota DNA sequence
tgaatatcaaaaaaatccgtcggctgatgaggaaatataacttacagtgtcctatccgcaaagcaaatccctatcggagaatggcaaaagcaatggcaaccgcatataccgcccccaatatagtaaaccgtgaattcgaggaacacggaccaagaaaaattctgttaacagatatcacgtatattataaatggaaaagcaccccggtgctatatgtcaacaattatagatgcctgtaccaaggaact

SEQ ID NO: 555 - DNA, 538 bp, Unknown
  gut microbiota DNA sequence
tttttccggcttcaaccttcagactgtgtactgtcgtatccagcttatatcccttcggtgcagaaagctctttgatgtaaacattccctgcagtcacttcaacttcattcgtatcgccattctcatttgttgtaagtgttccaatctgattactacaattctggtctaaaaatatgccaaaggttgctccaacaatggaatacatcgcatttccatttgtgacaatctcatttgcagttgtcttttttaccttcgcatttccgacattcagttctgcccaaaactgtccaagatcctgtccttcaccagtatagatatatccgccacatttatagcgacctttgtttgcctgtacaaatgctctcgctcctgcatacacttcattctgaatatcctgtgaaatctcagaatatgcagctcggacattatcacacttccagcccaactgttcactgagtctctgccatactacacactgttccagcagatatccctgattcgcattcaggttactgtgactgcccctatactgctttac

SEQ ID NO: 556 - DNA, 711 bp, Unknown
  gut microbiota DNA sequence
tctgttttcatatggcacaccattcatagaatagttggaactaatctgcatatatcaatactcctttttatttgaattgcattattatcattaggctttcgcttcaaaaactggtcttttctccagataatccggtagttcttttaattcagaattcataccattctttacggcattatattccttccagtaaatggaatagaattcattttttttgtaagttctgccgaagtcatttcatacccccagccggcaccagtatttaacaatacattcacaccctgactctgaatttgaacaccataaccacctgatgttaaaatagtgaatttttccttttatcaaatcctcttatgccttaatatcaaaacttgatctatcaggtacagaaatactcacagatcctgctacaaggctttgtgtcatactttttacatcagtaccagttacggataaggtataatcacccgtttcctttctttctgccgatttttctgcacgtttctttgcagctttttcttcctctgcttttttagcagctcttttctcttttactttttcctctttttctctgttctcttttgcttttcgttcagcattctctttcgctattttcccatctggatcatttgtacaagatgctgtctctataatatttccgtttgcatcaatcatataactctgatttgtcacagtgcccaaacatccatt

SEQ ID NO: 557 - DNA, 260 bp, Unknown
  gut microbiota DNA sequence
agttttcctccaaatactttgctttttccggatcattcatgcacttttgtaaaaatgcacttgaaacagataccgttgtcggaataccctgcattgaagtcagccctatattcatataatggtattttcctcgcaagtattttgaataatcatttacattgctataccccgtcttaatctgctctgtttttgtcacaccgggacgtgatgtttttaattcaactgtacttgttgtcacgttgccgtcttttgtatttgta

SEQ ID NO: 558 - DNA, 436 bp, Unknown
  gut microbiota DNA sequence
tttatgaaaaaaggaataaataaatcaatcttattttatattgcatcagttctgtttctcgtagactcagctatagactttacgagtggaaatgaaaattctatggctatagtatggttatgtcttggttcttcgtttctttgcttgggttcgactcataagaaaaaggaaaacaatacagatgataaataatttcctgcttgtattgctggaaaatcgggattcatagagtccttttgtgatttgcaactgctggttgacagatttacagcctgaaatggtggaatgcaaacagcaaaactgttatatttagctcataaaatctgcaaaaggaggaaaaaatgattttagctgataagattacagaggaaagaaaaaagaatggatggtcacaggaagaactagccaatcagttgggcgtatccagacaggcagt

SEQ ID NO: 559 - DNA, 887 bp, Unknown
  gut microbiota DNA sequence
tagtgcaaggtagttattctgtaagctccttcataagtgaatgtacagttgtaatctcatttatccgtccaacattggcaccgcagaagattaagccattatccacatcgccctttacagcatttataagagcttttgtaatacaatatggaacctttgcagggttacatttttcaagacaattgtaacatttggaaatagggattcttgaattgtcaagttgtttaataaatgcattgcgaagagctcttccaggcattccgacaggactttggataatctgaacgtcttcttgtctggcattgatataagcctgtttataagcaggtgatgcatcacattctttagtagcaacgaatctgcttgctatctgtactccatcagccccaagcttaattgcatgaataatatcctgtttatcgaatattcctcctgcaacaataacaggtatttttttggagtatttatcttcatattcttttttacattctataatattagttatttcattatcgaaatcaagtgaagctgtattgttcagctgttcattagaaaatccgaggtgaccgccagcctttggtccctctattacgataaaatcagcggttcggtcatacttatgtgaccacatttttaatataagctgtgcagctctttttgatgatacgataggagctatcttagtctgacaggctttgtctacaagtgctggtaaatcaatcggaagaccggcaccgctgataattacatcggcacctgcggcaaccgctgcttttacatgttctttataatgtttaagtgcaaccataatatttacaccaacaagtccattaccaccggcaatttctttagctttgcggatatgcatctttattgctgctaaatta

SEQ ID NO: 560 - DNA, 1139 bp, Unknown
  gut microbiota DNA sequence
tatcgcttggtgtgtttggtgtatcgcttggtgtgcttggtgtgttatctcctggtttattatctcctggcttattatctcccggtttattatcatcaggcttaacatctgaaccagttactaccttaccatctacaacaagctttatatctgagaatgttacatctgcctgtcttgctacaaataaacctacatatacataatctgcatctattgatgtaagcttgaaatcaaaaccacctgatatagcagcattatcgccaaatgtacatgcgtatccatcactgttactctcaatcttaagtgcatatgtcttaccagcctctaccggattctctaatttaccaccatagcctaatgcaccatcttttctcttaaagcagttagctgttccctgctggatacttcctgctgcaacataatctccaagagctgacttatcattaacatcaatatacatcgcatctcttgccataagaccaaatgccacctgattgtgtttattaatgctgtttactgttgcattagctgttattacaaagttactatctgctggtactttataataatacattgccattccatctgttgttgatgatatctttcccttaccattaacagcaatgtgaatgcttccatcttcattgccctcaagtataaacttatccttaataagatttggatctccgcctatatctccaaatattgaacccttgaaaactcctgcatctttccataattcactctgcttaagttctcctgaatattcagcttccttataatcaggattagacttaagtacatcagccttaacaggtgcttccttagctgttatatgttctgatattccagctaccccaagttccttaattgtcttagttacaagataagcattatatgttccaccataaatgtttgtatgtgtattatcaacgcttgtagccttagatgatgtccatgcatgaaggttgactgtctcatctggtcctaatgtatcatataactcttttgtcatcttagtcatatcaacaactggtatattaagttccttaccaagattccttatagactgggcataatctccacccttgaaatcaccactatcctttgtgatatgaagattactgtcagaccattct

SEQ ID NO: 561 - DNA, 581 bp, Unknown
  gut microbiota DNA sequence
actataccttctgcactctgatacggaatcaactgaaaggcactcatcaaatctgctggtactgtggcaaaatccatcattgaaaccgacagaatcaaaactttttaaacacacttgtagggattgcctaattcatccactttgatcatctttccgcttatactaattctcccataacagtcaatgaactttgtaccgttctttccaaagcactaaagcacaatgctataaatgaaggtaatgccaaattcccagttataccattgccctgaatattctgataattaatgatgtaactattcttttatatatactccattattcatgttcgcctatcttttttacagctgatcgtactttgcagcacttccttttgccttttccactgggtactttgcttcattctgcgacatcttcatattgatgatttcatctgcatcgatttccaatttatccatcagattttggcaataaactatgacatcagctagttcctctttaacatgctgtatatcatactctttatcattccactgaaaacactccaaaagctctgctgcttggatgtaaaacagttttgc

SEQ ID NO: 562 - DNA, 869 bp, Unknown
  gut microbiota DNA sequence
aaggcattcccatctgcaaaagtcttacttccaattcatctagtacactgatttcctcgatatatctatgtatactctctgtcaccagcccttctgattcaacttttgttccagctgtgacaatctgcagcaagcggaatacatcgtacttatgcttctttaaatctttttcattgacatgctcgccggctctctttcgttctaaaagattaatccacgcatacattttgaatggaatcagatgctctgctcccagaacaccaataccatcaaccactctacgtccggacatcataaatttataatagtcatcgttcagaagaatcgctgataaactggaagtatcatcatcaatatgaatcggtataattccctcttcaatttcaagaagatatcccggctttcttgaaaacaactcaatcatagtaggataaccgaatttgccttctgtgaagcggtaaaagtgcatattctgttcattcttccatccgcacttatagccgccttcttttatgtattcccagaatatgctcgcaaattctgggaagttgtcctccataatcaggatcatatcaatatcttttgtcgctcgaaacggcaagtctgcctctgagagtagaatatcgcaggcagttccgccgataatagtgtaataatccgtataatttttaaatttttctctaaaagagtctagccctggtaccatttataattcctccaacaatttctcaatactcatttctattctttcgtcttcgttacctttgaatgtacatgcaagcgaaacaggatcaacacatccttctcttgcaaaataagatggattgtatttccataattgtaccttcaagcagtcgtccatatcttcc

SEQ ID NO: 563 - DNA, 1251 bp, Unknown
  gut microbiota DNA sequence
gactcctgactaagagcggtttctcctgcgctaaatgattcaaaggttgcttcacatcgcataattgtaatctctttctggaccggattaatcaaatatgcttttgcattttcataatactctttgcgtgagtaatttctcttaatagcaatctctgttctggatttcatctggcggatgagtcccattccctctaattgggctgttgctcttgtaatggacgtcttggtaagattcaacttgttcgcaacttcactttttaacacagattcctcatcatccatatataacaattcaaggaacaccatctgtgttgcaggcatcatcttatctgtcttgacaagctgcttgcgatacacatcctgcaatataattcccataaatggtaaaaatacatttcccggcagatctacaaacggaactccgctttttaccagagcatttctcatggatacgctgtttaacgctacttcatatgctaccgggcactgcaatgcttcctcatactttgctttctgctttttcattgcagcaacacttagctccgtttccttcataacatctattatggcaaagttaacaccatatatttcaaccatcgtaatctcacgcatagtcataaaaatcggcaatggtaatttattcttgtattctgctatttttactttgcagccgaaatactgctctaattgcttttgcatatgacgtctccttgtaacatgtttttatatatgataacatattctttgttactttccaatcatttatgttattttattgtgatcagcttggtttttatgcatgtttaggtaaggtatacgattattattaatagtacaaccacatagtatgtattgcagtcaatcatcaaattgtttctttcatttttatcaattttgatacaaataccggaactaataattattctaataacaattcggaacattttgataacatttcggtgcatcgtaatgttcatacttatcaacttccatctcacgactgcaaatgcaacagttccatataaacaaaccgacacttaaccgacattcaaaccgacatttttttgtaacgaaaagaagtcccccgtaggaactcctttcaccacaaatcatattcatttttatcaaggacagtccggttgataatcctactgttttaataaaataggggtacaatggggcacaaatcccattctcattcctcaaaagccttgattttaaactggtgctagaatataaatagtacaag

SEQ ID NO: 564 - DNA, 702 bp, Unknown
  gut microbiota DNA sequence
tttcttttagtattatttgtagcttcgaatgaaacaacattcttaaattcgtcagataaatcttctctatttattctttgttctccgctaactactttagcatcttttagttttgctaatccatcatattgaattattattttttcaacttcttttattttttcaatatctttaaattgattaacgttaaaatatttaccatctttttttgttattgaaattgaagaattagaactttcatataaagtcttttctatttcattacttgatttcattattgttaaacaagaatacaaacaagatagaactatagttaatataataaaaattattaaagttctatttctctttcttgtaatatatgctatagcattttttatcactttcctaactactcctctctattttcttacacccaactgtacttaagctcaaacataacgtaagtaataggcatgctcctctttatactatttttttcataaatttttcctcctttatttttacacaatagcagtttataactattttcaataatattctacacaccttttatgaaacgttgatgaaatataattttttatttttccaaactatggtataataatataaatattatgcttaaagttgttcttacacaattagtatatgattgattagtatatgagcaagcataaactaactgaagaagaaaaggctctt

SEQ ID NO: 565 - DNA, 439 bp, Unknown
  gut microbiota DNA sequence
ttcacattccttgtcaaaagacatcggatcacagttcagcccattcatatgaggaatatgtatcatatcagagagatatggattgctttgatgaattgttaagtgcttcggcttacgtgagtaatcgctgtaagtacgaaattaaggatgcaaatactaaggaagaaatcgaagatgcttttagaaatagtaaaatattatttgttgatgatagttatgatgcgggaaaggcagtactgtattttgcgattgatatagataataaaagggcatttagatttgctagtagatatgttttcgttaattggtttagatatattcctataacatttaccgatagaaatcattataaatcaataattgataaggaacctttatttgcaaatgttccagcattgatagattttcaataattttcttgaagggaatgaattctaat

SEQ ID NO: 566 - DNA, 2510 bp, Unknown
  gut microbiota DNA sequence
aatgtatttatattggaaaaaagatatcttactcatatgcaatgtaagttggattggtgggatgatattattcctttagagcataaacagtattttgatgtatttgttagggaacatgaatagacgatgttaaggttagtggtaaaattaaatatgttgtgattataatgcataaacgtgtagaaataaaaatttttattataatacaagtatgtttgaacaaataatggtcaaaaactcatcgacatccgaccccacacacgttataatgtaagtaatctaataagaaaacagtgttatcattaccgcatacagaatgagaatggtagccataaatatgaattcgcaggaacggaatggttgaaccctcagggtgacagtgtcactcatttgtcagcgagaagtgcttaactcggatgattttcagttttcttattttgacatggatttacaggaaagtcagtaaaatcaagttgttgcttgacttatgttgaccaagaaaaacatagattttctgtagtgacttgaactcctaaggggcagttgggggttcgattcccccagggaacattattttagcagcaatgattgaatgtgtcattgctgcgtttttaatatcagatggagtcgttacatttataacatttcagttgaaaagaaaaatcggaggtaataacttatgggatatgatatagagaaagagaaaagagaagcgatagatgctggatacagggcaatcaatagtttaaagacagccagagataatctgaacagtgcaaagaactggggattattggatatgtttggtggtggatttttctccacgatgcttaaacattctaaaatagaccaggcaagacaaaacatggaacaggcaaagtatgatcttcgtaatttcagcagagaattaaatgatgtgaatattgcatgtgatttgaatattaatataggagattttttgtctttcgcagactatttttttgatggatttgttgcggactggatggtacaggatcgaatcaataatgccagatgtcaggtggaagaagctatccgtagaacggaatatatcataagtcagttgcagcatatgtaaagaaaatatatcttaatagtaatgttgttatttgaatatttatggaggaataagataatgtcaaaggatgaatatttaatcacagatgcgcctctaaaagcgctgacaatatttgcaatgcctatgattctgggaagctttttccagcaggtatataatatggctgattcaataatagttggtcagtttgtcggctcatctgcactcgcagcggtaggtgcctgtgctgcacttacgaatgtctttatatgtgtagcacttggtgccggtgtaggtgctggtgtgcttgtgagccggtattttggggcaagggattatagtaggatgaaaacaattgtgtcaacatcattaatcagctttctgattctaagcgtatttcttggcatatttggttttggattttctaatataatgatgagtgcattacatactcctgctgatataatggatgatgcggtattatatctgcgtgtttattttgtgggttttatatttctgtttatgtacaacattctttcaacgatgtttacatcaattggtgagtcgaagattccgttgggacttctgatattttcttctattcttaatataattatggatttatggatggtggcaggcttaggtcttggagtgtttggtgcagcacttgcaacgcttattgcacaggggatttcggctgtgttttcactactgatattccttcaccggatgcgtagatatgaatgcagctttaactggtttgacagacaggagttatattctatgcttcgaattgctgtaccatctattctacagcagtcaacagtatccattggcatgatgatagtacaggcagttgtaaatcccttcggtacacaggctcttgcgggatattcggcaacaatgagagtggaaaatgtttttgcgttaatctttgtatctattggaaatgcagtttcgccatatgtttcccagaatcttggagcaaagcagagccagcgtattaaaaaaggataccacgctgcacttgtattagacgtatgttttgcagttcttgcattcatagttattgaaacattacatacgcagatttcatcgttgtttttaggaaaagatggaactgatttagcatatcaggtgtctggtgattatatgagatggcttggttatttcttcatttttatgggtatcaagatggcaacagatggtgttcttcgtggacttggaattatgcggccatttcttactgccaatatggttaaccttgcaatacgtctgttggttgcccttatatgtgctccacgttttggcattgaatatgtatggcttgctgtaccagcaggctggtttgccaactttctgatttcttatgtggcacttagaaaatcatggccagttgatgacgagcggcatacgttttaatggacttctatag

SEQ ID NO: 567 - DNA, 12583 bp, Unknown
  gut microbiota DNA sequence
tgtttaaatatagaaaatgtgaaaaaagtactaaaaagttaggagcggggcagggggcttttgttaaaaaaatagaatataaaaactaatgtccggaaactgttgactaaaaaaatatattctgctataaagatttgaaataaatataataattaaagaaaggaaataacaatctatgacaccacatataaatatgatgaaaaagaaattggaagatatgcatttgaaggaaaggataaattatggctacaaaaaagttatcattatgatgctgatatccgggctgttttctataatagttataggtgtgttatttgctaatatgtatcactatgtagaaaatgtttcggctgcagaccaggctgttaaaatgtgcagagtaaatgttaattctgctgcgagaaatataagagaaatggcattaaataatgatacatcttcttacaatgactatgaacttacagtaaaaaaattgcttacggatgttgattcccagcttcagattataaagaagagtggggttgtttcagaggcagattataatgaatatgcatcttatctttctcagtggggaaacataggttattcaatcatagaaaatattaaaagcggcaacaaggataaggcaactgaagaaattcttaataaatgtactcctgcattgaataagcttgttgaaaaagcaatgagcttaggtgatattacagataaggcgagcaataaggctgctataactacatttatatttgcagctgcaggaattgtatgtattattgtttgtctatcgattgcgtggatactggcaaagaggacaagtaagaaagtacttgaaacgattattgcaccattaaagtcagtagaaaatactgcagatgaactgatgaaaggaaatcttcacagcacacttgattataagtctgatgatgagcttggaagactggcacacagcctgcgtaactctattgctattcttggaagctacgtagatgatatagaccgtgcaatgaagttgtttgcagaaggcaatttcgatgttaaaccggaagtagagtggaagggtgattttgttggaatattgaattcctttatgctgtttgaggaaagtatggcagaaactattaaaggaatccagagagtttcagatgaagtatcaagtgcagcagagcaggttgcttcaagctctaatgaattagcagatggagcaacgaatcaggctgctgttgtagaggagcttacagcaacagttgcaggtgttgcagagcaggtggaaaaaaattcgcagtctgcaaagcaaatcagcagcagagttggaaatcttggggaagctatttctgagagtaacagtaagatgcaggaaatggttgcttctatgaatgatattaatgaggcatcaaatgagattgataagattattgcaacaattaatgaaattgcctcacagactaatctgcttgcattgaatgcatctatagaagcagcaagagctggagaagctggaaaaggctttgcagttgttgctaatcaggtaaatcttttagcagaccagagtgctaaggcagcaaaagaatctgctgtactcattgaaacatctgtaagagctgttaagaagggtatgacgattgcagatgagactgcaacgcagttagaagaggttgctggtagttctaagatgattacagaggaagttactgatatcgcggatacattagagcagcagacggaagaaataaagcagattaacgaaggaattgagcagattaatgatgttgtacagacgaattcagcaacatcacaggaatgtgcagcagctagtcagcagatgagcagcgaagcagagaatctgcgtgaaacgatacgaagatttaaggttgcagactttaagaagaaataacagagtagatgactttattatttctgaaaagtataagacagtatttacaagctctacaggaattatattttttgacaccataacatcataacatataggtgataaaatataaaaaatgtgataaagtattttatgatgatgtgatggtcaaaaggtaaaaaggcattcgagcatgcactatagattttttgacttgtgacacaacccgatatgtacaaagaatgtgcacagaaatgaggatgagtatgaattatatagtgttggatcttgagtggaatcagagctgcaggggtaaggagtatactgttttaggactaccatttgagattatacagataggtgcagttaagcttgatgagaataagaaagtaacaggaaagtgggaacgcataataaagcctgttgtatacacgagacttcatggaaaagtatcagaaatgcttgggattacagcagatgaccttaaatcaggacaggattttaagagtgctgcagatgagttccttgaatggtgtggtgaagattataagtttataacatggggaggttcagatcttacagaatttcagagaaatatgaagtattttggcgtggaaaatccttttccttttccattaacatattatgatcttcagaagttatatagtaaggtatactctgacggaaagacaagaaggagcttgaaaatagcgattgaagagcttggatttttggaagatgcagagtatcattcagcaatcaatgatgctatatatacagcaagaatcttttctaacatggattttgacagtgtgagcatatatgaaagtatagatacatatagaatcccatcatcaagaaaagaagagatatatatgaatttcaaaacttatgaaaagtatatatcaaagggttttaagacaagagataaggcggcagaggacaggacagcaagatcgtgcagttgttatatatgtaaaagtccgatgaaaaggcgtataaagtggtttgccacatcctcaaagaattattattctgtttttgtgtgtgatgagcacggattgtttaagggaagaatgaaggttaagcagagtgatgatggacaatattatgatgtaaggatattaaagcatacagatgaagatggtgttaataaaataatagataagcagaaaaaagagcgggaacacagaagacgtaagagaatggaagaacataaaaggaaagtagaagcaagaaacagctgtaataagtgatattaaaacagaaggctgggaggcaataaccttgattgtaggttattgtctcccagccttttgttttaatatgtacctataagataaatataattaagccattgacagacatgatagcgtaacaatcagataaaagatttatgatatcttcgtaggcttatgcgcgttcacatcaccattgaattcataaacagcgatgccgtatctatgtaagtcaataagcagtgaatctttatatccatcacattctccgtgaatacttgtgagtgttttcttctgattctttaaatcatcaccaagaacaagcttgtattttccttttataggaacaccaattctgtgatgcatacgttctactggtgtgaagtttaagacaaacagaagatgcctctttttatccggacttattcttataaatgaaaatacactgttatctctgtcgtttgcgtttatccagcggaaaccttctggactataatctgtttcgtacagacatttatactttttgttaagcatcatacatgctttggtaaattccttaagctccttgtgtgaaggatcttcaagcaggtaccagtcaagagctttcttttcactccattcgttccactgaccgaattcctgtcccataaagagtaactttttgccaggatgaccactcatgtatgcataggccagctttaagttggcaaacttatcatccttatcacctggcattttgccgagcatagagcatttaaggtggacaacctcatcatgtgaaagaacaagtatgaaattctcactgtacgcatacattaatgagaaagtcatctttccatgattgaactttctaaagtaaggatcaagtttcatgtattcaaggaaatcatgcatccatcccatattccacttaaatgtgaatccaagacattcaccattgtcaggatcaccacttaccataggccatgctgttgattcttctgctattgtaacagcctgagggaaacgttttttcatcatgctgttaaaatgttttaaaaagctcatggcttcaaggttgccgttaccgccgtatttgttaggaacccagttaccttctgttcttccgtagtcaagatagagcatggatgccacagcatcaactcttaatccgtctatatggaacttatctacccagaacataccatttgcaataaggaagttggatacttcattcttaccataatcaaatactttagtgccccagtcaggatgttcaccttttcgagggtctgcatactcgtagacacagcttccatcgaagttggcaagaccatgtgcatcctttggaaaatgtgcaggaacccagtcaagtatgatggcaatatgtttgctgtgcatataattaacgaaatacatgaagtcctctggtgttccgtatcttgcagtaggtgcataatatcctgtaacctgataaccccatgagccatcgaaaggatactctgcaatacccataagctcaatatgtgtatatcccatttctgaaacatacgctgcgagatcaggtgctatatccctgtagttaatatagccatcttcagtgccatcctcctgctttttccatgaaccaaggtgacattcgtatatagacataggtgacttaagatggttttcttttttcttggattctacccatgcactatctgtccatgtaaaactgttaaggtctgctacgatagatgctgtttcaggtcttagctgcgctgcattggcataagggtcagccttatatatagcttctccgttctgtgctataataaggtacttatacatctgtcccttcatggcaccttctacaaatagttcatatatgccgccatcggaaatctttttcatgtcatatccataggctttccagtcattaaactcacctataacatacacatccttggcagctggtgcccatactgcgaaatatacacctgtcttaccatccttttgtgcaacatgtgctcccattttattgtaaatctcataatgtgttccctgtccaaaaagataggaatccaactcgcttatccgcacatcattgtaattcaatatatcagccatataactccgcccttccacttatatttaactgatatcatatatcagttcacatactcatttgtataaaaatattttatcataatattcgattaaatactattaattttttgacaattggtcattttttattgcctttttaagtttaatgttaaaatgttacataataaatgattataatgagtttaatgtaacacttgacatcataattgcaggaatttatcataaagtatactggtttcatattatgatatgatgtaagtgtcaaaagcataaatcgcgtttgtgttcgcacagataagcaatttatatatattgacacgccgaacaccgaaaacggaataaaatggtgtgaacacgacattttatgaaaggtaatactaattaaggagaaatattatgatttattatttaataagtccaaactacataaatgtagtcacatttgtcagcatattgtttgcatttgcactaacatgcttcgcgatatatatgggaaagaatatacttccaagagatggcggaagagcatatgctatcaatggttcaaagtctgtaggtaaaccacgtggggcgggaattatatttatacttgtattcacgataacatgtatgattttcgtaaatcttacatcagagattattatatatctgatactggtgcttgctgccatgctttcaggatatcttgatgatgcatcctcatctccatggggagaactgaaaaagggtattatagactttattattgcagttatggctgccataacatatcttcactacaacccgggcacatttgatatagcactttttaagcttacagtcacacttaaccctgttatatatggaatacttatcgttattctcatatgggtaagcatcaatgtaaccaactgctcagacggagttgatggattatgtggaactctttcagcgattacacttagctcagtgttcttactgttcagaatatttgacatagaaagctcttttagacatgtaatacttataatggtcgtatgtatacttggttatctgtggtttaatgcatctccaagcaagcttcttatgggtgatgcaggttcaagggcaataggaatatttattgcattttcatttcttaagctgcattgtccactgttgttcataccgcttgccattattcttatagttgatggaggtcttggactgattaaggtttcattcataagatttcttcatattaatcttatgcagaatataagaacacctatacatgatcatatgagaaagaataagggctggtcagatgcacaggttgtattcagatttgctattatacagatagtcattgcggctgccgttatatttgctgttatgtaagtaaggttaatataacgataccaccgcccccgatatgggcataaaagtgggatgataatcccacgatatgcgaatatgggggagaattgtgggagtgcgtagcacggagcaattcgtaggtagcaaagtcgggggcttttgaccccggcatcatatcatataattaaaaatattaaatgccagtcttcagtaaatggaggctggcattttttgatgtgaaaatataatgatttactaaaaataaaactggtgatatatttattatatataggaatttttgtaatgatttattttcacagatacggttttaaatgatatatgaaaaaacaaaagatgatagtgtcgaatgacatatataaaaacgaaagatgatagtgtcaaatgacatatgaaaaatggatagggggatgtttatggaagaaacaagtaaagttggaactattaacaaggacacagtggttaatgttgaaaaggctttagcccaattgaataagcatatttttacatactatccatctagtaaaaaggttgtgctttcaagatatgagatggagcgtatgggtggaacgggtgaaataacagatataaaagagtcagagttttataatatgattattgagaaaaatcacctgctcaaaatgtttgaagcagtagatttgggaacagagtgtataagcaaagagttttcaacacttcagaaccagatgtttagaatctctatgtgtactataagttacgatgataatcataagcctttatgtactgttggacttcttgaatatatagaagatgactccaagcttaacaatattgtcagtgcacttatacataattttaacagtgtatattatgtagatgtagacagtgagcaggtatatccatataagatcaatccagcagtaaagagcatgcttaacagctctcttaagaatattccactatattcagaccttatgaaggaatacattgataagagggtagtcagtgatgaaaaggaaaatatgcgtatagagacatctcttgataatctgagagaacagtttaagataaagaattcataccagtatgactatagtattgtgcgtgatggtggaatcgcttattgcagagccaagtttgttaatatagacggaataggtgaattacatcatatggttgctggctttgaggatataagtgctgaaaaacagcgggagctggaacgtatagcgtatatagaccatataacaggtggtggtaattatgctcattttaaaaagacattaagagactgcagggagccgggctaccttatttctatggatattcatgacttcaagattatcaactccatatgtgggattatcaaaggtgatgaaacactgaagaatatatggagatgtatagaaaaaagcctcacttctaaagacctggcaggtcatattaatgctgaccgctttgctatatattgcagatgtgatgacaaagatgaggttatagagtgtatacataaaatcggggaaggtcttaaagatataacagaagcgcttaagatacctaatataataccttactatggaatatcacactggaagcatggcaaaaaggtcgaagaagcttacagcgaggctaattttgcaaagaatcaggttaaagagcgtaaagatataagttatcagttctatagtcatgaggatactttaaaaatacttgaaaacagggctatggaagatgagtttgccggtgcgatatccaatgggcagtttgagatatggtatcagcctaagtataatccagttgataacaagcttgttggtgcagaagcacttgtaagatggcgtggtggggatggaaagctgatatctccagccaggtttattccattgtttgaaaaggatggtcttattaagacactcgatgaatatgtgtttaagagcgtatgcaggcagcaggcagagtggaaaagcaagggcagacagattattccggtatctattaatctgtcgagggcgacactgtattttgaatcagtggcagagctttataagtgcattgcaaatgaaacaggcatagatacaaagtatgtgcctatcgagataacagaaagtgcagccatagataatgctaatatcaaggtacttgcagaccagttccacaacaacggtttttcactgcttgtggatgattttggttcaggctattcatcattatcaactattaacatgaaatgctttgataccttaaaaattgataaaagtcttattgattatataggtgatttcagcggcgagagactgcttgatcatacaataactcttgccaaggagcttggaatatcggtcacagccgagggcgttgagacgaagaagcaggttgattttcttacacggctgaactgtgataatatacagggcttctactattcaaagccactgtgcgttggagagtttaatcagctgcttggaagctgttaaacagtaattaaatgatgtcggggtcaaaagcccacgactttgatacctacggattgttccgtgctacgcactcccacaatccaccccaaggtatttcacccacctatgagcaagctcatgtgggtttagaccttttgaccctggtatcattaaatttttatatatttattccgaaatatattaaagacaggattatagaacgtatagggagcggaggttaagtaacggttatatgtcagtttcaatatatgcaggagattttaataagggtaatgttaaagatggagtgaattcaggtacatctattaactataaagagaataacgcagccagggcatatggtgtaaatggagcatttggcggggttatagtgtctgatggacaggacaacagcagattaaaggacaacacatatgagtcacttttaaaggaagcagatgatgtcagacagcagatcatggattctgcaaagacagcacagataagctttaaggcacttgtcaagaagctttcaggaatggaagcagttgatatatcaggagaaggatttaatatcatggattcttcaccagatgagatggtatccataatagataaaataagggtagagcttgccatgcattcagatgattatgtggcttatggtacaggtgtaagtaagagtaccatagaaaaggcagcaggtgttgccggagtttcatcagatgtagtggaaagacttagtggtgcaggtgtaagtatagatgaggattcattaagagaggcacaggcagcacttgataaagcttcaggtatagtggagcttacagaaaaggcaaagtattatatgatatccaacgatatagcaccgacaatagacggaatatataaagcagagatgtcagttgcaggacttccacagaattcaggatatcagatatcatttcaggagttcaatgcgatgagaccacagatagagtctcttataggaaaatcaggacttgctgttaatctgcagaatcttaacaacgcacaggagcttatcaacaataatataccagttacggaaaaaacacttaaatataaggctatgctggacacgcttaatcttgctggactttcagatgctgatggacagagcagggttcttgacaagatagctgaccagatggctattggaggagaagccagtgacacaccattaacgaatgatccgtctatatgggagaatgtaaaatcagccatcgtaacacttgcggatgcaagctatgatgatattatgaatgttatatcatcaggaaaagcatttacaatatcaagtcttaaggtggttatgcaggttggatggagtgcagacagcactacaccaggcagccagcagggtatgtatacagatcaggcgttaatgtcagcacagaaccagaagggtatatatacaggtcagcagaatatatatgcaggccagcagggtatgtcgggacagaatcagcagatagcatatacgggtcagtcagggatgtatggacagaacagttatgcagcgatgggaaacttcggtgcatatcagtacagtcctgaaaaggcgtacaatacactccttgaagcaagaatgcttcttactgccggctctggtattatacttgaacgaaacaacacaccacttctttatacacctcttgatgagatcacagagaaacttaaaacaatggaggctgatggtgcagtttacgccggaaatgtacagatgtacaatgatgtgcttgatgtcagaaaggctctttatgacattgagatagcaccagcacagatgtatgaaaagcttatgaacagtgatccatataagcttagtatatctatggtatccaatgtcgcaagcagtttaagaagtagatatgcaagggctattggtacttataagacagttggtacacagataagggaggatcttgatgattcgatacttaaggctgttaataatagtgccaatggaatcatagataagctggaacttgagaatacacaggaaaacagagatgttataaagcttcttgcatctaataatattgatataactaaggagtcagtagaaagagcaagaaaaatatattcaactcttaataatcttgtaaacaatatgaagcctgaaactgttgttaagatgatagatgccggtattaaccctatgaatacagatatatggacagtaaacgattatcttagcaggatgaatcagggagctactaaggataacgaggaaaaatattcaagattcctgtataagcttgagaaaacaagtggaataagtgaaacaaagaaaaaacagtttatcggaatatatcagatgatgaatatattcacaagagatgccggagtatgtgcaggtgcacttatgaagcagggtaaagagattacgatgggtaatcttataagtgcatacacaagccgcaagcattcaggtatagatgtgacaatagatgatacggtaggctttacaaaggaagataaggatatggtaagttattttgaatccttatttgcaaagtcacagcagtatatcacacctaatacattgaaagaatcagacataaatacaccgatagaagaccagcatgttgaacattttgcagagaatcttttagataactatgatgaaaagctggaaaaggagcttgatagcagttatatacaggatgtgacacagaaggcagcagatgcagatgctgaggttacaagagaactaagaagagcaggtattaatgagaatataggtaatatcaatgccgtcaatgagcttcttgcaacaggagaacttatggcatatacaagagctcttaagggaaaaggaataggaaatgctgataagtcagggcataatcatgctgataaaaataacagcagtaaagcagcatatatagatagcagtgaaaagctttcagatgtgctgtcaggaagagagaagctggaggctctgtatacgaatcttgaagaagcagcaggagatgaacttgaggaagctatagaaagttcacttacggatacagatgaaacaccagttgactatgatacatttgaagaactaagaataagcaacagacagataagatatataagtaatcttgcaagaaagaatgattaccgtatcccatatgtaaagaatggaaaagcaggtcttatcaatcttacattcttatcagacagcagcgataagggcaaaatatctattaagatggatacagaggcttatggagagctgtctatggaagcaaagattacaggaaaagatataagtctgtttgtaaagcagaattccaacactgtacatcctgatgacaggagcatttataagagctttgaagaacttgaaaatgttttaaagctgcagcatggaatgaatagtgtaagaatcaatacggtaagagttccagatgttaattatgttacatatgagaattcaggggcatcggtaccagcagatgagctttacaggatagcacagtcggttacaggcgtattctttggaaagtaaaagagctgacagagaatagagcagaaagtaaagcatagataatagagcaaagagcatagaacacagc

SEQ ID NO: 568 - DNA, 485 bp, Unknown
  gut microbiota DNA sequence
actgcctgtctggatacgcccaactgattggctagttcttcctgtgaccatccattcttttttctttcctctgtaatcttatcagctaaaatcatttttttctccttttgcagattttatgagctcaatataacagttttgctgtttgcattccaccatttcaggctgtaaatctgtcaaccagcagttgcaaatcacaaaagaactctatgaattccgattttccaacgatacaagcaggaaattatttatcatctgtattgttttcctttttcttatgagtcggacccaagcaaagaaatgaagaaccaagacataaccatactatagccatagaactttcatttccactcgtaaagccaatagctgacgctatgaaaaacagaactgatgcaatgtaaaataagattgatttgtttatcccttttttcataaataagcatctcctgcaaacttgaattttcaaattagtctttgcaaataac

SEQ ID NO: 569 - DNA, 484 bp, Unknown
  gut microbiota DNA sequence
gtcccgacagattacaaagaaatctcctttgtctgcctgcgaccagatggctctttggaactgccgagtacactcagcattgtatgcagatcagtggcaaagaagctggaaggatttgaagatttccattttcaccagttgcgtcacacttataccagcaatctgctttccaatggagctgcaccgaaagatgtacaggaactgttaggacactctgatgtcagtaccacaatgaatatttacgctcactcaacaagaaaagcaaaacgggattccgcaagacttcttgataaagtagcgagcaatgcttaactaaaaatttcccttatttcccttgcggattccgcataagggcaaaaataagggaaaatacatatcatttcactatttaatgggctgaaaagcctgtaaaataaggaaagttcaggaaatctctccacaaattccgatttatctagctaaataatatcatacaccttagttt

SEQ ID NO: 570 - DNA, 715 bp, Unknown
  gut microbiota DNA sequence
aagaggaacaggagatattgtacgacaccatggagtcggaggcttgtaccccaagtcatgcacaggcaattaaaatccgcaaattttcagcagagggcaggttgaatgaagatgttttgctgtcgattatgtcagaagagaagccaaatcaggtagagcagtggaaaatcccgaagaaccgactgaaaaaatactttccatcgggaactacacagcagaaaatggaagaaaccattatcaaagcactggaattataccggaaacgggaaaaaagcagggaacgataggcattttgacaccaagggaaaagtctacccgttggtggtcaatgagaaatcagcctttttctgttttcccctccccacaccctacccctttggtttaccagcagattaccagccgaaaagacaataaggagccggaacctcttctctttcggcaggtcagagattcccataccctgcatgacagcagggagtaaacagcataaagcaacaacaggcgttccagatggacgtcttttttgattgaaaagaaaggaattgtagaaaatgaagaagatatggaaacgagtgtgtacaggacttcttaccctgaccacgattttaactgcagtaccgatcacatcggttcaagcagcggaaacacagtattggacagaatccgcagagagagttggacatgtagaacatttgatgaatgacggaacaattaa

SEQ ID NO: 571 - DNA, 8736 bp, Unknown
  gut microbiota DNA sequence
gttaacatatagttacaaaagctagtaacattgcaatatgaacaaatgcaatgtggattcacagattttaatgagcaatgtataaaggagagatgtccattttatgagtaatgtaaaagtagcttttatttgtgttcataattcatgtagaagtcagattgctgaggcttttggaagacatctggcatcagatgtgtttcaaagttattcggcgggtacagaaacaaaaccacagattaatcaggatgctgtccgtattatgaaggaattatataatatagatatggaagcagaaggacagttcagtaagctggttagtgatattccagatccggatattgcaatatcaatgggatgtaatgtagggtgtccatttataggcagaccatttgatgataattggggacttgaagatccaactggaaaaagcgatgaggaatttaagatagtcattgagcaaataaagcataatattttggagttaaaaagtagattgaaccataacaggtcatcagtaacctgattattaaataaaatgatatgaaaatgatatgagataaaattaagtaatggaaacagataattattatgttatactatatatgaatatgtatactatgtaagcatatgatatgtatttatatatagggaaagagaggatataatgttggcaaaggctacagatgaacagaaagatagcttgaaaaaatacatgaaaaaaattaaagacataaaattgagagtgccagaggaatatcttgaacctattaaggaatatgcagaataagggtgaataatttgtaattttgaaacatgcgtttcattcgaaattttaaaggaggtatgacctatgacagcgttaagacagagtgcaatgatggaactggaaaagataccagaagataaattatcctttgtgattcagataatgcaaggggtaaacggattatataacgataccaatagcgaaaggaaagaagcatttgccagattagaacagttacgcaaaaagggaactgttacagatgatgctgcagaattagcttcttatagggaagataagtatggcaggtaaaattctgatagatactaatgtactgcttgattatcttctggaaagagagccattctttgaggatgcaaagaaagtaattatgttatgtacagaagggaatacaaaaggctgtattgcagcacactcaatatctaatatgttcttcatattaagaaaagattatacagcaaaggaacgcagagaaatattgtcaagtctatgtacaatttttgatgttgaaggcatagacaaagcaaaattattatctggtcttgcaaacgaagatttttctgattttgaggactgcttacagatggagtgtgcaaagagttatggtgcagattatattgtgacaagaaatgtgccagattattctatatcagacataaaggcaattttaccaagtgaatatttaggattataacaaacaaagcaccaacggacatgggaatcgaaaaaaaacagttaattaccaatggctttttttctaaaaaaagggaacgtatagaagaagtggttacgatgcttgagaaaagcggggtaaatagcttattgctgtctgttgatgcatttcatcaggaaacaattcctcttgaaccggtaaaatattttgctgaatgtgttgtgaaatcaaagattcccgttaaattaggtccagcatggcttgttagtgaagaagataataatccatataatcttaaaacgaaagaagtattggggaaatttaaggacttgcatattcctataggaagtgggaatattgtttttccgagtggaaatgctttgaaatatcttagtgagtattttgaggatggtgtcgcatattcgtctccttatgaagaagatatatttgatgttcgggcgattagtttttctcctaatggtgatgtgttgaacggaaacattaataataatgatatacaggatattttagaatcatatcgaccataaaattgaacataacaggtcatcagtatccagattattaaataaaatgatatgaaaatgatatgagataaaattaagtaatggaaacagataataattatgttattctatatcagaaagattatattttatactaggaggattatttatgtcagagattaatataagttattttaaaagtatcatagatcaggatagagccgcagtcgttatatgcaatcttaatcatgaaataatatatatgaatccagctgcagttgttaattatgcaaagcgtggcggagacaagctgattggcagaagcctgctggagtgtcataataaggaatcacaggaaaagataagacaggtgacagaatggtttgcacaggacgaaagccataatattgtatatacattctataatgagaaacagaataaagatgtatatatggtggcgcttagagattgtggcaagctgattggatactatgagaagcatgaatatcgagatagagaaacaatgaaaatgtatgatttatggtgagttccacctaataaggaagttgcataagtgtaataaccaccataggctaagaatcctgctttgcaggattcttttttcatattgagaagtcagataatgaaaatataagaagactgtaaataagataacatctaaaaaataatcataagaaatttttaaaaagtatatgtcgaaagaagaatattataatatttagttatttacgatacaatgtattggaatttaataaatatacgtatgcaaaaaataaaaaatattgtagaattgagattaatatgatagatgttaatgctttaagtgaaaataaagtatataatactatgtcagaaagtataggaagggataaggtaaagatatatgaataataaagattttgtagagcatttaaagcaacgtttatttatagaatttaaaaaacaggatagaagtggtgtgtatggatatacacaacgcagtatggcatataattctaataaaatagagggaagcacacttacagaaaaacagactgcatctatgtttgaaacaggaacattatatacagatgatccagatattatattccggactaaggatattgaggaaatgaatggccattttaaaatgtttaattatataatgaagaatatggacgagccattgtcagaggatttaataaaaggaatgcataaaaatcttaaagaaggtgtttttgaagattttgctaatggttatgcagtaggagaatggaagaaaagagaaaacagggtaagtgatattcatgtagcattaccacaggaagtgccagaaaaaatacgtcagttattgaatgcgtatacaagtaaagaacgcatagaattaaaagatgtagctgtatttcatgcaaaatttgaaaatatacatccatttcaggatggcaatggaagagttggaaggatgattatattaaaacaatgtttagacaatgatatagttcctgttattataagggattcaaataaagcagagtattatagattccttaataaagcacagcatgaagaagattacaatggacttgtaagatattttgaaaaagaacaacaatattatattgagaatactatacaaatgttatatacactagaagaattaaatatcattaataatgatattattgatgatgtgacgtttgagatgaaaagctaaatggcctgtaaaatgtcagtgaatcaaataaaaaaaacgaaaagcatagttaggaatagaaggaaaatgaaagggaaaagagttattgcaggtattctgcttgcggggattttagcagttaccctggcagggtgtaaaaacacagataacactaaagaagaatcagaaaagcctgttattaccctcggcagtgacagctatcccccatacaattatctgaatgaggatggtataccgacgggtatagatgtagaactagctacagaagccttcaaaagaatgggatatcaggtgaatgttgtccagattaactgggagaagaaaaaagaactggtagagagtggcgagattgattgtatcatgggctgtttttctatggaaggacgccttgacgattaccgctgggcgggaccatacatagcaagccgtcaggtggtcgctgtaaatgaggacagtgatatctataagctgagtgacatggagggaaagaatctggctgtccagtccacaaccaaaccggaaggtatttttcttaaccggttggatgacagaatccataaactgggaaatctgatcagtcttggacacagggagctgatatatacatttcttgggaagggatatgtagatgcagttgccgcacacgaggaatcaatcgtccagtatatgaaagattatgacatagactttcgtattctggaagaatcgctgatgattacgggaataggtgttgcttttgcaaaagatgatgacagaggaatctgtgagcagatggacaagaccattgaagaaatgcgtaaggatggcacatccttgaaaattattgaaaaatatctggatgatccccagaagtatctggaggtggatgattttggatattaagagaaagaaaaaagaaaaacgaatccagctgcttggaggtctgatgggaatctgtgtggctgtagtctctctgttttatttcttccatgcagaaaaatcggaagcagagaaaagaatggtggagattgtaaactatgttaaggtgcagtgctcaacctacacacattataatgaatcttcagaatctaaaagtcttctacgtaccattgaaagtgccagacagatgagtacaaatattcacatggaaatagaaaatggtggtcagctgagccagaattttctgaaagaaaatctgcagactctctgggtggatggtatcattatactggataaagaaggaaagacggactgtgaatacagcacagatgaatctttgactaatgagattacggagtatctgcaaaaagatattatcatggattttgctggatatgaagaaagatcttattcagaacggtttacaagggaagatggttcctatattgatattgcagcctgcgccagaaaagatgctccgggtattgtggcaatctactattacacatctcctgaatttgccagaaattataccctgacgatacaggggcttttaaacggctatagtgtccagaaagatggaacgattattatcgcagacgatggaatagttgttgccagtaatgatgaaagccttctgggacagaatacaactggcagcgaggttattcaggaaatgaaaaagcatacagacagtcagcacatttatcatttgaagaatgaaggaaccggatgctatggaattatgcttaagcagagggattattatatttatgcatatcttccagataccgaagtatttcataaccttccattaagtgtagcaagtgttattttcctttatttcctgctgtttagtacattttggttctggacatacagaactaatctgatgcatcagaaagtagaacaggaaaaagatgaaaaatataaggcagaacttctgatagctgcaaaaaaggcagaagctgccaatgaggcaaaaaccgagttccttcagcgaatgagccatgatatacggactccaatcaatggaatctgcggttttgtcaatatggcagaccattatgcagatgatataaagaaacagacggaatacagaacaaaggttaaagaggcatctaatctgttgctggaactggtaaatgatgttctggacatgagcaagcttgagtcaggtgaaatcgttctggaagagattccatttaatctgagcagtattttcaaggaagtatttgttgtgatcgagcagatggcttcagaacagaatatccagattgagtgggagaaaaaagaaatcatacaccgggattttattggaagtccagggtatgtgaaacgtgtgatgatgaatatactgtcgaatgcggtgaaatataacagagaaaacggacatatctatatcagctgcatggaaattccatcaaaacaaccagaaatgacgacaatggaattcgtttgtcgtgatactggaatcggaatgactgaggagttccagaaatgtgtgtttgaaccatttgcacaggaacacacaggaagccgaacaaaatttgccggaacaggccttggaatgtcgattgcaaagaatctggtagagaaaatgggaggaagcatttcctttgaaagtaaagaaggagcaggaactacctttgttatccaggttccatttaaaatagatccggatgctgataaacgtgaagaacagagggatgtatcagaaaaatcaataaagggactacatattcttctggcagaagataatgagctgaatatggaaatcgctgaatttgtgcttcagaatgtaggcgctgacgtgacaaaagcatggaatggtcaggaagctgttgaactattcagaaaaagtgaaccaggtggatttgataccattcttatggacattatgatgccggtcatgaatggttatgaagccacaaagatgattaggtctttggatagagaggatgcaaagacaataccaatcattgcaatgacagcaaatgcatttacggaggacaggctgaaagctaaagaagcaggtatgaatgagcatattgttaagcctcttgatgttgaattactgataaaagtaattcataaattggtggaatattgatatgaaagtgacaaataagcggtgaaatatagacaggaggacataagtatgacaatacaggaatgctataaagctatcggaggaaactatgaagatgtcttaagacgccttccaaacgaagctcttatcaggaaatttacattaaagtttcttgaagatcagagttatctgcagctaaaacaggcattgaaagataaaaattatgaagatgctttccgtagtgcacacacacttaaaggggtttgtcagaatctttcttttgaccgtctatatgaggttagtaatgaattgacagaacttttgagagatagaaccggagagcagccggggataccagaggcaatggaaaaagtaacagaagtatatgagcttacgattgaagaaataaagaatggattgtcgcattaagtaatgcgacatgactttctgtctttgagcaggtgtttggaacacaataaaacccacacagataaaggaaataaaagtatggataaaagacaaaaaattttaattgtagatgatgcaaaattaaacagggacatattgaaggagattctcggagaaacttataattatctggaagctgaaaacggaaatcaggcaatccagatgataggagaaaatatagggattgatctgatgcttttagatatcaatatgccacagatgaatggttttgaagtcctggaaataatgaaagaaagccagtgtattaatgaaactcctgtaatcatgatatcttctgaagctgatgttgatactatgcgtaaagcatatgagctgggaatcacagattatatcacacgtccgtttgattctgtgattgtgcagaaaagagttcagaatacattgggactctatatgaatcaaaagcatctgataaatgtggtttataatcaggtttacgaaaaagaagaaaataacaatatcatgattcagattatgagtaatatattgggatcccgtaacagcgagagcagagaacatatcctgcatattaaaacagcaacagaaatgatgttaagacaactggcaaaaacaacggatgaatatcatctgacagaggcagacattgctttaatcacaacggcatcttcacttcatgatattggtaagattcgtattccagaggaaatattgaataaaccaggcagacttacagatgaagaatttaagattatgaagacccatagtgagcttggtgcagctataattaaggatatggattttccacaagatcatccactggtacataccgcatgggaaatctgcagatggcatcatgaaagatgggacggaaagggctatccggatggattgaaaggtgaagaaataccaatcgctgcacaggtggtatcaatcgttgatgtttatgatgcactcaccagtgaaagatgttacaagaaagcatttgatcataatacagcaattaagatgattctggatggacaatgcggtcagtttaatccgatactccttaagtgctttaaagaactaagcccatcgttttctaaattgattagcaaagagaatgatgataataaatattataatgaagcacagagactttcaaatgaaatactcagcgataaatccttaccgaaccagatttattcgcagagtcttataaaggttatgcaggaaaagattgatttcttcaaatcaaacagtggcttatattcgattgattataatgcggtttcaggtcagttaactatactaaatgaaaaacagcagatattatgtcaggtaaataatccgaatttcaatctgtttaaagaattcggaataaatcaggatgatgctcaacgtattcaggttttcttacatcagacatctgtatataataaagaaatctctgtgcagataaaagcaaaagtggagaatgatagtcagatgtataaactgaaattacatacgttgtggtctcctttaaaaaaggatggatatatcggaataatgggatattttgatactgtaaaatagataaacgcaaagaggggagaattc

SEQ ID NO: 572 - DNA, 7794 bp, Unknown
  gut microbiota DNA sequence
gtaatgaaaaagaaaaaatggaacagatttttgccggcacttctggtaatggtgacagctatatcacttttgtcaggttgtgtaggcaaaagtgctgaaaaagaagatgcagaaacaattactgtgtacttatggagcacaagcttatatgaaagatatgcaccatacatccaggaacagcttccggatgtcaatgttgaatttgtagtagggaataataatctggatttctacaagtttcttaaggaaaatggtggcttgccggatattataacctgctgtcgcttttcactgcatgatgcgagtcccttaaaagatggtctgatggatctttccacaaccaatgcggcaggtgctgtctatgatagttaccttagtaattttatgaatgaagacggaagcgtaaactgggttccggtgtgtgcagatgcacacggttttatagtcaacaaagatctttttgaaaagtatgatatccctcttccaacagattatgaaagctttgtttccgcctgtcaggcatttgataaagtgggaatccgtgggtttactgcagactattattatgattatacctgtatggaaacactgcagggtctgtctgcatcagagttgtcttctgtagatggacgcaggtggcgtactacctacagcgacccggataatacaaagagagaaggtcttgacagtaccatctggccggaggcttttgaacgtatggagcagtttatcaaggatactggtctgagtatggatgatctggatatgaattatgatgatatagttgagatgtatcaaagtggaaagcttgctatgtactttggaagctcttttggagtaaaaatgtttcaggatcaggggattaatacaacatttcttccattctttcaggagaatggtgaaaagtggcttatgactacgccgtattttcaggtagctttaaaccgtgacctgacacaggatgaaacacgccggaagaaagcaatgaaggtgctgaatacaatgctttcagaggatgcacagaaccagattattagtgatggacaggatctgttaagctacagtcaggatgtgaatcttaagcttacagaatatctgaaagatgtgaaacctgtgatcgaagaaaaccatatgtatatccgcattgcgtcaaatgactttttctctgtttccaaggatgtggtctataaaatgatcacaggagaatatgatgcagagcaggcttatcagtcatttaattcccggctccttgaggagaaatccgcttctgagaaagtaatattggattcacagaaatcttattccaaccgctttcatagcaatggtgggaatgcggcatattcggttatggcaaacactctgcgtgacatttatgggacagatgtgcttattgcaaccggaaacagctttacaggaaatgtgttgaaagccggatacaccaaaaaaatggtgggaagcatgattatgccaaatagtctttcagcttatagcagcaaaatgagtggggctgagctaaaagagacagtgaaaaactttatagaaggctatgagggaggctttacaccatttaaccgtgggtctctgcctgtgttcagtggcatttctgtagaagtcaaagaaacagatgatggatatacattgagtaaagttataaaggatggaaagaaagttcaggacaatgatacttttacagtaacctgtcttgcgatacctaaacacatgaaagcttatccggcagatgagaatattgtgtttgatgcagcagatacaactgtggaagatacctggacagaatctgtgtcagagaataatgccgttcttgcagagcccaaagactacatgaccttgaggtgagaagtatggatattaagaatcataataaagacagaaagagaactgttatgggaaaaagatttaggatagcggcctttatagctgtttttgcgtgcattattctgctgattttccaatattttagatttgtatcgaaaactgtttatgaggaaagcgtttctcatctgacggaagtttttcatcagtctgataatatgctgagagaattgacagataagaatctgacttatcttcatatgtggggtgagaatctgcagaatatccctagtgaagacgaaattcgtgattatataaagaaagcacaggaagatgcaggctttgtagaattttattttctgtcagctgacgggaactataaggttgtaacaggcaataccgggtatcttggattacaggaaaatattgaagaggaaatccggcagggaaaagatgttattgcgaatgcagcagttccaggaaaatcccagctgcttgtttttgccactcctaaggctcatggaatttatcagggatttgaatatgatgcgattgctattgcctatgaaaactctgatatcgtaaatgtactggatatctctgttttcaatggaaatgcccagagttttgttgttcatccggatggccgtgttgtggtggatcattcttctgcatcatgggggaatgtgtataatttcttcgggtttctaagagagcattctgatatgtctgaaaaagaggtcaatgagcttttggataagtttaaagcaggacgtaccgatgcgatgctgctaaatctggatggaaggagctactatctggtctatgaaaaatcggatatccaggactggatgttcttaggacttgtacaggcggatatcgtcaatgacagtatgaacagtctgcagcgtagtacgatacttcttgtcagtgcggttgtgttatgtattgccgcattctctataagccttgttattcaaaaaagcaggataaacttaaagaaaaaagatacggagatactgtaccgggatgagctgtttcaaaagctttcaatgaatgtggatgacgttttcctgatgctggatgcaaaaacataccatgcagattatgttagtccgaatgtggaaaacctgcttggcattacggtagaacagattcgtaaagatattagtattctggaaaaactgcatatagcagaacagggagatccagagaaaaattatctggaagaaatacaggttaatggacagagagaatgggattttgaatatgttcatctcaagacaggggaaaaacgccggttccataatattgcaatgggaagtgaagtaaacggtaaaaagaaatatatcctggttatgtcagatcgtactgctgactggaaaatgaatcaggcactttctgaggcagtacgtgctgcagagacggcaaatagggcaaagagtactttcctttccaatatgtctcacgatatccgcacaccaatgaatgcgattatcggttttaccacactggcggtaagtaatattgatgataaaaaaagagtccgggattatctgggcaagattctttcctccagtaatcatcttctctcactgataaatgatatattggatatgagccgtatcgagagtggaaaaattcatctggaagaaactgaggtaagcctgtcggatgtacttcatgatctgaagaccatcataagtgggcagatttatgcaaagcagctggatctttatatggatgcaatggatgtgacaaatgaggatgtttattgtgataagacaagactgaatcaggtacttttaaatcttttgtctaatgcagttaaatttactcctgcaggaggaactatttctgtaaggttgaagcagttcccagggacagtaaaggacagtggactgtacgagatccgggtaaaggataacggaatcggcatgagtacagaatttgtaaagaagattttttctccttttgagagagagcgtacttccacagtcagcaggactcagggtacaggacttggcatggccattaccaagaatattgtagatatgatgggtggaacgattgaggttcagacagaacagggcaaaggtactgaatttattgtccgtctgccatttcggattcagtttaagcagcatcagacagagaagattgcagaactggaaggccttaaggcactggttgtagatgatgatttcaatacctgtgacagtgtgacaaaaatgcttgtgaggattggaatgcgttcagaatggacactttccggaaaggaagctgttcttcgtgcacgacagtctatggaactgggagatgcatttcacgcttatatcatcgactggcgtctgccggatatgaatggcattgaagtcacccgccagattcgcagccttggtgatgatacaccaatcattatcctgactgcttatgaatggtcagatatcgaagtggaagccagagctgcaggggtaactgctttctgtgcaaaaccaatgttcatgtcagatattagagatacgttgatgattgccattggacagatgcaggcagaaacagaggatacacgccctttagcatcaggttcagatttcagaggcagatgtatattgcttgtggaagataatgaactaaacagtgaaattacagtggagattcttaatggatatggatgccaggttgatactgccgtaaatggagcagaggcagttaagaaaattaagaattcgaagccgggtgattatgatctggtgctgatggatgtgcagatgccggtaatgaatggatatgaggctgcccgccagatacgtgctctgaatgacccggcactggctggaattaccattcttgccatgactgccaatgcatttgatgaggacaaaaagaaagcactggaatgcggtatggatggattcttaaccaaaccaatagttattgatgaattaatcggtgtattacagaaaaatctgaaaaaataacgttctgtatggttgcaggtatataatgcaggtataacaaaatatatgataacgataataagaagataatacaaaatatacaacaaattgtacgaaactactaaaaatattcgaaataattatataaaaatagcaattgtacccaataaaataatgtgatacaatcaaggaaactaaaacaaaagaaatagtttccttgattttttgttttataagcgtcactgatacacaacattaaaaggagcattatggataataaagagaagattttacaggcaactatacaggtatttaatcaaaaaggccttaaatttacaatggacgatattgcttctattcttgcaatgagtaagaagacaatatatacaatttttaaagataagaacactctgtttatggagatggtagattatctgtttgacacgattaaagagagcgaatcaaagataatagaagatgatacattatcgacaattgagaagataagacgtattcttggagttatgcctgagagttataaagatattgatttaagacaattatatatgttaaaagacaaattcccggagatatacagacacgttgaagaacgtctggagaatggctgggagacaacgattaagcttttggaacaggggattgaggaaggagtgataagaccggttaatttattgatgtttaagatgatgatggaggcatcaatagaacaatttttccaaagagacattcttatgagagcaggaatgacatatacacagggacttgatgagattgtggggatattattagatggtgtggcagttaaggaatgtaattgataataaaaaggagaaatatataatgcaggacaaatcaaaggttatatttaacaatgaaattgatagaaaggcatatagaaaagctattaattccaaaaagaaatacgcaagaaaatatggtgatgacagcaatgctgactataaggtgacaataaagaagaacaaatacataggtgatatgcttggcgtgtatgatgtgagagttgcagataagcctgccagcgtatctaacggtaataaagaagaatttgatactgataaaggtattatagttggcaatataagaatgggttttggacattacagaatatcaatggcgattgcttcagcagctaatgcacttggatatgttccttactggatggatcttaattcttatgataatacaacctgtactaaagttataagggcacagaacgacctgtattcacttggttcaaggttatcacaaaagagcaggctgtttaacagactggtgtgggaaccaatgaattacgagggtttcagaaagctttcctataacgcttcagaccagaagaatgcagagcttatggcacctgtatataagaatgttcctaaagatattccggttattgcaactcacgtatggccggcacaggcggcagtacacgcaggtatgaaaaatgttgttaatgcaataccggataactggccaatggcattgcatttgtcagaaggaagtattcatacagtccagactcattatgcttatcaaggttacaggatacttaatggaatggacggcaataaggtgttaaatgaaatgccagcagatagtcttgtatacacaggacattatatcgaccacgagcttgtaactaatattgaggctgactgcaatgcaagaatagcaagaaaacagaacggaaagcctatgagatttctgcttacaattggtggtgcaggtgcacagaaagagatatttgcccatataattaaataccttattccttatattaagaagaataaggcagtattatatgttaatgttggtgattataaaaatgtatgggatgaacttataaaagatattccacagatgagagaactggcaactgagcattttgacaactggaaagacaccaaggcatttgccactaaggcattatcagccagccagataaacaattctgatgtagtgacagataacaatagagatgataattctaagaatattacagcagataattcaagtgaagacacatctgataatataacaggtatccacggcttttatcacaagaatatattcgaggcagtgtattgtactaaccttttgatgaggagtgcagatgtgcttgttacaaaaccaagtgaattagcattctatccagtgccaaagttatttataaagcgagttggtggacacgaacagtggggtgctgttcattcagcagagataggtgacggaacacttgagtgcagggatatacctcatactttacagatgataaagctgtttatggaagatgatacatacattacagatatgtgtaagaacatcaagaagaataaacagatgggtatatataatggcgcatatgaggctgtcaaactggcagtgactatgaagaaatcggacatttaatacggcgtgtagtaatcagacacttaaaaaatatgaagaaatcggacatatagaaagaaaagaggtagcgtatggggcttaataagaaagaaatggcatcttatggcataggtgcagttggcaaagatatggtttatatgttttgtgcaagttatattctgtattattatcaggatatacttggggttagtgcgatagcaatggggattatacttcttgcggcacgagtatttgacgcatttaacgaccctataatgggtgtagttgttgcaaagacaagaaccagatgggggaagttcagaccatggctgtttattggaacattgcttaatgctgttgtattgtttctgatgttctctgcaccaccaacacttgatggcggcggacttgttgcttatgccgcagtaacttacgttttgtggggcgttacttatacaatgatggatattccttattggtcaatgatacctgcatttacagagggcggcaaggaaagagagaatatgtcaacaatggcacgttcctgtgcaggcgtaggttcagcacttgttacaat

SEQ ID NO: 573 - DNA, 9523 bp, Unknown
  gut microbiota DNA sequence
ttggaaagggcaatgaatatgcaggttttaaatggtttgcacttataatatcaatactgttctttgctgcaatatttattacctgccttaatattagggaaaaatcaacagttgatgttgaaacagtatcagtaaagcagatgttcaaggcacttttccagaatgatcaggctgttacagtagttataacaattgttcttattaatacatctgtgtacataacttctaatcttgtcatatatttctttaaatatgattttggcggtgcagactggtacaacggttatacactatttaatacatttggtggtgcaatacagatattatcaatgatggtattgttcccacttcttagaaagtttttgaatacaataaagatattttatgtaagctttgttatggctattgctggttatatagttttatttattcttatattcacatcaatgtcgagtgtgtttattttgtttattccagcatttttcatatttgcggcaaatggaatgttattagtcttaacgactatatttctggcgaatacggttgactatggcgaatttaagaataagcgaagagatgagagcgttatattttcaatgcagacatttgttgtaaagcttgcttcaggcatagccgcattagttgtgtcaatatgcctttcagtgtgcaggttaagcagcaatacagatgcggttacagatgctgtggctggtggttcggtagtaggacttagaatgacaatgacagtaattccgataataggtctgcttatcgcagtattttacttccacagaaagtacattttaacagagcagaaaatggaagagataacggaaagaattaaggagagccattaatgataacgattaataataatatgtatgtgcttgatactgacaatacatcttatgcgtttgccatgcttggaagcgggcagttggagcatttgtattatggaagaaagttacacgccaatgaggctgtgatgacagagaagcatacatttattccgggtaatactaatgtatacaataaagattattcgtcttattcgttggaagatgtgtgccttgaaatgtcatcattgggaaaaggcgatataagagagccttttatcgaagtcacatatcctaatggaagcagtacaacggatatggtgtttgacagggcagagattatacagggcaaggaagaatacgatacgcttccggggtcttatgatgataatggagaggttgaacagctcgttatctatcttaaggacaggaattataatctcacactggagcttcattattatgtatatgaaaaatgtgacattataacaagaagtgccaagcttgttaattcaggaaatgagagcgtaaggcttgaaagattaatgagtatgcagcttgatttaaacgagagtgattatgaattgtcattctttaatggtgcgtgggcaagggagatgaatagaagcagaatacccattcgtgccggtaagtatgtaaatgagtctgtaacaggaacatcatcgaacagagctaaccctttttttatgctaggaagaagttcaacgacagaagattatggtgaatgttatggatttaatcttatatacagcggtaatcattatgaggcggcacaggtcaattcatatggtaaattaaggcttgtatcgggaattaatccagctgcattttcttatgtgcttgaagcaggaaaatgctttgaggctccagaggcagtgattacctattcataccaggggtataattcgatgagtcataatatgcatacatttgtaagaaagcatattgtgcgtggaagctggcgtgacaaagaaagacctgttcttattaatagctgggaagcggcatactttaatattaatgaaagaaagcttgtgaagcttgcaaaggcggctaaggatacaggtgttgaattgttcgttatggatgatggctggtttggtgagagaaatgacgacacaagttcattaggtgactggacaccgaatagcagaaagcttccaaatggaatagctggcatcgctgataagataaaagaatccgggcttaaatttggaatatgggttgagcctgagatggtgagtgtgaacagcagattatatgaggcacatcctgaatgggtaattgaaataccagatgtagaacattcagagggacgtaaccagagaatccttgatttaacctatgaatctgttcaggactatataattgagaagatgagtgaggtgttctcatcagcagatatatcttatgtaaaatgggatatgaatagaatattcagcgattattattctaaaaatctgccacctgacaggcagaaggaagtatcgcatagatatgtgtgcggcttgtacagatgtatgaaggagcttactaatagatttcctgacatattatttgagggctgtgcggcaggcggcaacagatttgatctgggaatgttatgctattttccgcagatatgggcaagtgataatacagatgcgctttgcagggcgcagattcagtataattacagctatggttatccgttatcttgtatttcagcccatgtatcggcaagccctaatcatcagacattaagaaatatgccgttagagagcagatttgcagttgctgcatttgggcttcttggctatgaatgtaatatgtgtgatatgaataaagaggaattaaatgctgtgaaatgtcagattgaactgtacaagaagttaagaaatgtattctttactggtacattttacaggacagaaagctttgaagaagaaaatgcaggtaatgccagtgtattaaataatggtaaaggcaacaggacagaatggacagtagtatcaacggataagaagaaagctgtcggattaattatgcaaaaacacgttatacctaacacacagtatgcctgttacagggctaaaggccttgatgaagctaagaaataccgtttttacaacagaaagcttcaatatgatattaaagaattcggtgagcttgttaatatggtatcgccaatacatattaagcagggttctatgttacaggatatactatcgaagcttaagaaaatggacggggaaacagaagattatgttgcgtatggagatacacttatgtattcaggtgttaagttaaagcagggtttcagtgcaactggatataatgaaaatgtccgattttttcaagactttgcaacgagattatattttatggaagaggtagaagatgatggttacatcacaattatataatactactgaattaactgaggtaattggttcgggtggcattgataatatattaaaggatttatatattgataaaagtcagcttgaataccagagaaaaagatatattaatgctctgaaccgcttcacacagttatatggtgaaggagatgtgcttatattcagtgcgccgggaagaagtgagattggcggtaaccacacagaccaccagaatggaaaagttcttgcggcttctattaatctggatattatcgcagtagtaagaccggttaattccaaggatagtatgtcagaggaaggcagtttatctgggcatagtggtgttaatgccgggattataagaattgtgtcagacaattatccaatgatagaagtggcattatcggacacggatattaacaaggaagaatactcaacaactaaggcacttgttaaaggtgtgattgccggttttaagaaaaatggctttaagacaggagcatttgatgcgtttataacaagtgatgtgcctatgggagcagggctttcatcatctgcggcatttgaaacacttataggaacaatacagtcacatatttataatgctggaaaagtatcagcagaagatattgcagttatcggacagatggcagagaatgagtattttggcaagccttgtggacttatggatcagatggcatgttcggttggaaatatggtctatattgattttaataataaggaaaatccagttgttaataagcttgctgtggatataaaaaaattcggttacagcctgtgtataactgacactaaaggttcacataaggatttgacagatgattatgcagatatccgtcaggagatgaatgcgattgccggttacttcggacaggaggttcttcgtggcattacattaaaggatatacttgataattttaaagagctacaggagaagttcggtgacaggagcatactaagagcagttcattttatagaggaaaatgatagagtagaaaatgaagtaaaggctcttacatctggaaatattgatgaattcttaaggctggtatcaaagtctggtgattcatcttacaaatatcttcaaaatatatattcaaccaaagatactgccaatcagggcgtttcacttggacttatgatgagtgaaatattcttaggtgataatggttcatatagtaatggtgcatacagtaatggagtatgcagggttcacggaggtggatttgcaggaacaatacttgcaattgtcaaagataatgccgtagatgaatacagaagaaatatggataagatattcggtgatggtgcaagtatgatattacaaatcagacattgcggaggtgtcagaataatatgagagatatagacagtcttatattagagcttgttaattatgctttaatgaatgaactgatagaagatgatgacaagatatatgaaactaacagactgctggaagtctttgaaaaaatcggacttgatacagacagtgatgtaattaatggcaatgttgataataagaagtatactacaaggagaatatccgaaattctctcagactgccttgaaatagctataaaagacggacttattgaagatacccagcttaacagggatatatttgacactaagataatgggtgtacttactccaatgccttctgtagtgagaaagcattttaaggagctttataataataatccaaagcttgcgacagactatttctatgaacttaataaagcctgcaattatataaggtgtgacaggattgagaaagaccagaaatggaagtacaattcagaatatggtactatagatataacgattaatctgtcaaagccagagaaagacccgagggatataattaagcagggacagatggcggcaagtggttatccaaagtgccttttgtgtaaggaaaatgaaggttatgccggtacgctgtcacatcctgcaagacagaatttgagggttataccgcttgaattaagcggcgagaaatattatatgcagtattcgccatatgtatattataacgaacattgcatagtgtttaatgacaagcatatacctatgaagattgataagagtacatttaagaagcttatcgagttcacggaaaaatttcctcattatacattaggttctaatgctgacctgccgattgtaggcggttcaatattaagccacgaccattttcagggtggtgcatatgagtttcctatggcaagggcagagtatgtgtatgcatttgatatggggcagttcggtgatgtcaaggcaggaattcttaactggcctatgtcggtaataagacttagcagtaataataaagaaagtcttgttaatgcctgcgattatatattagacaaatggagaggctacactgatgaagaagctttcatatactgcaataccgatggtgaacagcataatacgattactccgatatgtagaagaaaatctgataattacgagatggatcttgtattaaggaataatattacgactaaggagtgtccttggggtgtgtaccatccgtcagctaaccttcacaatattaagaaggagaatataggtcttattgaagttatgggaatggcaatacttccggcacgtcttgataaggaaatgggtattttgaaaaatgcacttttaaataatgaagatatccgctcaatcagcgagattgaaaagcatgcaggatgggttgaaagctggaaagataattatgatataaccagcggcaatattgatgagataataaaatcagagattggcaaagtattcgttcaggtgcttgagtgtgcaggtgtatacaagacggatgaaaagggaagagaggcatttataagatttattaacaatttaacatagtatgatgagagagtcggaaatttaaaaatattacacagtaatttaagaatgatattataattggaattgaccacggctggtcgatgatgaaaaccgtaactcaggtatttgtcacaggtgttaaggagattacaacaactccggcactttttggcgatgtacttgagtatgaaggaaagttatataaggttggaactgtaaggcaggaagtaaaggataccaaggtctaagatgacagcttttatcttctcacacttgcagcagttgctaaggaacttaaaaaaagaggtcttgcagaggcaaaggtattccttgatgtaggacttccacttacaagatttggagctgagaagaatgactttatcaagtacctgacaaataataagcgtgtaagcttcaaatatcgtcgatttgttttagaactacacagccacaacaattttagattgtataaatgcatttattccgctattatcaaccgaatatgaattcaatgattgaggttgattatcttatggaaaacaacatggagagcaggaatctatatatgagttatccactaaatacaggacataaaagaattaatacatccctgtgtcctgccttatgtggataatagttctaaaacaccagaaatactggctttttagaagtgttatccactgtcataatgaccaatcagaaaaatgccatgagtggcataataacatgatttctgctatacttaatgtcatgaaaaggagtatgtggttatgcagattaagtatatagaggaagaactgaatagtatagataagacacttgtgaaagttattttttattatgtagcagtaaatatgcaggtattggatccaatatatttgtgaaatgtaaatccaacatatactgcatcatttagggaaagatgaaacaaaaggagaacatatggaatcagacataattaaaatcagccatctgaataaaagctttggcgaagtaaaagcagtaaatgatttgagctttcgtgtaaaaaaaggagaattgtttgcgtttcttggagtaaatggtgcagggaaaagtacaaccatttccattctctgcggattactgaaaaaagacagcggaactgttcaggtaaacggaatagaaaccgacaaagccggtgcacagacaaaaagaatgcttggtgttgtgtttcaggatagcgtacttgataaaccgcttacggtgaaagaaaacctaatgagcagagctgctttgtacggcattacaggaaatgcctttgataagagattacaggagctggttgagattctggattttgacgagtttttaaacagacctgtaggtaagctatcgggaggtcagagaagaaggattgatattgcccgtgcattattgcacagaccggagattttgattcttgacgagcctactacagggcttgatccgcagacaaggcagttaatatggaatgttattaagaaacttcagaaaacagaaaatatgacagtatttctaaccacccattatatggaagaggctgctaatgctgggtatgttgtgattcttgacaaaggaagtatcgcagcagaaggtacaccgtttgaacttaaaaatgcttatgtacaggatatagtgtctgtttatggtgtttccgaggatgaaataaagtcattgaacagagaatataaaaaaatacgtgacggatatcagataaaagtaagaaatacgaaagaagcgacggagcttattgtagaacatcaggaactgtttagggattatgaggtagtaaagggcggtatggatgatgtatttcttgcagttacaggaaagaagcttggaggtgaacgctgatgagaacagtattggcattaatgaacaggaacaggaaattgttttttaaagataaaggtatgttgtttacatcaatgatcacacctgtcattctgattgttctgtatgctacatttcttgcaaaggttttcagagattcttttacagcagcgattccggatatgattccgatttcggataagcttattaatggaaccgtggcagcacaactgacagcatcacttatggcagtaagctgtattactgtaacattctgtgtgaatctgactatggtgcaggacaaggcaaatggaacaaggaaggattttaatgtttcgcctgtcagcagtggaaaaatctatttgggatattttctgtcaacagtagctaattcattgatggtcaatggacttgcgtttgtattatgtctgggatatctatttaaaatgggatggtatatgaatacagcagatgtattatgggttttatttgatatgatattgctcgtcctgtttggaagtacgctgtcaagtatcattagctttcctttaacaacacagggacagctttcagctgtgggtacaattgtcagcgcaggatatggttttatatgtggtgcttatatgcctatttcaaattttggaccaggtcttcagaagacactgtcttatcttccgagtacatatgccacttcattgattaagaatcatatgcttcacggagtttttaaggagatggagagaaaacattatctggatgaaatggttgaagcgataagagacactcttgattgcaatccagtatttcagggaaatgtggtaaatgtaaatcagatgattggcattatgctgggaagcatagctatatttggaattatttattattttgttacattgctgccagtgggtaaaggcagacgataagcagcattatgtttagaaatattcggtgaaatctcaatcggtatttataggagaactatcattatgattagagaattacgaaaagcagatataaatagagttgcaaagatatggctggataccaatataaacgcacattattttatatctgctcaatattggaaaagtaattttgaattagttatgcatacaatgttaaacagaataaaaggatgtgaaatatatggaatttttatttgtggctcttggtggagcagcaggtgcggtgtcaagatatgccataagtcttatacctgttaaaagcggatttccgattttaacattaatgactaatattataggagcggttctgataggatttattgctggtattgccggcagtaagaatgaaatatcaaaaaatacggttttattctggaaaacaggggtgtgcggtggattcaccacattttcaacattttcattggaagcatataatctgtttgataatggaaagtatgtaataggaggactatatgtgctgttaagctgctgtggatgtatattgggagtcttatgtggaaggaaactatcagcgtttataagataacataggaaatttatatacatttatgtacattaatatgcttgctttttgtgtaacaat

SEQ ID NO: 574 - DNA, 1119 bp, Unknown
  gut microbiota DNA sequence
tctacaataaatacattatattagtacgttaattaatttctattatgatttgtcaaattcgtgtgaagtaatctgaacggaattggattgtgatttcgattttacatttattaatttattattaaattttaatcggtatacaaggacgtaaatttacacaaatgagtatattaatatgaataaaaagatagtgaagaaattatgtgctattggcttgatatcttctattgtcttatcaggatgtggtaaagctggtataacaggtggcaacagagaggaatcagcaggtggcacagataaagttgtctctttaaaggtgtggacagaaaaggatggcctgggtgtcatgaataaaatgatagacagctttaaggaacaatataaagacgaagcagaatttgatataacggttgagattcaggcagattcacaggttcgtgatgtcatgcttacagatgtacacaatggtgcggatgtgttttcatttccagatgatcagattatatcattaacggctggcggagttctgacagaggtacccaatgcagatgaaatagctgcagctaacgtaaaggagtcagtcgaagcagctactttgaatgatacattatatggatatcctatgacagcagataatggatattttatgtattacaataaagattatttttcagaagatgatgttaagtcgctagataaaatgctgtccattgcagcagctaacaataaaaaggttgctatggagtttgattccggatggtatctttatacattttttggaaatacaggacttagtctttctattaaaccagatggtataactaatgaatgtaactggaattcgcagacaggtgatataaccggagtggctataaagcaagcactcgatagtatagctgctaatccaggttttgtaagtatgcctaacggagatatagctgaacagattaaaagtggtgatgttatagcaggaataagtggtgtatgggatgttatgaatgtaaaggaagcctggggagagaattatggtgcctgtaagctgccaacatatacagttgcaggaaaggaagttcagatgtcttcgtttacaggctataagatgatgggcgtgaactctta

SEQ ID NO: 575 - DNA, 6461 bp, Unknown
  gut microbiota DNA sequence
ggctgtggaaacctgaaacagcaccacacgcaactgttacgaaaaggatagggaacattgttccaagctttgcattgttaaatcctgtgtatacaggaaggttcatagatggatgggcaactacaagaccaagtgctgctccaactatcatagcaataaacataaatgttgtcatataatctctaggctgcttcataagccacattggcataactgccgcaaagaagatatatacgaatgtgatatagctccatgcactcttacctaagatgattggacagaagttgccaattacaaatgaagcaacaataaatgcaataccaactactgcttctttccagcctgaaagattaaacttcttctggataagaccaaatactactgcaaataccataaacataattgatactgtaccagcagaaccattagttgaagctgctggtgctaactgtgatgcaccatcaactactgtatatgcattaaaggtacctgcaaccatatcagcaaatgctgcaataacgataagtgtaaataaccagcagaaaagtaagaaaatcttacgtccaaacttaccaatatatttctcaatgatcatacccattgacttaccttcgttcttaactgaggcatataaagcaccaaagtctgttacagcaccaaagaatacaccaccaataagaatccagagtaatactggcaaccatccaaatgctgctgcctgaatagcacctgttacagggcctgcaccagcgattgatgagaactgatgactaaatacagtccatccattggttggaacaaaatcttttccatcattgtactttacggcaggtgtttctgccttagggtctatgccccacttgtttgctaaccaacggccatataccatataggcaccaaataatataacagccgcgattaaaacgattactaaagtgttcataatgtcactctcctatatataatattagctgagcaatataaatattcccagcctatttcactagccaaatacaatgaacgcagaaaaacggaaattaaaaataactaattccataatgcaaaaaaccttcgtctctgcacatatcttaacgatattgtacaaagacgaaggtaaattacattacttccgcgttaccactttgcttgccggataaatccgacctctctactgccacacatatggcatgccctgttaacgatgggtaccggttctgactactaaattaatatctttcaccaaaactgcttgcaggtgagggcttatctattccttgctaccgtttctcatcaaccaacggctctctgtaggcggtgatataaataaatcatttcctgttcttcgcatttgactattgaattaagtaataagataatctcttcattttaatttgtcaataaaaaatttaattatttttttgtatttttaatgtatttttaatttgaccacatttctactatatctttactgtaacatttattatgttctgaatgtctttaaagcatctattgtctgctgtataaggttgccccattatcattgccaccataaacataggcataatttgtcataaaatattgtgcaaaaatataaaaaagccacctttaacggtacaacccgctaaaagtggcagctttttatactacttcataagcttaaatgcactgactaattcttttaatctgtccgcctgtgaagcaagttcctcactacttgcagagctttcctcagccatagctgtattctcttctactacagctgctatctggcttgcagcttctgatacctgctttaatgattcagcctgctgttctgaagcaactgaaatctgctcaatattctcgacaagttctttagtcttatcaactgactccataagcttagcagctgcatcatcaaccattcccttgccttcttcaactgcattaattgcctgaactataagttcaccagagttcttagctgcctctgcactctgtgcagcaagattaccaacctgtgttgcaacaactgcgaagcctcttccttcttcacctgcccttgccgcttcaatcgaagcgttaagtgcaagaaggttagtgcttgaagcaatctcatcaattgtattaatgatactgctaatatgcttagaattctctgtgataacttccatagcatgaactatctgctgaacctgattattactttcaataatctggtcaccaacagctttagccatttcattagccttattagcattatgtgcattcatatcaacctgatctgctacattagcaattgtactctgtaattcctgtactgaacttgcctgatctgttgcaccctctgtaattgcctgtgcaccatctgaaagctggctcgcattggaagctaccatatctgcaacaccattaatctctgaaagagttgatgaaagatctgttataacctttactaaagcaacttctatatccttaaagtcaccgacgtgttctacattaggtgatatattaaagttaccacctgccatctcttttaaacctcgtgttaaatctttaattattgcacttaatcttcccgccatattgtcaaacgtctcagcaagatgaccaatttcatcattataattcttcttaatattaaccgagaaatctcccctcgcaagctggtcagctaccgcaactacataatctataggcttaatatatttcttaataagcttattgctgataacaattataattgccagagttataagagaaataacaatcataaacactacaagaataatcgtattacgctcaagatctgtcttatttaatgcacttgctgcccaccaggtctggttaacagctttaataggcgcataatatctttcaaccttagaaccatcatccttcttagttgttacgctgaaactttttcctgtatcaatgcccttctgtatcttggcatattctttagctggtaaaacatcgcttaacttcctgccaacatattcatctgattcgctgtcatatataaatgtaccatcacccataagtacatctacatacattgttttgtacttatcgtctgttgaacggagtccgctgaatgtatcaacattaatatctacaagaattacaccctgtgtcttaccatgatatacaattggaaaagaggcacttaccatattgatgccctgatccttatatggacttgtaaaactgctctgctgtgatgctgcagcattcttgtaatagtcctttgagccatagcttgaatactcaccatagctttgtacctttccactctgtgcatctgattcacttacatagattgtataatctttaatagcagggtcaaaagcgttaggctcaaaaaatacaccaacacctgcaatgccttcactagatgttacagatgtattggctacactgatcataaactgctcaatctctttgttcatcttctgtaactgcacatcatatacttcactcttaactgtctctccagtatatccgttcttagcataatcatcataacgttcagtaatataattctgaagaatattagcagcatctgaagctctgtcaagtacctcctgtaccgatataccattctgctgtgcaattccatcaaactcaccacttatactactattcataaacttagctgcaattgttgcactaattgcaatcataactgtaaggcaggctactaatagtatacccactgctactgaaatcttataggtcagctgtctatttctgaaccactcgactgcagaatttttctctgtgtgatctttgctcatatttttcctccgttcttcgacacattaaatattcaattgttcgtatcttattagatatatactatcactatgcatttacaatatcaatctatttattaagtttttctaaaattttgctaagattcgctaagattttgtaaattttaagcttttcactacttttttgcaacactttttagcaatacataaattgcttagcaaatatagcaattctagtacatcagtaattggcaaaatttaattttaatgtttatatcattatatttttttagttttttaatgtttttttatcatatttagtgtttctttatatcttcattgacatctctcttctataagactataatttttattaatagaaatgtaaatatatattttacgatatcattattatttaaggagcgtgattccaatgaaaaatattaaggttcgcacaaagcttactattatagtagctttagtacttgtgcttgtggcttctgaaagctttatatctattcagaatatgaaccagttaaaaaacaaggcacttgatactatggacacatcatcaagacagaactatgatgattctattaaagaacaggtaagtgtcgtcatctctctgttatctgaaatcaataatgagtataaggctggcagatacagccttgatgaagctaagaagatagctgctgatgaaatacgtcagatgcgctacggcaatggtggatatttctgggttgaccagtcagatggtaagaatattgttctgcttgggaattcaactgagggtactaaccgtatgaataccaaagatgctgagggttaccagatggtcaaggaaataatacgtgttgcagtccaggatggtggtggttatacagattatgtatttcctaaagagggagaaacagaaccttcaccaaagcgttcttacagcgaatacttcaaaccttttgactgggttgttggtactggcaactatactgattacatagacactgctattgcacagcaggatgaggaattcaccagctatgcttcaagcaaagctatttcacttattttatgcagcgtatgtatgcttattgttgttgctatactcgttgccctcatcgcaattgatattactaaatcattaagaaaaataaaagaacaattcgaagtaattgctggcggtaattttgccacaaaaatgcaacagcctatgcttaagcgtaaggatgatttcggacagctagccagtgcacttgaaaccatgcgcgaatctgtacgaagcctgttagctcaagtaaaaagcgaggctgccaatattgataaggttgtagaaacaattgatactaatgtatacaatcttaacgcagaaattgaagacgtatcagcaacaacagaagagctcgctgcaagttcagaggaaactgccgcatctgctgaacagattaacggaatgacacagcagattgaagaagctgcaagggaaattgccataagggcacaggatggtgcaactgaatcccaggatatccataaacgtgctttaaagactaaggatgatactgtagaaaaccgtcagaagattaaacagatgatggctgacatcagagtaaatcttgagcaggctcttgaagatgccaaggtagttgaccagattggtgtacttgctgactcgatcctgaatattactgcacagactaatctgcttgcccttaacgcttctattgaagctgcaagagctggtgaagccggtaaaggctttgcagttgttgccgaggaaatccgtgtattagctgaacagtctaaagatgctgtagccaacattcaggctgttacagaaaatgtaaacaaagctgtaggcaacctgaccaacgattctaaccgcctgcttgatttcgttgatactgatattgttgaatgtcttaacggatttgagaagatggctgatgactataatatggatgcttccaacattaacgatcttgtatctgatttcagtgcaacatcagaagagctcgttgcatctataagcaatatcactcagtctatagagggaatcaccgctgcttctaatgacagtgcaactggaacaaccaacatcgcacagaagacagtcgtaatcgtaaaaggctcagaagctgttatgaatggagctaaaactgcagaagcctctgctgctgaacttcgtaagaatgttaataactttgttattgattaaacaaatattatgatgtcggaggcaaaagtcctcgactttgatacctacggattgttccgtgctatgcactcccacgtctacgctacgcttcggtccgtgctatgtgctactggcacatagcaccctggtatcatcataatatataatagttattaaacttagttaccttttccttcataatcaagtagtattaccatcgctgttgcatgcttttaaatatttcaatcaggccagaaacggtctagcatacgatacatattttctctgccaacaggattggctgtatgtatctcaacgggataaaaagtttccctttctgccagataatccaacagttttattgcctctccaccatcataggcataatcacccagatcgtgatctaagtcaagaacctctattagttcattgtttttttcacatttttctattaactctatcgcctcattaactgattctatcttaacaaatcctgatatattctttca

SEQ ID NO: 576 - DNA, 916 bp, Unknown
  gut microbiota DNA sequence
caagaaccgaagaaaaatctttttctctccaccagccgcgcatagcttcttcaccaaattcctgacttttatttctcatactgtgacgtcgtaatgtctcttcaaatggtatgtcaaaataatatgcgtatatatttgattcatataattcgtttgccagtttaaataacggactataccactcatcatacataattccttctaaaatcgtaagctcgctatgaatctttccatatttcaatagttccgccataagaggtaatgcctttgtatctatgccatctttaacccataacatattccttcggacttcatcctgtgatatacgcattgtattatatccaaacttttcctgtaacgctttagccacagttgttttcccacttccagaatttcctctaagaattattaatttactcatgtgttattctcctgtgcttctttctctaatgccataccccattcaatgtaaccataatttattggataatacatatccttatattcaggatgataacttcctaatgttttatcgactaaatcataaaatttaacttataacaatcgcttttcccttctttcataaatcaaatctgctttgaaacaaaatgtacaatttctttccctgactcaaggatatatggtatcaactctaaaggatataccttagtacctttctttaaatcctctagcggaacccagcagaaatccaaatcaattctctcattatccagctcatcatatccatgaaacactccatctaatggtatattatcatcgagcagatgcacattataatacaagcatatctgatgacacggtctttttccccatggaaaataaatttctccgattgctaacagattatctacctctatcttagcatgaagctcttcttcaaattcccgtttaagag

SEQ ID NO: 577 - DNA, 522 bp, Unknown
  gut microbiota DNA sequence
agggtgccttccgttggattcagaagacctccatggaccagcgcatccccaagaagcgcctggctcaggccatcatcgccaagtacggcgatccgaagccttctgattcgggcgaacgctgattatcggcgtcgccgtactgagtcgtaaagcaacacaaacacactatgggagaggccagcgtgaccgtacccaccaatgaaacattgctggtggtggacggccactcgctggccttccgtgcatttttcgccctgccggtcgacaacttcagcacctccagcggccaggccaccaacgccgtctggggttttgccaccatgctcgcgcaggtgatcgatgcggagaagcccgaccatctgggcgtcgccttcgatgtgaagggcggcacattccgcaatgagatgcttccgcaatacaaaggcacccgtgaggcggctcccgaagagctgctcacccagctgccattgattcaacgcatgctcacggccctcggcgtcacctacatcgagaagccgggat

SEQ ID NO: 578 - DNA, 617 bp, Unknown
  gut microbiota DNA sequence
atccttcttcaaggaacaattggagaaattaaacatatttcctgtcagtatggatttgttgcaacgggtgccagaaaagagcgtaaatttaactctgcacttggtggaggtgctctgttggatattggaatttacaatctgggatttttgcgtattgttacagggtgtgatccgcagaatgtagaaactacaaaagtacatattaatgagaatggaacagatgattacagttgtctcaaactgacatataatgatggatgtattgcagaatcagtccagacaataggagaggaattaaaacgtaatgccagaattgagggaacaaagggaagtatatttttgccggatttccaacacgcaaagaccttgatacttgaggtggatggtaaaggacctgaaacaatcgagtacccagttgatataaatggatttgaatatgagattcgtgaagcaggcagatgcatagcatcaggaaatagtgccagtgctatttatacaccggaagatagtattgcacttacaaggctgatgtatgatatccgtatgagctggaatatgatatttgatggtgagatacaggcataaatcgacaaatagcttatttcaaatagttattc

SEQ ID NO: 579 - DNA, 665 bp, Unknown
  gut microbiota DNA sequence
agagttgcttctgctgacagagcagatgcaggaagaactcgaccagaaagacaggactatccgggaactgaaaatgcagctcgacgaatcgctgaccttgaacgagaggttaaacagcgagaacagagcagggaacattcaagccttaaagaacgacttgaggaaaacaaaagaattgttgcagagagagaaagagaaaacgcacgctgccgaaatcatgacagaggaatgtcaagataagctaaggcaggcagaacaggaacgggactatgcactctctcatcagaaaaaagtagagataccggttgaaaagccagtactctatcaaaagtgtgggaactgtaacctgacagcttatctgaaagccaaggaaaagtatgatacgcagagagaaaaactggcaggcagatataaaacaaaaacagccatgtatgaagcattgatgtttctgctgatatggtattccgtatcaactactctttttcagatgatacggtcaaaaatatttatttctgattgcgtggtattctttgatacaatcgccacttttatacagaccattgcagggtggattatactgacaggaaagaacatggcacagattagtaatggaatatccaatcctgtcgttgccggaattgtatattggctgataagaatactga

SEQ ID NO: 580 - DNA, 311 bp, Unknown
  gut microbiota DNA sequence
tcgataatagtagatatcttgtttattctataattctctctcccaatccatccttcctgtcacattcaacagcttttcttctcggaagctgagcatctttccattagttccaccgacaatgatatgatccagcaattctatccccaatagctgtccgcacttctgcagctttctcgtaacaatcatatcctcttttgatggtttcacattaccactgggatgattatgaagtccaatgattgcagaagcatttgccagaatactgctcttaaaaacttctctgggaattaccaaagatgcattgattgttc

SEQ ID NO: 581 - DNA, 742 bp, Unknown
  gut microbiota DNA sequence
ggattgggcagatgcttggtcgttggtgatgcagaattgattaaagttcggtgctaataggcttgtagtgaggatgaataaatgtcaagaatgaagtttatgaatacagagattgataacttgacaatgcaggaaacgctgcaggctattgatcggctgattcaagaggatagaagtgcatatgtggtaaccccgaacgtggatcacattgtacagcttgaaacaagtaaagaattacaggcggtttatgagaatgcgtcattgattctgacggatggcaaaccactgttgtggatcgccaaatggtatggaacaccgattaaagagaaaatttcaggatcggatttgttcccactcttgtgtgatatggctgcgaaaaaaggatataagatgttttttttaggtgcggctgaaggtgtagctgcaaaagcggcggaaaacctagcaaataaatttaaaggattacaggttgttggtacatattctccaccattcgggtttgaaaaaaatcaggatgagatggataaaattaaatccatgataaaagaggctgccccgcacattttgattgttggtctaggctgcccgaaacaggaaaagttcatgtaccaccactgtaaagaactcggagtaccaatttcctttggattgggtgccagctttgactttgaagcaggtaatatcaaaagagcacctcgttggatgtccaatcatggcttagagtggctttttagaataacac

SEQ ID NO: 582 - DNA, 201 bp, Unknown
  gut microbiota DNA sequence
ttatacctatcattttttgatcaggattaacaagaagttgaatatattctgggttaccaatttgacggagtgtattgcggtggattcgtatacgattctttttaaagtcaatacatattagtggatgggaagagtgtttgttgttcataggatttttcctcactttctgctgttgatggttcttttgctttttctatggat

SEQ ID NO: 583 - DNA, 360 bp, Unknown
  gut microbiota DNA sequence
gaatccaccgcaatacactccgtcaaattggtaacccagaatatattcaacttcttgttaatcctgatcaaaaaatgataggtataaaggctagttgtgcagaggataaattggcacataaagttaaggattattttgtcatcaatggtaacagttatgaattgtacagccgagaattactatattcactttcccagcttaacctttcttgggagaaatttaacatttttcgtttagaaggcaatatttacccagataagaaaatagctctattttccatggataacatcatcacaaaactgccacaaacagaattcaaatcagaaataatgggagatgagtatgcgcaattatagtata

SEQ ID NO: 584 - DNA, 476 bp, Unknown
  gut microbiota DNA sequence
ttgagattaatcagttgtcagcaacatcaagacttacaattcctgcagattatagatttagaagcacaaaaaagggaatagcaactcatatttattatgagagacagggcaaaaaggttgatgacttttcagatgccaaagcagacaattacattgagctcaatggtataaagagtgagcttgtgattgtagaggctgaggtgtagtcatggaaaagtatatatatcgaccggtcagattctatttgattacatttgcctgcacttggttctggtggctatttgcaattttacttaatgaagggacagggctttatcttggaatgtttcttggcttggtttcacctgccgtagttgccgtagtaactgtatttacatctaagaataaagcactcattaatgactttaagaagaagctgattgggttttatagaataaaacctaaatatatattaattgcagtgctgatatttgctg

SEQ ID NO: 585 - DNA, 507 bp, Unknown
  gut microbiota DNA sequence
ggggctttatcttggaatgtttcttggcttggtttcacctgacgtggttgccgtagtaactgtatttacgtctaagaataaagcactcattaatgactttaagaagaagctgattgggttttatagaataaaacctaaatatatattaattgcagtgctgatatttgctgtgatagtgacggcttcaatcggtacatcagtattatttggcggtagtataaatcagttttcatttacagaagacttttcattttctataggtggtacgtctgcatttcttacaattttgttggcatcctgcatagaggagttaggttggagaggttatggagaggatgctgttggtgcatacaacagctggtttaaggagtctatcatctttggatgtatctggtctttgtggcatttgccattattctggatacctggaacgtaccagtatggacttaaagagatgggaatcatgtatgtgattaactttcttcttagcgtgataccacttgattt

SEQ ID NO: 586 - DNA, 3499 bp, Unknown
  gut microbiota DNA sequence
gtacaacagctggtttaaggagtctatcatctttggatgtatctgatctttgtggcatgtgccattattctggatacctggaacgtaccagtatggacttaaagagatgggaatcatgtatgtgattaactttcttcttagcgtgataccacttgatttccttcagacatgggtatatgcaaagaataacagaagtatgcttgcaacaattatttttcatttgtttataaatattatgtaggaaaagataaacatgactcctgaaacaaaatgtatacaaactatttttgttgttattgcggcaattataattgttgttataaataaagaaatgttctttgaaacaaagcatgtgggtaatttacttgaagagaaaattatgaatcgagagataaattgaactttatcaatgtaaagaaatcgacaatttcctgcgcaaatttttcttcgcctcttcgcaacaaaagttgctcagaaatggagattagaatgaagattaatgaatatcaggaattggcaatgacgactttaaatcctgaactaagtaaaagagatgtattaataaatagtgtaatgggattatgtggcgaatcaggagaagccattgatatagtaaaaaaatggatggctcaaggacatgaattggacaaggaacatcttacaaaatacctataaattaccaacatacaactatatataataactttgatacaaagaaacagagcaagtactaaggggacaaaaactttctggtacttgctcttattttatttattggaattattagaaaaaattttatattggaattattggattagaattattagaaaaaatttccattgacaaaattagaaaggtatgttttaatctattgaagttagttaaaggcaactataattagtcttggaggacaagaggttggaaaaagtaaatgatatctccaaatctaaaacattatatgtggttgtaataattttcctgatggcagcacttgtgattacagttgttacggcggtatcacttggacaggtgaatataaaagtatcagacacatataaaattatttttggaaagattatacataatgatgaaatatacaattcgtccagcaaagcaatgattgcaatagtctggaatatgagattgccaagagttcttcttggcttgttggccggtgccggacttgcattatgtggatgtgtgatgcaggcaacagttaataatccaatatctgagccatatattcttggtgtgtcatcaggtgctacatttggtgcaactctgcttatagttatgggactgggaacgtttgtttctggtggtgcatttgtgggagcagttatagcaacagttatggttcttgggattgctgccggacatggaaaaatgactacgacaaggcttattcttgcaggaactgttgttaatgcattgtttacagcattttctaactttattatctcagttggagccaatgctgacagcataatgacaatcaagttctggacaatgggttcacttgccaatgcaggctggaaaagcattatacttcctgcagttgttgtaatagctgttacattatttttctgtacgcagtatcgcatacttaatacgatgatgttaggtgatgaaacggcagttacacttggaataaatttaagcctgtacaggaaagtttatatgacattaatagcagtagtaacaggtgtgcttgtttcaagctgtggaataattggttttgtaggacttataataccacatatatcaagggcatttgccggaacgaatcataagagattagtgccggtggtgatacttcttggagcgatatttcttatatgggctgatgttcttgcaagagtactggttaagaatgcagagcttcctataggaatatttacagctttagttggtgctccattttttatatacattgtagctaagaagaattatggcagggagtagttatggaacttagatgtgataatatacagtacagtatagagggcagcagaatattaaatggaatatcgctaggtgttagtaataatgagtttcatacgatactaggaccaaatggttgtggtaaaaccacatttttaaagacggtttacagaatagcaaaaccagattttggaacgatatatctggatggaaaacctctggataatataagcataagaaaaagtgcacagaatatggcagttgttgcacagttcaataatcttaattttgactgttctgtgcttgatgttgttatgcttggccgtacccctcatctaaagatgatggagcaggagaaaaaagaagattatgagattgcatataatgcattaaaaagcgttggtatgtatgaaaaaagaaatcgttcatatttgtcattgtcaggcggtgaaaaacaaagagtggtgctggcaagggcgattacacagcagcctacacttttgctgcttgatgaaccgactaatcatctggatattaaatatcagcttgaaatattaaaaattgtaaaaaaattaaatgtaaatgttcttgcagttttgcatgatatacagctggcatgtagattttcggattatatatatcttataaaggatgggagaataagatataaaggaaaaccggaagaggttattacaaaagataatatgagagaaatatatgatgtagaatgtgaagttatcaatcgtggcagtaatcagatattaattcaatacacatgatataaaatataaatgtataataaaggagacttgaagcaatgagaaaattcaaatcactaataacagttttagcaataacagttacatcagcagcattatttaccggttgtggtaatacaggttccaatgatagtaacagaagttcacagttacaggctgaatcgaagcagacgcagtatcctgtaacaataacaacatatgatgcatctggtaatgaagttaagcagacatttgataaagcaccggaaagaattgtaacgaacaatttgtcagcaacagaaacacttattgaattggggctgggtgataaaatagtcggaatgatgaatccagataatgaagttacctcaatatataaggacagtgttgcaaatataaataagctgggtgataagaaaactatatctaaagaaatagtcttatctgcgctgccggatataattgtgggaagagcggctatgttttctgataaatctctgggtgaatatacgcaatggaatgcaaatggtgtggaagtttatgcacaggctgcaagtgtaaccaagggagagactaagattgaaagcgttatacaggatgttaggaatcttggtgttatatttaatgttcaggacaaggcagacgcatatgcagatgaacttcagaagaaatatgattcagtcctgacatcagtaggaaatacaggaacagacaagaaaaatgcacttgtaatgtgcgcatttgatggaaatacatttggcacatataaatcatctttacaggagaatatgttgaat

SEQ ID NO: 587 - DNA, 278 bp, Unknown
  gut microbiota DNA sequence
tctaagaataaagcactcattaatgactttaagaagaagctgattgggttttatagaataaaacctaaatatatattaattgcagtgctgatatttgctgtgatagtgacggcttcaatcggtacatcagtattatttggcggcagtataaatcagttatcatttacagaagacttttcattttctataggtggtacgtctgcatttcttacaattttgttggcatcctgcatagaggagttaggttggagaggttatggagaggatgctgttggtgc

SEQ ID NO: 588 - DNA, 201 bp, Unknown
  gut microbiota DNA sequence
caatattgaacatccgactttcaccgcaggtgttaatgaggattggatttatgatgaaaatgggaaacctaaatattggccaatcgacaattactattacacaggcgaaagagaaaccaattttcttggtcaacgagtaattaaacagcaccacacattaacgcagatattgaatccacttataaaatgtggttttcaaat

SEQ ID NO: 589 - DNA, 239 bp, Unknown
  gut microbiota DNA sequence
aaattaagccacaaccagacataatataagtgaaaatcggtgctgcgcatacatcgtgagatgcacttgaagttcaattgtgatagttcttagacttttctttctcttcctagctatccacagacacggatgtctgtgaaagtgagatatgggacatggatgtcccgtatcgaacggtagcggaaactaccattacgtatatgaaaagtcttagaaatatccaattgaagcttctggca

SEQ ID NO: 590 - DNA, 6911 bp, Unknown
  gut microbiota DNA sequence
aaattcaacatatcttacgtacgttttgtaaatacaacaaaaatttaaaatatctaaaaaaagtaattgacatctaatacgtgttagtatatactaacaccgtgataaatgaaaaacattatcaacattagtgagaggtgttaattaaaaacacccatatcattatatacagacaggagtgataattatgccattatcaatgataggtgaaggtgagacagctacaataacaagagttggaggcaaagaagaaacaagacgttttcttgagaatctcggattcgtagttggagctatcgtaacagtgatttctaagacaggcggtaatgttatagttaatattaaagaatctcgtgtggctattggtaaagatatggcaacaaagattatggtgtagtatttatcaggagcttatcagaaaattatttgagaacctgatatatcatcggcttgtttggaattatctgcatgataagttcatattgttataaagatctgataagcaggtctctatatagatttcatcattatatacataataagatggcatttaagctgatactgaagtattgaaatacaatatttgcagagttaatccataggtactatatatgaataatgatgattaataataatcatttatgaaggagagatgaagatgactttaaaggaagtttctgtaggtcagactgttaaggttgcaaagcttgatggtgaaggtccagttaagagaagaattatggatatgggcatcacaaagggcgttgaggtctatgtaagaaaagttgcacctttaggtgatccaatcgaggtaactgtaagaggatatgagttatctatccgcaaggcagatgcagctatgattgaggttaactaattagcttggtgcatatttttttaagcaagagttagaaaaagctaattctagcaagcaaaagctaaacatagacagttgagactaaataaagaaagaggtagaaagatgtcaattaagattgcattagcaggtaacccaaactgcggtaaaacaacattgttcaatgcactcacaggctcaaaccagttcgttggtaactggccaggtgttactgttgagaaaaaagaaggtaagttaaagggacacaaagatgttgcaatcatggacttaccaggtatttattcactttctccatatacattagaggaagtagtagcaagaaattatcttattaacgaaagaccagatgctattatcaatattgttgatggtactaatattgaaagaaacctgtatctttcaacacagattatggagcttggtattccggtaattatggctgttaatatggttgatcttttagctaagaatggtattacattgaatacagcaaagttatctgaaaaacttggctgcgaggttgttgaaatatcagcacttaagggaacaggtattaaggaagcagctgagaaagcagtaaagcttgcacagtctaagaaagttaacaagcttgttcataaattcagtgatgaagttgaatctgttatagaagcagttgaggacagaataggtcttgacgttgctaatgagcagaagagattctttgctatcaagttacttgagaaggatgataagataggacagcttatgacaagcattcctgatgtatcagaagagatagctaagcttgaaaaagattttgatgatgatacagaaagtattattacaaatgagagatatacatatatttcttcaattattgatgagtgtgttaagaaagcccatagcaaagataagctctcaacttcagataagattgataagattgtaactaacagaatattagcacttcctatattcgcagcagttatgttccttgtttattatatagctatggtaacagttggttcagcagcaacagactgggctaatgatggtttgtttggtgatggtttccatctttttggcataggttcttcagcttacgaagaagtatcagaagaatatggtgattcagacgaaatcattgcagcatatgtagaaagccttggagctgcaggtgaaaaaatagcagatgctattgacacagaagcagatgactatgattcagaagaagctgtaaaggctcttacaagtcttaaggctatggttaagtcaacagattcagttgattatactgtagaagatgaagaaacgcttgaaacaacagaagatactgctgatgcagaagctatcagggaagctattgagcttgcaatcaagtatgatggtgcggctccggacccagctgattacggtgtatgggttcctggtattccagctcttattggtgatggacttgatgcaatcggctgtgctgactggttagagggtcttatacttgatggtattgtagcaggtgttggtgccgtacttggcttcgttcctcagatgttagtattattcttattacttgcaatcttagaggcatgcggatatatggcacgtatcgcatttatcatggacagaatatttagaagattcggtctttcaggaaagtcatttattcctattcttatcggtacaggttgtggtgttcctggtatcatggcttcacgtacaatcgagaacgaaagagatcgtcgtatgacaattatgacaacaacatttataccttgtggtgctaaaacaccatttatagctatgattgcaggtgctatctttggtggctcaccttgggttgcaacatcagcttactttatcggtatggcagcaattatcgtttcaggtatcatattaaagaaaactaagttattcagcggagatccagcaccatttgttatggaacttcctgcatatcatattccaacagttggcaacgtacttagaagcatgtgggagcgtggctggtcattcatcaagaaggccggtacaatcattcttctttctacaatcgttgtatggttcacaacatactttggattcactgatgatggattcagaatgttagcagatgatgagattgatatgagtatcttagctaagattggtagtgcaatctgctggatattcacaccacttggatggggcaactggcaggcagctgtagcttctatcacaggacttgtagctaaggaaaatattgttggtactatgggtatcctttatggtggtggagagctttcaccatatgcagcacttgcacttgagtttactaagttagctggcttctcattccttacattcaaccttctttgcgctccttgctttgcagcaatcggtgctatcaagagagaaatgaatagcgctaagtggacatggacagcaattggatatcagtgtggttttgcatatttagtatcgctttgcatttacaatataggaagacttatcgcagatggagctttcagcttctggacagttatagcatttcttttagtaatcgcatttatatatctgttattcagaccaactaaggaagctaagcaatacaagaaagcagctggagttaactaatttagaattataggcagtaaaatgtcacggaggttagtagtatgggtacagtaatagttacagtaatattaatagtgattgtagcagcaattgtattcagcatggttaaaggcaagaagaatggtaaacacacatgcggcggggattgcggacattgtggaggttgccactgatataggaggcatcgatgcaaatgtactattcaggtgatgagagtgcttctaatacagtcagttatgaaagaagcagaatgcagaaggatatgattctgcaaatgttaaaaaaaaggggatgcagaattactaaacagagaatgatgcttttagatattattcttgaagaagactgctcatgctgcaaagaaatatactataaggcaagcaagctggatcctaagataggaactgcgacagtttaccgcatgattaatacacttgaagaaataggtgctataagcagaaaaaatatgtataaggtatcatgtgggaaagattgtaaagaaaatgataatacatttacagttgagtttgatgacaattcagttattaacctgtctgccaagaagtggaaccagataatacagaagggtctggcggcctgtgggtatatagataaccagacggtaaagagtgtgacaaccatacccttttgttcctgatagttctaaaaatagcaataaataaaaccaataaaaagtaataaaaaccaataaaaatcatcatatatgacatttaagatagtgttaaatatgatgatttttattattaaaaaatatgtggtcagagaacgataatgaaaggttttaagcattaataaaaggtcttaaataaaaaaaatactgctaaatgataaagtttatcgttaaagcaaaaatgtgtggaaattaaaaataaccgggtatataataccaaaaataaaagacagaaaacgaggtaaacgattatgaaaaacgtatttaaaaaaattgatggagtaaaaacaggattatttgcagcaggtgtactttttggtacagcaggaattaaagttttagcaagtgatgatgcaaagaagttatatgcaaactgtacagcagctgttttacgtgcaaagaagtgcgttatgaagacagcaacaaacatccaggaaaatgcaggcgatatatatgcagaagctaaggctatcaatgaagaaagagaagctgcagctgaggcagtagatgatatggatgaagttgttgaatctgatatgaaagaagaaacagaagcgtaaaacttaagaggccagtgtatgaaattctatataaaacatagcatgaaaggccgcataagagttcatatggatatgaaacgtatgacttataagcaggctgatattcttgaatattatcttaagaatatagattctgtctatgaagttaaggtatatgaaaagacgtgtgatgcagtaataagctatacgaatgataagaattatataattaaaaagatagcacaattcagctataacaggattcatgttccagaagatatacttacaagctctggaagagagatgaatgcgtattatcaggacaggcttgttaataaagtatttttaagaatggctagtaagatatttctgcctataccattcagaaatgcaataacagcatttaaatctgtcaaatatattgcaaatggtgttaagacacttgcaaatggcaggatggaggttcctgtacttgatgcaacagccatcggtgtttctatattaagaaatgactttaacacagcaggttctgtaatgttccttcttggcataggtgagattatggaagaatggacacataagaagtcagttggggaccttgcaagaacgatgtcacttaatgtaagcaaagtatggttaaaaacagcagacacagaagtgttagtgcctgtaaatacgattaaaaatgatgatgaaattatagttcgagtaagtaatataataccttttgatggtgtagtaacacatggagaggctatggttaaccaggcttcacttacaggagaatccgttcctgttgcaaagaatgaaggaatgtcagtatttgcaggaaccgtgatagaagaaggtgggcttactatacgtgtaaggcagaatggtggaaaaagtaagtatgataagatagttaatatgatagaagaatcagagaaacttaagtctggtcttgaaagcaaggctgaacatctggcagattcacttgttccatatacgcttggtggaacagtacttacgtatcttgtaacaagaaatgtgacaaaagccctttctatacttatggttgatttctcatgtgcgttaaagcttgctatgcctataacggtattatcggctatccggcaggctggacagaacgatataacggtaaagggtggtaagtttcttgaggcagttgcagatgcagacacaatcgtatttgataaaacaggtacgcttactaaggctgcgcctacagttaaatgtgtatattcatttaatggtgctaatgaggatgaactgttaagaatggcagcttgtatggaagaacattttccacattctatggcaaaagcagttgttgatgctgcagcaagaaagaatcttagtcacgaggaaatgcatacaaaggtagagtatatagtagcacacggtatatcaactaccataaataataagaagactataattggaagttatcattttgtgtttgaagatgaaggctgtcatattccagaaggtaaggaagaaatgtttgataagcttcctacgcagtattcacatctgtatcttgctattgaagataaacttgcggcagttatatgcatagaagacccggtaagacctgaggcttccaaggttatagcaagattaaaggaacttggtatatcaaaggtagttatgatgactggtgatagtgaacgtacagcaaaagctatagcaggtattgtaggagttgatgaatattattcagaagtacttccagaggataaggcatcatttgttgagaaagaaaaaaatgctggcaggaaggttgttatgataggcgatggtatcaacgattcacctgcactttcagcagcagatgttggaatagctataagcgatggtgcacagatagcacgagaaatagcagatatcacagtgagtgcagacaaccttttacagattgcgttccttaaggatcttagcaataatcttataaagaagattaaccgtaattatagaactattgtatcgtttaattcaggacttattgcacttggagtgctaggaattatacctcctacgacatcagcacttttacataacacttcaacattacttataagtatgaacagtatgaaggacatacctgttgaaagtggatgcaggtaataggttaggatacatcaatgaattgttgtttaacatacattcttaacgtacggacgacagcatatatgagaaaagcagg

SEQ ID NO: 591 - DNA, 204 bp, Unknown
  gut microbiota DNA sequence
gaagcaagtcacatcactgtacaagaccaggctgtgacagcaagacagatgtaactgttatcgaagcattaggacatgagtggggcgaaggaaaagaaaccaaagcaccaacatgtaccgaagctggagagaagacatacacatgtacaagatgtaatgcaacaaagacagaagcaatagaagcgcttggtcatgcttatagtg

SEQ ID NO: 592 - DNA, 1274 bp, Unknown
  gut microbiota DNA sequence
tggagagaagacatacacatgtacaagatgtaatgcaacaaagacagaagcaatagaagcgcttggtcatgcttatagtgaagaatggacagtagataaagaagcaacctgtgaggaagccggaagtaagtcacatcactgtacaagaccaggctgtgatagcaagtcagatgtaactgttatcgaagcattaggccatgaatggggcgaaggaaaagaaaccaaagcaccaacatgtactgaagccggagaaaagacatacacatgtacaagatgtaatgcaacaaagacagaagaggtagcagcattaggtcacgattacagtgacgaatggacagttgataaggaagctacaactacagaaactggaagcaagtcgcatcattgcaaagtatgtggagataagacagatgttacaataattcctatgattaaggcagatgtcagcattaatgttgaagttgtaaagaaagaagatacaccagatacgaccattgagggttcaaataatgaaataattaacagtgtttttacagaagaagaaattaaggcattcaagaatggtgttaaagtagaagttacaatagatataaacaatatcgaaaataaagtgactgacagtgataagaaattaattgataataagcttaaagctgatgaaaagataggtaccatacttgatatcgtacttaacaagaatgtagatggtaataaaaatagtgttcatgaattgaattcagctataaaacttaaagttgcaattccagaaaatattatcaataaggatgcatctataaaaagagagtatagtgtaataagaattcataatggagaatcagaaaatatatctgttgattataatgaaaatgataatactatcatatttgaaacagacagattttcaacatatgcgattgtctacaaggatataataaagaatactgaagataataaccagtcagtaatccctgataataacacatctgtagattcgaaagataacagcgttgctacatcagatacaatgcatgcagcaggcacagtgtggttattgtttgctataagctcaggaattatatgtgttttatcacgaagaagaaaaaagaatatataatgaaaatacaataagataaatatgaagatataggagcttaaaagatggcggtttattgaaaatgatatgaactgccatcttttttaatgccttagtttcgatatatgatgtcgtggtcaaaagccggaaatttcacgttgatttaactggaaattttacg

SEQ ID NO: 593 - DNA, 3076 bp, Unknown
  gut microbiota DNA sequence
aaatgtttatataaaattaaaaagtgaggtgacgataatggacgggcatgatagtcctcaaataggaagcaatgacatagattataagccgacaaagctattgtctgcgtttctaaaagggacgtgtgcaatagtctgttaaagtcgcctgttttctaatctttgtcattgttcttttaacattttaattgtgaaaggagaataatgatgaataagattctatctaatgtagttattcataaggattatagcaaagatatagtaagaatccttaaaagtaacagatctgatgaggtaatccgtaaaaaattatcgaaatatcatgagaatgatatagctgatgcagtaaaactactagataaagataccagaattcgtctttataagattcttggtgttgagtggactgcagaggtgttctcatatctggaggatacaccagagtatatagaagaactgtctgtggatgaggctgcagatgtccttgaaaagatggatgcagatgatgctgtagatatccttgataatgtgtcagaggaagaaagacaggctctgatatcacatatggagaaagatgccaaggaagatgtatgtctgatttattcatataatgatgatgagattggtagtaagatgactactaactttatatgtataaacaacaggcagactataaagggtgcaatgaaagaacttgtatcacaggcagaagaaaacgataatgtaaatacaatatatgttgttgatgacaacaatatatattatggagcaatagatttaaaggatcttattgttgcaagggagtatcagaagcttgaagatataatcagtacatcttatccatatgtatatgctcatgaaaagatgagtgaatgtatcgaagacttaaaggattacagtgaagattcaattccagtattaaacaaagataaagaaataataggtgttatcacatcttctgatatagtagaagctgttgatgaagagatgagtgatgattatgcaaagcttgctggtttaactgaggaaaatgaccttacagaggggctttttgccagtatgaaaaaacgacttccatggcttatattattactttttttaggcatgggagtatcatcagtagtaggtatatttgaaaatgtagtatcacagcttgcaattatagtatgcttccagtcacttatacttgatatggcaggtaatgtaggaacacagtcacttgctgttacaatcagggtgcttatggatgaaaatatatcagctaaacagaagttagagtttgtcttaaaggaaatgcgtataggctttgctaatggtctgttgttaggctctatggcattcgtatggcttggcatatatattatggttgtaaaaggcaagccatggcactacgcattcgctatatcaggctgtgttggcgtatcactactgctggctatgctcatatccagccttataggagtgcttacacctatgtttttccataagataaagatagatcctgcagtagcttcaggaccacttataacaactatcaatgaccttgttgcagttgttacatattatggattggctgcagttgtgcttataggaatgctgcatataacgggataataacctcttaaactaatgccgtctatatcgttaaatgcaattaagtttttaaatatttgtaacagatatgtgaatgatggtatataattaagaagaaattagaatagcaactatagaagctaaggaaaggaagattactatgagtgatgtgttggaaatgattaagacaagaagaagcgtaagaaagtataaaagtgacatggttcctgcagatgtaatagataagatagttgaagctggaacttatgcagctacaggtaagaacaggcagtcacctgttatactcgctgttaccgataaggaacttagagataagctttctaagatgaatgcagcatttatgggtaaaccagaagactttgatccattttatggtgcaccggttgtacttgttgttctggctgataagagtgtgcctacatacgtatatgatggttctttagttatgggtaatcttatgcttgaagcacatgcacttggcatagatagttgctggatacatagagctaaggaagagtttgaaagtgcagagggtaaagagatacttaaatcacttggcatagaaggcgattatgaaggaatcggacattgcatacttggatatgcagatggagataagccacagtgcaagccaagaaaggataactgggtgtatagagtgtaatgctgtataaatcagttatatacatatgccttggatacaacaaggcatatagaaggctgtgaactaaagtgaagataaatgataaagaaggagcaaataagaatggttaaacatgttatattgtggaaattaaaggaagagcttacagatacagaaaaggaagaagtaaagaaaggtattaaggaaggccttgaaggacttgtaggtaagattcctggtctggtagaagttaaggttaatattaacggcttaccaacatcaacagttgatgttatgcttgatacaacatttacagatgcagatgcacttaaggcatacagtactaatccactccacgttgctgtagcagatggaaaggttcgtccatatacagcggtaagatcctgccttgattatgaggtataggattaaatcccgcaaaagaaaattaataaaagaaaattgcaaaagaaaattgtgttatagattgacatgattcataaggatatgctattattcatctatatgaatatattaaagactgggaaagagacttcttttcatggaacctgacaggaaagtgatgccaccgactgaaagcatacacagggaattgtcaagaggaacactctggagttgaatatctgaattatatcaatgcccttggaatatgttatgaaatgcgtatgcgtacagctgttatagacaggcaggtgatatatgtaggttattacgttgtacgcgttaagtatttaaagaggaatgataagaagcctgaattgttaagtttattagtttactgatgacagctattcagaa

SEQ ID NO: 594 - DNA, 3599 bp, Unknown
  gut microbiota DNA sequence
aatatttcgcacgataattatgtttcaaattgtaacattttaacaattcttcgtcaagcatttttactttccacaaaaggagaaaaaaagagccaaatactacattcagctcttctttcttctatgatctataaggatttatttctttaatgtcttcatccactcatccatctcagctcgatctgccatggctgctaatgcaccttcttttgttgttgtgttcgctgcataagcattggcaaaatcaaggtagtttcttaatgtgtcatcacttacggattccaaatcttctacttcatcatttagcaggcagtataggaatgctccgataaacgaatctccagcacctgtcgtatctcggacatcgatcttatatccagaagcttctaccattccatttctcgtatacacttctgctccgtcagctccttttgtgtagataacgtattttgcacgatcagcaaataaaccgtccagagcatctttgatatctgtatgtcctgtgataaattccagttcttcgtcagaaatcttaatgatatctgcgtattttaagaaatcattgactgtctcttttaattgatcaagatcgtcccataatgaaaatcttaagtttggatcaaaagatactttcacattctgcgcgatcgccatatcgatcagtttcttgtgagcttccttcattggagattccacaagatctacgctgcaaaaatgaatcattccacaatcgtttaagatatctgccgggatatcttctacactgtagcgtaaatctgcactgttttttctataaaatttaaaatcacgatttccgtcagaggcaagggatacaaatgctaaggctgtttccccttctttgtctcttgcaatattagaagtgtcaattcctgcttcatctaatacttccacgatataatctccaaatggatcatctccaagctttgttaaaaatttggatggaataccaagcttcgtaactgccccgactacattggcaggtgctcctcccgcaactcttttaaatgaaggtacatcttttagtctctgtcccttaacttctggaataaaatcgatcagtgcttctccgatcccacataatttattcttcatgtcttcctccttcgatttcgaatgattttaatggatatacagtcattataccagaacattctccattaatcagtagtcttccataatgattgtagattcttgttgtaaaaacttcttctccatgattcacaaagatttctaaagatgaagtgtccgcaaaaatctgaagatgctctaatttttctaatctgacttttcttgttgatcttccacttccatagactccaagatttaaggtcaggatattgtctttataggaaagagtgattccttcgcgcagtgtcattaccatttctctgcatcgtttaaaatctacaacagcttcatagattgcattttgcatgatgatcgtctgtccataacaaaatgtacaaactgctttgtcctcgcttcgaagttgttttaattcttcgattggttcctgaatcagttttccgtctcttacggataattctcttggaatcgtcagtgcatgctgccatcctgcttcttcggttggattcgtatagtctgcgtctgggattcccatccagccgatcagaattcttcttccactttcatcctcaaaagtttgtggggcatagaaatcaaacccacggtcaaaaagtttgatatctttaatttcatatttatcagtatcaaaatcataatctaatttcatcgctgtgacctgatgaacattttcgtaatcaataccttgtgtttctactccctgtgggcagcagatgatgtataactgtccgtccatctcaaacagatccggacattcccacatataaccaaacttctgtggagttgtgatacgattcttgtatgtccagttcttaagatctgtagattcatatagaaggatcatacccacaccttcgacatcccttgctccaagaaccatgtaatatttctcatttttcttaaagatttttggatcacgcacatggttgctcatgtcagccggataatcgtcggttgtcattaacaattcctttttggtaaactcatagccgtctttacttgtaaatgtgatcgtattacttccacgtccactgttgatatagtcataatcatctctgtcaaaatattttaaatttcctgtgtagaaatagtggatcgtatcatcttcaataaatgcagagccggaatagacaccatgggcatcaatgtcttcatctgggaatacgactggtccaaaatcttcataatgaataaaatcttttgtcgtataatgtccccatgtctttaactcaccagttggttcaaatggagtgtactggtagtaaatatggtatgtcccattaaactggcataaaccatttggatcatttaaccatcctgtctttggcattaaatggaattttaatcggtcttgatctgctgccacacgttgtctgtaagcttcattttctttataccatttttcataatctgccttatagactttcttgtatttttcaaacatctgccctggtttcctttccttcttcgaataatgattattttaaattcatgatcttcgtattattatctgcatccgctgcttcaaccacttcgacttcttttcctttcgcatctgcaactaagaacatcgtctgtgtcttgtatcctttttctttcacaagatccatgtcaaaagataataatttatcacctttctttactttggctcctgtttctacgaaagtctcaaaaccttcgccattcatcttaactgtatcgattcctgcatggatcagaagttctactcctgagtttaatgtgatccccattgcatgttttgtagggaagatcagactgatcgttccatcggctggtgcatatacgatgccttcgcttgggttgatcgctacaccttctcccattgccttacttgcaaatgctgggtctgcggactttactacatctaaaacttcacctttcattggtgcatataattcatttgtttcttctgttgtatctgctggttcctgtacttcgatttcttttacttcttctttaaccggagtctctgctttgtgatcttctccttcgatgttaaacttcttccagaagactgcagttaaaactgcggatactcccatggataaaagcagtccgatcacgaagtttaagtaatcttttggaagcatggacaggaatcccggaagtcctgctgctcctaatgcctgtgccaaaactcctgttgctgcacaatatgcattacctacggctgaaccgatgatggcagcgtagaatggatattttaatttcaatgttacaccgaacattgctggttctgtgattccaagtaatgcagaaacacctgatgcagaacagattgatttcatcttctcattctttgttaagaataaaactgctaatacggctgctccctgtgctacgttgttcatacttgctgttgtgaagataaaacttccacctgttgttgctttggctgcgatcagctgtgtctcgatcgcgataaagctgtgatgcattcctgttagacagat

SEQ ID NO: 595 - DNA, 31594 bp, Unknown
  gut microbiota DNA sequence
atatctataaacaattataataagtttattttgtttaaccattcccaaaccaactgggactgttcattaaaaaaagccaccgttatatatgcaccaaacggaagcggaaaaacaagtctttctctaatgtttaaatctttatgcgataatagttctttacatgctaaagcttctttccaagcttctgcaccaactgaaatacggttgttaggtgatgataacaaacaatttatatatatgaacaacaaatggaatcgaaatcattcatgcatcgagatattcaacagtttttatcttgaagataatatttattcaatatctattcatgataatctaaacgagcttaatatatttgaactaatatgtgcagacgaggctttacaactcaaatctcaaatgtgtcaaataaagcgagagctatctttgttaaaacccaaaataagaaatcgcaagatgaagctcagacaaaataaaatggaaataaagaatgacaagacattaaaaaagttattacttcagcgtgagcaattaaatgggcattttaaacagttaggcgaaacaagaatatctttaataaactctcgaattgatagttacatccaaaatataaaccgatatttggcaactttgagcgatgatttaaaaataatagatcaaaaaattgtttatattagtcaatcaaacgaattaagatttatctacggattaaagataaataatcacgagattcatttctcagatcgacaagctgaagctccttcgttaaaatattacttaagtgaaggtgacaaaaatgcattagccttatcattttttcttgctaaaatagatattgtaccaaatccaaaagattatatcgtagttgtagatgacccttttactagtttcgatacccatcgaaaacaaactacaataactcagttaactcgtattgcaaacaaagtcggacaaattattatacttacacatgatttacattttgcaaacgatttttgtaatgcctataacggagaatgccttacattacaaatacaaagacgtaatgcgtctaacacacttgtcatacaagatataaaaaacgatttattaactggattatcaaaagatatcaatacattgcatcaatacatatattccggcgaacaagatacgctttacttacgcgaagttgtaagatgtattagaccttgcatagaaggtatttttaggctcaaatatttcaatttagttaaagacaatcaatggttgggagatttcatttccatgataagagattctgatatttcatccccgctatatagacttaaagattacttaccagaaatcgaagaacttaacgaatattcaaaaatataccatcatagtaaccctaattacttagatgtattaattaatccaacagagttatcaatccatgttagatctacaattaatcttctttatgttttgtaattattatatataaagcgactctacaaacacaaagactatttatcaataaataatattttccaaaattattgtcatcaggcaaaaaacgagccaagaaacgccgtaaattcggcatttcttggctcatgtacattattcaaactcaatagttccaggtggcttagaagttaaatcgtacattactctattaactcccttaacctcattaataatcctgttcattaccttattcagcacttcatatggaatctctgatgcctctgctgtcatgaagtcgattgtcttaacagctcttaatgctactgcataatcatatgttctgaagtctcccataactcctacacttcgcatattagttaatgctgcgaagtactggttgatttctctgtctaatccggctttggcgatttcttctctgtagattgcgtctgcgtcctgaacgatttttactttttcttctgtgacttctccgatgattcgaattcctagtcctggtcctgggaatggctggcggaatacaagtctttctgggattcctaactgcagtcctgcctgtcttacttcgtctttgaacaggtcacgtaatggttcgatgatttctttgaaatctacgaagtctggcaatcctcctacgttgtggtgggatttgatgactgctgattctccacctaatccactttctacgacgtctggataaatcgttccctgtgctaagaagtctactgcaccaatcttctttgcttcttcttcgaagattctgatgaattcttctccgatgatcttacgttttgcttcaggttctgtgactccttttaatttgtcatagtatctttgctgtgcattgacgcggataaagtttagatcaaactgtccattttctccaaatacgccttctacctcgtctccttcgtctttacgtaataatccgtggtcgacgaatacacatgttaactgttttccaatggctcttgataataatccggctgctacggatgaatctactcctcctgataaggcaagtaatacttttccatctccgactttctcgcggatttctttaattgtgctttctacgaaagcatccatcttccaatctcctgcacatccgcagactcctaatacgaagttggaaagcattgtctttccttcgactgtatgaagtacttctggatggaactggatcgcatataaggacttgtctgcattctcagctgttgcaactgggcagtctgctgtatgtgcagagatttcaaatcctggagctacctgtgagatgtagtctgtatggctcatccagcagattgttttttctgatacattttcaaataacttggaatctttcttgtcgatcagcacttctgttttaccatattcgctgacttcggctttctctacttttcctccaaggacatgttgcatcagctgtgctccataacataatcctaaaactgggattccaagttcgaataattccttgctgtatgttggggaatctggttcgtaacaactgtttggtccgcctgttaagatgattccctttggattcatttctttgattttatcgataccgatcttgtaagaataaatctcgcagtatacattgcactcgcgaacgcggcgtgcaactaactggttatactgaccaccaaaatcgatgacgatcactaattcatttttcactcgatttcctcctgagttgcctagtgatatgtttcgttttattcaccttttaacagatcaactttgtcaagtctctcccaaggaagatcaaggtcatttcttccgaaatgtccatatgctgctgtctgtttatagattggtcttcttaaatctaacatcttgatgattcctgctggacgcagatcaaaatgtttacggatcaggtctaccaattcctgattggatttctttcctgttccaaatgtatcaaccatgatagatgttggctctgctacaccaatcgcataggataactgaatctcacatttgtcagctaatccggctgctacaatgttcttcgctacataacgtgctgcgtaagctgcagaacggtctacttttgtacagtcctttccggagaaagctccaccaccatgacgtgcgtatccaccgtatgtatctacgatgatctttcttcctgttaaccctgcatctccgtgtggtccaccgattacaaatcttcctgttgggttaatgaagaattttgtttcatcatcaaccatatctgctggaaggatcttatcaaatacttcacgtttgatatcttcatgaatctgctcctgagtgatatctggatcatgctgtgtagataacacaactgcatcaagacggcttggttttccatcatcatattctacagttacctgtgttttaccatctggtcttaaatatgacaatgttccatcttttctcacttttgttaactgtcttgaaagcttatgtgcaagagagattgggtatggcatgtactcttctgtttcattagtagcaaatccaaacatcattccctgatctccggctccaattgcgtcgatctcttcatctgtcatgttattctcttttgcttctagtgctttgtctacacccatggcaatgtcactggactgttcatcgattgttgtaataacaccgcatgtatcagcgtcaaatccatatttacctcttgtatatccaatctcacgaacagtatcgcggacaattttctgaatatctacatatgcttttgtagatatctctcccatgaccataacaattcctgttgttgtgcaagtctcacatgcaacacggctcattggatcctgttctaaaagtgcatctaagattgcatcagaaatctgatcacagattttatctggatgtccttctgtcacggactctgatgtgaataatactttatccattctattatcctttcttaaaatatatctgttatttgtaaaatatcatgaaaagacccgaaggattccgggcctttatttacctctttaacacgaccggtgcattcttactccggataacttcgatctgtgttatcttaccattctttaccttggcaacacgaagtgctcctcctttaaagaaataacactgacctacctgaaaattcccactctctgttccaattcgtttctcaagtaattctcccaatgtctgatgctgtgtttcttttggaatttccacatgaaccagttcattgatacttgaaattctctgagttggcaaaaatactgtcttatctatatcatcaaactttccaaaaaagaatttcttgatcgcaaataaaatcgcgatcgctaaaactactataagattctgctgtgggctcgtatgttccacgatcatctgccttgcaatggcaaacatcataacttctactaacgtatctggggtatgtttacaaagcatctttacaaactcgatacaaatgacgagattaaacgctacaccaacaaatttataaatatctctggatgttgggtaattcatcattaattgtaccacatcttttaccagatagattgttcctccgatgactgcgatcataatgatcgctgatataaataattctacccacttggatactttgaacacttcgtttttcaggtattgtctcattcaggcaattctcctcttatcctatctttaacttaaactttgcaacttctttttcattgttaaccagctgaatctctccacccaattgtttaagcttctgttcaaactgttcgtatccacgataaatatatccaatatcgctgacggttgtaaatccttttgcagataatcctgcaatgacaagggctgctccagctcttaagtctggggcgtgtacgtcagctcctgtaaatccctcaactccgctgatgatcgcagttcttccatcgacctgaatggttgctcccatctttgtcagttcatccacatagcgaaaacgattttcaaaaatactctctgaaatcacacttgttccattggataatgcaagtgttaccgccatctgtggctgcatatccgttgggaatccaggatatggtaatgtcttaatgtttgtagattccagacgttttgtcgctgatacacgtactgcgtcatcgaattctacaacttctgctccaatttcgattaattttgcagaaattgcttctaaatgctttggaataacattcttgatcataatgtcaccctttgttgcgactgctgctgtcataaatgttccagcttcgatctggtctggaataatggagtactgacaatctccaaacttctcaacacccttgatacggatgacatcagttcctgctccacggatctttgctcccatactgtttaagaaattcgctacatcaacgacatgtggctcttttgctgcattctcgatgatcgtatttcccttagcaagcgatgctgccatcataacattgatcgtcgctcctacagaaacaacgtccatgtaaatatgggctccctttaattcctctgctgttgcactgatcataccattctcaatctcaatctgggctcccagcatcttaaatcctttgatatgctggtcgatcggacggcttccgatctcacatccacctggaagtgcaactcttgctctcttgtatttaccaagtaaagcaccaatcaaatagtaagaagctctgatcttacggatgaattcattgtctacatcacactctggatgaattccttttccgctgatcgttacttcgtgttttcctgttctgtctacatctgctccaatttcctgcatcgcctgaagtaaaacattgatatctcttacatctggcatattatctatcatacattttccgtctgtcattactgccgcagctaaaacaggcagtgctgcattcttcgcaccgccaattactacttctcctactaatgggttaccacctttaatgatatactgttccatgatacacctcaattatctctattattaaacctaatttctatctttcggtaattatttaaaatcatacagattatattatagcatactattagaggttttccaacactttttctaaggagttcccgatggataatttatccagttttactgtgatatctgcgtatttttcataatatggaattctttcattatatagatcacgtaatgtctgacctttttctagtactaccccccttgctttgaggttcccaaggcggcgttttactgtctggtaatctagttttaagtaaattatagtcccgatttctttaaaatgtctcattgctttatcactgtaaacagcacttcctccaggtgcgatcacggatttattcacatcgatcgaagcattgacgtcttcttccaattgtttgaatccgtcattcccgattcttgcgatgatctcttttagcaaaccacctcctttttgttgaatcacaagatctgtgtccacaaaatcataacccagggctttggcaagaagtactccgatcgtactctttccagaacctggcatcccgatcaatatgtagttattatttttttctgccatttggtttcttccttttctttttctttcttactgagtagccaaaggttcctaatttctttcctgtttcataatatccgccatgtgaatagatcaacggattcgttttttccagtgcaaagcgtccgttgtcttccatataatcatcatctaccataatattgacaactttcgccataaacatatgatgtgagccaagtggtacgatcttctctactttacattcgatatttaccggactttctgcgatgatcggtgcatccacaacctgtgcttcttcttttgtcagtcttgcttctttgaatttatcaacatctcttcctgaacgtactccgcagaaatccgttgctcttgttaactgttttgttgtcaggttgatcacaaattctccactattcttgatcatttcataagaatgtctctctgggcggacagaaatgtacgtcattggcggattcgtacagatcgtccctgtccatgcgatcgtaatgatgttatcctgacctttatctctgcaagtcaccataactgctggcaaaggatagatcatatttccaggtttccatgaagtttttgccatatttctctcctagagtgcctttttaatatcctgtcttaattgttccatatcgatatcttctgtggaatgttctttccatccgatcgtcacgtcatccccttcatatcttgggatcaaatgcatatggaaatgatatactgtctgacctgcgatcagtccgttgttctgtaaaacatttaatccatcacagtgaagcacttcttttaatgctctcgcaacaactgttgctaactggaataattttcctgctgtgatcgcatcaatctcatagatatctttaaaatgttctttcggaatgatcagtacatgccctttggatgctggtgcaatatccatgatcactttaaactcagagttttcataaattgtgtttgatggaatctctccacctgcgatcttacaaaaaatacaatcttctttcttcatattatatatcttccttcctgtgtgttcttattttgagagcttacatattactctgtttagatgtattttatcccatttactattgtttttcaagaaaagacctctgatcaattatgcttttgacacttatatcatattattccattctcacaaaaaatgtgtattttgttcacaatttggacacatttttatgtgataataaaaatcgtaaagtagttaatactttcaaatcctacccctcttgaggatgaaaatcctctccttattgttttaaaagagagaaccgacctagctagtcggttctttctttttgttttatgattatatgatgtaagtgtcaaaagtataaattgcgtttgtgcttgcacaaataagcaatttatacttattgacacgccgaacaacgagaacggaataaaatggtgtgaacacaccattttatgggagttcgaggtgttcgaggattgcgaaattgcgtagcaatgaagcaatccgggtacgtcagagagtggcaaaatttacttttgacactctcatcattatataatgtaaaaagaagccttgacttaagttttatgtcgttgatcaacatttttctttagccaaagcttcttttttatttttatatttcggtacgtccttctaatgctcgaagtaacgttacttcatctatatattccagatctcctccaaccggaactccgcttgcgatcttactgactttgatgcctgttggtttgacaagtttgctgatatacatcgctgttgtctcaccttccagactggagtttgttgctatgatcaattctttgacatctccctgcagtctcgccattagctctttcagacgaatatcatctggaccaattccaagcatcggagaaattgctccatggagaacatggtaaacaccttcgtattttcctgttttctcatacgccattaagtccctcgtgttctcaacgaccatgatcgtgctgtgatcacgcttgtcgctcgcacagatcggacagatctcattgtctgtcagtgtacaacattctttgcaataatgtacattagtctttgcggaaatgatcgtatctgacaatttctgcacctgatcctgtggcatattgataatgtgaaatgccagtcttcctgcggatttaggtccaattccggggagtttcccaagttcttcgatcaactgtgtgatctgattactgtaataatccatagtctctcactctatctaaaatgggaatcctccacccattcctcctaatccaccagtgacttttcccatcttctcctgagaatcttcttccatcttacgaagtgcttcatttgtagcagctacgatcagatcttctaacatttcaacgtcatctggatctacaacttcttcttctaaatgtacagaaactacttcttttttaccagatacaacaacttttacgactccaccgcctgctgttgcttcatatgtggattcttctaacgcttttgttgtttcctccatctgtttctgcatcttctgtgcctgtttcatcagctgattcatatttccacccatacctggaaatccaccacttctttttgccattgttcattcctcctgaaaattcatttttataagttttgttttaatcttctatttttacatccatatgaatgcagtctaaattgatcatatcactgtcatcattatctgtattcatcacactaacttccagttcgacatctctgccagactgtcttgataattcctgcttaagctgttcaatacgctctggttcctctaagaaatatccactttccacgttcatttcttttgggaacagtactcttaacgcagttccttcttcgttgaccgaaagtgttgctctctgtaaacaatacttcatctgtggtgacagattgcgtttgacatctctccagtgattcacaagttctataagttcctcaacttttgctggtggaaacttctcatttaactgttcgacaggatcttgttctgattttacttcctgttgcagtgctatttgattttgtcccgcttgtgccgcctgctgtactgggattcctgactgtagcaactgttctaactgctgttctaactgtctcaccctgtcggccagactgtttgtgtctgcttccatctgtggcctgcacatcttcatcatctcaacttccacaaggactctcttggatgtcgcataacgtatacgctctaacaattcggataagattctgatgtaacggatcagtgtgttttcttccacctgctgtgctttctcctgcagcaatttcaactgatctgttgatacttccaatgcctcctctgcagcatttccttgaccgactaagagcagattccttaaataccataggaaatctgtaataaattgtgaccattctcttccctgtctcgccacatcttccagaagatccatcacgccattgatatcctgcgaaagaatcatatccaacagatcactgtacacttgaatatcaacagttcccagcacctccagaacattatcatatgttaatttctcaccgagataaaatgcaatacactgatctagcaaactcaacgcatcacgcatggaaccgtctgccattcgtgccacatattccaacgccttatcttctgtatcaacatattcttgttccatcagatctgatagctgcttcttgatcgttgctgccgtgatacgatgaaaatcatatctctgacatctggataagatcgtgatcggtatcttgtgaacttctgttgtcgcaagaataaatataacatattctggcggctcttccagtgtctttaacaatgcattaaaagcacctatagacaacatatgcacctcgtcgatgatataaactttgtactttcctgttgcaggtgaatactgtacctgttccttgatctctcggatattatcaacaccattattggatgctgcatcgatctcgatcacattcatggaacttccttctgcgattgctttgcaaacttcacattctccacatggttccccatcgactggatgttcacagtttactgctttcgcaaggatcttggctactgttgtcttaccagtacctcttgtcccacaaaacagatatgcatgaccaatccgcccagtcctcatctgattctcaagcgtcttcacaatatgatcctgaccttttacttcactgaaacgtgttggccggaactttctatataaagccatgtaagacatatcatatgcccctttctattttgaaatatgacatatagccatacttcattatattttaccatgagtatctatcctttttcaatgattgttttttgacagaaaacatcgaacttttttgaacgctttttcttgcccttaatcttattttttccgataataaaagaggaaatttaattacaagaggagccaacaatgaacgatttacaagaactttctacgttttcacatgagataaacaattctctgactctcatctacggacagattcagtgcattgaaaaaacatatgatacacttaccagaaatgaccattggaaccgtatgaaagatgatttttcttctttatttgatttcattcatcagtttctggcaccagcagaagaatcttctgccgccatggaaccactcgacctgatcagcgtgatcagtgaaatccgttcttcctggtcttattatctccataaagaacagattcgcttctttattcaggcagaccccggaaccgctttttatgtttacggtgcaaaatcaaaactttttcagttatttcataatctgatctccaatgccgtcaaagcgatccaacaaaaaaaggagacctgccgatctcctcatattacacatattacagtccacttaagcaaagaacagggacatattgtattaaatttatccgatactggaatcggaatgaccacagaacaacaatcgagagctttctaccgtggtgtatccttccatcccggcggaaacggaattggattatccgttgtacaaaatattgctcgcgatcttcatattaagatccatattgattccgcaccgaatcagggaacaactttcacactgatcttccctgcttatgagcagcaattaagctgcccaacacgtacagaagcattgacaaaataaatccagcaatacatccaccgatatgagctgcattgtcggttgttccactctggaatccatgatacagacttcctgcgatcattagaaagattccaaatccatcgaatctctgtcgttgttctttgcagaataaaaatattgctgcaagagcaccgactaatccaaatatcgcaccagaagctcctgctgacaacacatcttgccctatcatgctgtaatatgctacagaaatgatacttccggcaatgcctgctccggtataaagaatgacataccgcacgcttccgatcactttctccaaagaagatccaaggatcaaaaaaactgccatattattaaagaaatgatcccatccaaaatgcagataattcgacgtaaatagtctataatattcatgcagtttctttaccatatacgcattacacgcaaatgaatcatagatcttgtctccataaatttctgtcagaataaaacagattaaattagctgtaaagatcagaagggttgctttatattgatagagcgatctccagaaatccttgacacttttattatctttcacttctatttccgatccttgccctgcttgacttacctgattctgtgctaatactatggataatggtccatacagatcatcgaactgatcctgtggatcaagaaatactggtttatcattctgcgacaagataagcatcaatacaacacaatccataccaaacagctgccttgcatagtcttccaaatgatacagatcttcttccaaaatactgcttccatccggattcttgtcaaatatcacgaatacacatttatttcttccattgatattctttacataacatggtcctgtttcggtatcatttttcatatatccatgaatccttaacaattctatgattttctgatacataatttcctccgctttgatttatgtatctactattataacacagaggctagtcttgtttaaaataaaactcctcaagtccgatctttatacaatctccttcttttaatactgcttttttattctttttcccatttaattttacaccattgatctttataccatttgtcgaatcgagatcttcacaacatacatttccatcttctttataaaatcttatatgtctccgactgatcccgattccttctaattgataatctgttccttgtgcggaacttccaatgacaaatccatcatcatttaatacaatttcttcttgttctggattcttcgagaccagtcttccaatcggttcttccagtaaaagaactgtcctgtcatcctcatcctctaacagaattgttttctcatccaataattctgcagcattttctgttttccgccatgaatccacaaagatctctggatttttattctttttccacaatttataacatccatacacacttacaccaaggcctgcgatcgaaactagtgatccgatcaaaaacaaataataaaatccatattcaaatatttttaatacaaaataaacaattccaaatatgctgcaaaaacaaccaacaacacttatcattttcccgatcagaattaaaattcttttcggtgttttttcataaattttgatctcttctttttcagaatgatcattctcatctcttatagaatccgatagattctcctgcatatcttgtgctgatttcaattcttcatcttttattttttctcttaaaatttcaccattcgttttctctgaccgaacttccagataatccttcatctgttccatattcggtttttctttgacaagaaaactatgaaattcataataaaaacgaaccctctttttatcatttccagaaatatactcaatacattcttctaaaagatcacggagctgctcatcaatctttttttcatattcaggcagataacaaagaactggccggtcttctttatccagaaacatagattccaaatctaattttaaatgatccagctctaacagataggaagctacctgttcaaaaacttccaaaagatacgcaaaaaacaatttcggttctaacatagaaatcctgtcttttaactttgtgtaaatacctgtttcataataataatattcttctccatcttcgatccggaattcacatggaagaagacacggaagtgtatgattgtaaagaatatttttttcatatgttaatttcagttcttttttaacaacataataactggaaaaaccttctctaatccattgctccttcaagtgcattccacctcctgatctgatcgatctcaaaatctccctgcgcctgatcatttccttcatattcaaacaagcggattccaaacatacttaagaaatcacctgccataactgctgatcttgtctttatttttgctgaaactctaagcggtgttgtcgatactctaaccaaacttacttctgccataaacagatgccttcgcaattgttcttttatctctttttcagcttttgcatttcctgatttgtttgacgatatcacatttccagtgatcaacttttgatttactttctgatacgacaactttcccgtatcatactctgcccctgtaattttaacatctgccgctttctgcactgcttcttccatgattccttgtgcgatcccacagttcataaaataaaacagatagctaaaaaacatccatagcaccatcaaaatgatcggaagcagcgcactgatttcaaccgtcatgtatccccctgttttgcgcatctcatgcatggcctcatcccctttaatgtacttagatccacttgtttgactgttctttttaacccgctgcagccaagatccgtgtgataagattccccttcttttgcgatatatacacaggaaaaatcacctttttcatgcttggtgcatttatcacatggcttgtattgtgtccgcttgtttctatatttttctacatcttcgtcaacagaaatatccaatgacagatgtgtacaggagagatctttatgatacaccgcttcatgcggtgtgatatagacatagcctttttttaattcatctccgtctggtacatatcctgtcatggatttttgccttacactttgctcataggatactatatgtgttgataaaaacggcattgttttgcgaatataataacgcacagatacgatatattcccctttagaggtcaatgtcagtctacacgccgctgccgctcctgcacttcctccgatcaaatccgaatgatctaaaaacttacggtttaccgctgccagaaaagctaccttggcactaaatcctgataagtcacttccagattttttcttctgcctgatgcgatattcattaactgcagccctctttgctgcctcacaagcaccatgagaaatctgttggtggatcatcaaaatctctcctgcacttgtaagcattaaaagaacgatcaaaaaaatggggacgatcagactcgcttctaatgtcattgcgccttcctcattttcagaaagatctgaggcagaggaagatgctctcttggatttttttacgacgatcttgttgttattgttatcattttgaaccggattcacttttgagaaatgtttttgacaagagaacatctttctctgccccctttctttcattttgatcatttaaattttaatacgttacatatcgatacattttaagatctgtatatgttgcgaatggcaagatcattccaccaaatccgagttttttcaacttcagattctgcgtgatcttgtaagaagaaatgcattgatccaatttaaaatctgacacttttcttcggatattttgttccatcagatccatcattcggaaatatttttgacgtttatctttttgtgatatcaacagtaataacaaataatcctcgtacgccattccctgtttcacaggttttctcttgcaatttaacgttgccagtcctgcaaaagaaagctgccagtctgcagatgtttttactgctgggatttttttaccatctgcaagatttcttacatcgatcactgattccccataagcaagtgctagtaataacaggttctttgcaaccgcaactgctggtggaaatcctgtaactccaagaattgacgctgctaacaatgctgcttctttttctttggccggatcttgatatacacaagctgcattcatcacaaatctaagtgcgatcatcctccagaaaaccattccaagattctctttttccgaatctttccctgcgatcaagtattcaatctcatatttaatcccgtctttttttgttgtatctgtcagaaaatgaaaatattttgttgcatataaaactaccggtaattcacttgcaaaggaatccgttgatgctgttttttcgaattcatctaattctttttccacatcttttcggttcataaaattccatgcactctgctttgttgtgtcttttttgccatagacaatattaattggaagatctgacacttttttctctcccatgatcaatgggaccgagccttcttttaacaatttcataaatccttttctcggatctttttttactggttctgatgttagtgttttttcattttccgtttcttctgcttcttcttcctctttttgaatctgatccttaattcctgagagctcatttttctggtcttctccagccttgatctttttggtcaagtttttcaaaatatcccctgctgcttcatattgcatctgctgccgaatctgatatttcaaaacttctcctttttgtgctgacagatcaagtatatctgaaatttttgtacttcctgtttgaaagcgaaaaggatctccattctgatccagactttctttcatgcggtctgaaaaatctgtttcgatcttcttgtgatatcttggatccatcgcataaatatgatacatatccgcaagctctttctgataatttccttttgtatgagaaagcccagacatataaatacccatcgcctttcccctcgctgtatacatatagattccttccacacatacgctgatcaacagtaaaaaaacaagaaataacattgcaagaaatgcactcatactaccttgctcatcccggatcatttgacttgtcctgttttactagtgatcgttttaaaaatgctatcaacgactttcttgatctgcgtctggaaaataatgacgagtccgatcaaaactacaatgatcaaaatcacctcaacaacacccattcctgattcatctttaaaaaaatgctttagaaaatttttcatatgttttaccccctgaccttttatgaaaatgtagatagtgctggaaacatcaataatactaaaataacaaccaacattaccatcatcggtgcgagcagttttgtgcttgcttgttctcctttcctttttgcatgttcttttttctcaaaaaaagctccttcttcctcttcttttaaccttagaaacagatccgttgaacctcttgtaatactctgtacgagcagaacagataatttttgataagaagacaacccaatctttttgcccatctcaccaaatgcttttgtctgtggaactccaaatgaaatctgtctgcatgtttttttgatctgttcatatacgaagatttcttttttgtttcctcttctttgttctttctcgtattccgtcgctactgcttccaatgcagccaccacactcattcctgtccccagaaataaaatcagatgttctatgatctgtggatactccaccatagattgttccaatgtctgtattctttgttccttatatttttcattttcgtgataccagaaaaatatgatcactgcaatcccaagaaataaaattgcaggaatctgactttcattttccgcaggtaaaagtctgccctgccggatcacatctggaagataaaactgttccttcgtaatatgtttttcttccaatttcttaagatctgcaatgatcttttgtttttctgatacctttttccctgaattcccaggaactacacagacaggaatctttaagatccttacttctccttgacattccatccttgcattaagattcaacagatagtcttttttgacattcttcgaaaacacattgccttcttcatcgatgactgtaggatcatcactctgccattgtaccgcaatattttccccaggtatctttactggcatttcaagatttcgttccacttcatttaatgatttgtttttcgccacaagatgtttccttaaataagcttctcctctgtcaaatgcctgcgtgatctgggcttttgtatatccttttggatgaatctccaaggtgtaaatatcatcatcgctttttgttttaatacgaatctgttgctctgtaacttcgccgcccgtttcatctctcgtgatcagaattctacgatcctgactgaaataaaagattatggtcagaaaaagaacgataagaaaaataatagtcgccacgcttatgatcttcacctgttcatacagactcttccttactttctcatctaattgtttctttgttcctatgaaacaggatcctatctctgcttttcttttttctttgagttcttctggaagtttttccacgatcttattaatccattgaaacttaaatttcaatctcagtcaccctctctgcccatatatctgcgatccacagacataaaagagaaatcactgcgactaaaactccggcaaaactctcatacagtatgtcgaaatatccaggatttgaaatccttacataaaggagaataaaatatggcatgacagacatgatctttttctccatttgttttgccgcgatcatcgtgtgaatctcttcttttgtctggattgcctgacttaaatgttctatcgtattttccgtgatctcaatcagattcccaccactttttttcgcaattgatatgacctgtgcaaactgataaaattcttccagacctacatgttccgccatatcaaaaagcagattatccacaggttcgttcattttgagcttgtttatcaacaattgaagttcttttgccaacaaactgtgttcttcatacatctccagatcattttttgctgttttcaatgcattttcaatagagtatcctgcagataaactatttccaatagaaatcatcatttcacggaattcctttcgcagcttttccttctcccgatgcatcttatgaattctttgttgtttcataaaaacaaacaaatatggaatcaaaagaatcgcaaatgcaattcggtcaaaaaacagccatgcgatcatcacgatatagcaaattcccttaaccaactcttgcttctcatatttccacaggctgatctcttgctttaaaagattccataagtttccgatatgcttcatactgaccatactcctttaacttcttctgatcacataattctgatctcattgtaagttcatcatcttcattcatctcaaacaacggatgtaatgctacctgactcgccgccataccagtaatctctgaaatctccatcagttttcgacttccgtcaaagcttcttccaagatgaatgatcacatcgattgcagatgccatctgcccacggatcgcctctactggcatatcgactcccatcaagaccatcgtttcgattcgcttaagcatatctttacagctgttcgcatgtcctgtcgagatgcttccatcgtggcctgtattcattgcatttaacatagacaaggcttcttcgcctcgcacttctccgacgatgatccggtctggccgtgaacgtaatgccgctttgatcagttctttcatatcgacctgattttcccccgctgcattcgcattcctcatctctaaccggaccagattatcaatcccattaagtttcaattctgcggaatcctcaattgttatgatcctctcatctttcgggatacaatttgacattccattgagcaacgtcgtctttccactgcctgttccccccgagataaaaatgttatagcgcgcccttacaagaatcttcaaaaacttcgcaatttcttccgaaaatgcttcccgttcacaaagccatgctaatgtcatcggttcctttgcaaactttcggattgtcatcgttgccccatcgatcgatatcggcggcaaaatgatatttactctcgaaccatcgttaagtctcgcatccacaattggatttcgttcattcaccatacggttcgctcctgatgcaacctgctgaattacctgatataatttttcattatccgaaaaatgcccaggatatcggtgcagttttccttgccgctcaataaaaatatttttatagccattgatcatgatctccgtcacagaatcatcttctaacagatcttgcagaatatccaatcttcgaagagcataaaaaacttcctgattcaagcgaatcttgtcagacaaaagcaacggatattcttctgatattttcatgatctcttcctgaatcacaccttttaaatgttcgtcagaaatctcctgtgaaaaattcaatttctccattactctttgtttcagcaattccttcaaggccactgcccccttcctcctttgttcttccagctctcaagcatcacttcttcccagtttgtcaatttccatactccatgttttctcatctgtttttgaaacttcttatattccatacaccccagatcttgccgcataagagggagaaaaatccgatcaaataacccaaagaacttaagatctggcggtgatgcgatgccaatatcaaaaataatacaaattcctgtttctcttaatttctccaaaaaccactcataatcctgcatagataattctcgataatccagataacatgaagctcccgcaaatcctacacaaccatcaaacttcttctgatgttccataaaatatagtacaatatcttctttgtgttctttgatataaaacaacaaaaggtcatctgtctcatcttcttcaaagtgtccatatggttgcattccaaaataaatccacccattcgaagctgccatattccttgcaaatgccgatatctccagtcttgaaatcggagaatatactccaaaaatccgttcattttcaatctgaggacttacattcaggcaatgatagattcccgctgcgatctcttttgcactctggcaatacatcccacccatagattcatttgctccaattcggcaaaccggaaaatctccatgataatccgtctcttctgccagtaccaggcattcaaaatctccctcttgttcctgtttaaaaaacatctcctcatccgacgtaaatgatgccgtcatcgggaaatctttctggtgatttaagtattccatcagccgttttccatactgatggtctttgtgataaataccgattgaaatatccttcatagtccacctcctaacaggcagatcatgtacgctgcaaggatcccaaatgaaaaatgtatcattccatctttcataagatccccattctctgtctcgtacatcaataatctcttgttatccttacattgtgttacatattgaaataagcgaaataatcgcagatggaagttcttcctcttccataaaaagatcacggcataaataccgttacatataaatgacaaaatcagaaaccggggcattgcccgtccaatagatattgcacataccatcagcagcttcacatctccaccgccaaggcatccaatatagaataataatccacagctgatcagcacaaccaaaactccgatcatcatatctgctgccttcatcccagaaactcctgcaagaaccagcgtgatcaacgctcccgtcccattgagcttattcgggatcttgaaatctctgtaatcataaattgctgccatgatcaaaaataatagaatccatatcttcatctttcctccttcctttatgttccattattttacatctatttacagtatttgtctagtattttttctattattttacagaaatacaaaatccagtattttactagcgcactttacatcacattattactgcaataaaaacaccgctgccgcatacaacacaataattcctggaagccccaacagtgcacctgttccaatggacaagatattaagattgactggtgctgtgattcctttccgcatacaaacaatgctgattccatatacgatcatcgcacaaaaagctccccgcagcaaaagcactagcaaatatgccggtttctttacaattccgatcatcagacagatcatacatcccgctgccactatgtaaaagatcatttcattttgtcccataaaaaaatccctccttatgtaatcttatgttacataaggagagatattcgtttcttatatgctcctaagcttttatgaaaataaattagacagccagctgaaaatagactggaagaaagctgcgatcttatcaaagattccctgacttcctccaagcttatcatataaatcttttgcttgagattttaactgagacacattcagatcaagtcctgaaatcttatccatcagactctgtatcttcgctcggtctgcatcagaaagattgatatttaaatcttttgcagactcttcaatcgcctgtttgatctcagatggagatgacagattatcttttgcaactttctgtttgacatctgcgatcagtttctctgcatcgtcagaaccgatattttccgcaacttctcccgttgtgatcaactcgtctgtcgctgcatctttgctcttttctggaatcttctttcctgtcatttcttcgtaggctttcataacgccaaccaatgctgctgttccagaaatcttaaatggaccagctacttttacatcggcattcttgatccctgctgtgatcagagcatttcgatacattccagatgtgcagtaagagatattctgtgttgtgacattcactccatttccatcatctttctgttctacagtcacagaagataatgctcttgttccgatcactctgcttgatagatagctgtccaaatattcatgttcatctttatttgttacagtaataactttatagtcgctattatcatctaaatccagaagttctaacactttctttttctgggaagctgttaaatcagctccaagtgccagatatttctgatcaacgctgtctgctttgacagttacagatgataatgccattgcgacacaaagtcctgctgcaaggaattttccaataaactttctcataaatccttttcctcctgcttgttaatttctttcatcatagcaaaaacatctctgtctttcaatatgccaaaatcataagaatttcttacgaaaatttatatttctttaactgcagcttttttctttctttgggaaaaaagcatgatcagaataataataacaaatcccgcaacacttaagattgccccttccttaaacccagaagatacatacgttagtgaaactttatgctttccttccggcactttcactgtcaaaaatgctttcccaagtgcttttgttttcactttcttgccatcaatcttcaccgtccatcctttatcgtatggaattgagaaaaataacatctgatcttcctgtgcatggatcgttccacttagatgatttcctttggcactggtaagtttccatgcattttcctgcattctctgtgcaagttcttccatcacttcttcatcaagttccgctgctgtcagtcttacaactccagacatttcattatcttgtttgagttgcattttgatgcggatctcatcacctttctgcacgtttccaagataaataatctgtgaatccagccttcccgtcaaaacctgttctccatttttctcaatcacagtattttctacctggcttccatcaaaatgaatatacaaccgccttgtttttgttgatctgatcgtaaataccatgttatctggtcgggcggatgtattttcaaatacatattctccatcaccattatcggatgtgatcttacaatcgtttaattgcggcttagctgttttgaccatatgaaacaactcatcaacatcaaatgcactcgttgccagatcattttgtacataaaatggattataatcttcataatcccaagtttgtaccaagtcatccatcgtataggcaagtgctgttcgataaggatttttataaaccgtgacatttccaacactttcttttagtgaaaattcggtatatttcgtatcatatggacggtaaatctgatatttcatggacatcagattatttgtaaatggcgttgcaccttcatataaatattcatttacacccgtgtagaatccaagctgatccatcatatcgacaacgtttccctgtgctgtggaaccaaacaatgtcattccatttaaggtatgccagatactttcatcaagcatacgcccactgatcaattccattcttgtctctacatttttctgatactctttttttacttctgtgatagctttggtatcctgaaaataactatctgtatcgacggttccattttcctgaaatcccatcactgccatcgctgcggtttctactataaataagaaacagatcaatgttgtaaatattttcttcctgaaaatcttcttctgatataatgcgaaacaaaccatataaactgcgatcgctgcaactgttgcgtaaaccgttttcatttccaatttcattgtcgacgttttcattgtgattccaatcaaaataccgcataggatcactgacaaataaatccacagtgaaacttttcttttgcctcttaccaacacacaatatccttcatacgccatcgcaagcaatgcaaaaatatacaaaaacgcaaagcggtttggaattccatactgatcatgaaaaccatgccaaacataacctaagacaggcatattgaaactaaaaaataaaaatacaagtaataacaatcttcgaatcttatcgatcaggcgaatttctctaactgccagataaaatcctgccattaataaggttaagattccacaatataaattgatcttactgtcatctaccgccatcgtaagcggtgttgtcccaagaaaatgtctggaaaacagatttccaaatgttccataccataattcttttggaaattgtaatttggctgaggatgtctgcataatcccaaggtaagctggcagtaacacaaccgctgccattgctccagataacagtgaatatcctgcaaagcggaatccatttgtaaaaaattctttgacatttttatgtgaatatagtaaataccacaagattaaaaataaacatgtcatataggacatataaaagttacaccataaagaaataaataatgcaaaacaataaagtcttccatcatgttctttgatcagcttatcaataccatacaaaatgagtggaagcatcatcatgacttccatccacataatattccaactgtagccaaccatataactgcataatccatatgccattccgaacgcaacaatggatatctcatcctttccacggcgttttctaaaataaaatgcggctgtaaagcagcacagtgcaatctttaagacatacaaatgacttaatatcatcgtaagcattgattttgacacaagtgcgatcaccagatttagtggacttgccagataatacgcccatagtccaaggaaattgtatccaagacctgcatgaaaagaataaaacatcgaatccatgctttttaatttttcctgataatctgcaaaaaagggcaaatactgatgcaatgcatcaacgatcagaaatgattcactgccaaatggctgtatcttctctgcgatcgcgattccttctaatagaagaaccggcagaaaaaacgagagtaacagatacttatgagttttcagtatgtctttgattttgtttgtcatgtctgctccattcttttacacggtgattgattcccatgatcatatgatatctttttttgatcatggatgcgatcgaaccatgggtcaattccgtaacatttcccccatgtcttcgataataaataagaggttcctccaaaaatacaactttcccaagttgttctgatagcaatccgatccattggtcatgaatccagatgtcatctgggatcggcagaattcttttcattgcggatcttctgactgccatacagcatccgatataggaattctttttcatattcttccagaagcccgttccgctatttctccactcaaaagtggtttgatctaaagatgaaagtttttcatctacaatctgtgcatcatgaacaactgccatcactttcgggtcttcaaatacacgctcaatctcgctcattttattttttttccacacatcatcctgatcagataagaagatgatctcccctcgacaatgcttaaatgcattctcaaaattttttacgacacccttcccaggtcctttaattatgcggattctttggtcgttttggacccaatcctcaagtattgcttctgatccatcactagcatcatccactgaaatgatcagttcatctgtctcttccatattatcaagaatcgatcttatttgctcatctatatatttcgcgccattataaaaggccattgccacagatttcatactaatttccttcctgcgtattgattttcttgaaatattataccatatcttatataataattctaagacaaaggcgtcattgagaaaaagaggcgttttccgacctctttttgttttatcttttgggatgtgccaacacccatttgaagaagataccctctgttttaaacacacatatcattatgacttataaggaggaaacaaaatgtcatacgtagatgaagtgatcgagcaggtagttgctcagaacccagcagaacctgaattccatcaggctgtaaaagaagttttagaatcattaagagccgttgttgaagcaaacgaagaagctttcagaagagatgctcttcttgaacgtcttgtaaacccagaacgccagttcaaattccgtgtaccttgggtagacgacaaaggacaggttcatgttaacacaggttaccgtgtacagttcaacagtgcgatcggaccttacaaaggtggtttaagacttcacccatctgttaaccttggaatcatcaaattcttaggatttgaacagatcttcaaaaactctttaacaggacttcctatcggtggtggtaaaggtggatctgacttcgatcctaaaggaaaatctgaccgtgagatcatggcattctgccagagcttcatgacagagctttgcaaatacatcggagcagatacagacgttcctgctggtgatatcggaactggtgcaagagagatcggttacatgttcggtcagtataagagaattcgtggactttatgaaggagttttaacaggtaaaggtttatcttatggtggatctttagctcgtacagaagctacaggatacggacttctttacttcacagacgaaatgttaaaatgtaatggtaaatctatcaaaggtgctacaattgctgtttctggagctggtaatgttgctatttacgcaatcgaaaaagctcagcagttaggtgctaaagttgttacagcttctgactctacaggatggatttatgacaaagatggtatcgatgttgaattattaaaagaagtaaaagaagtaaaacgtgctcgtttaacagaatacgctgctgctcgtccaagtgctgaatatcacgaaggaagaggagtttggtctattcctgttgacattgctcttccatgtgcaactcagaacgaattacacttagaagatgctaaacagttagtagcaaacggatgttacgcagttgcagagggtgctaacatgcctactacattagaagctacagaatacttacagaaaaacggaatcttattcgcacctggtaaagcttctaacgctggtggagttgctacatctgctcttgaaatgtctcagaacagcgaaagattaagctggacatttgaagaagttgatggaaaattacagaacatcatggttaacattttccacaacttagatgacgcagcaaaacgttacggaatggaaggaaactatgtagctggtgctaacattgcaggattcgagaaagtcgtagatgcaatgacagctcagggtattgtttaatccttaagaagaaagaagaatgttcccgtgggacggaatgttcaattaaaataatgtcatgtgtatgtagaaagcggagatccttttatggattctccgctttttgggttttatttatttgcttttaatttcggtgttcttatgatctgtacgagcaatggaataaccatgataaaccatacgatcggttctgctacgataacacctgcatatcccatcaaaggaactaatgtaaatgcgatcaccacttttccgaccatttctaatccactggatactaatggtgtgatctgatccccgattccttgcataacatttcttactatactgatgaccgctggcacataataaaagatcgtattaaacttcaggtaatttgttgcatttacaatgactacatctttgtggcttccagttaccatataaactaactgcggtccaatcgtataacttgcgatcatcgcaaaagttgaccagacacatgtataaatgatcgctagtttcatacctttcttaattctgtcaactttcccagctcccatattctgaccacagaatgttgccatcgtctggccaaagacactaaacatgatcatatatatttctgtgatctttcttgccgctgtatgggctacgataatttcctgtccaagtttattgattgctgtctgtaaggtaagtgatccgatattcacaagagaactcataaatcccatggacattcctgtcgccagcatttctttgatcattttagattccagatctttaaaatcatttttattcagacgtaataactcgtacttatgaatcatataaaaacaacaaatgaccaatgcgataaactgtgccaacacagttgctgccgccgcaccccatgttcccgttttccatacggcaacaaataaaagatccagtacgatatttaatcctacagaaatcgcaagaatcaataatggtgttaacgtatctccgatggcacgcatcaccgccatcaaaatatcataaaacatcgtgacccataaaccaatgataatgatcagtatatattgtttcgcttcgataaataatttacctggaacattcaaaaatcctaaaatcggattgataaataccgttccgatcaagattaaaatagcagaaacgatcactcctaacacaagtgcgatcacaaatgatcttcgaactctctttttatcacctgctccaaatttctgcgctgtaatgatcgcaaatccattggccagacctaataagaaaccaacgatcaagttactgatcgttgtcgttgcaccaactgcagcaagtgatcgctctccaagaaaacttccgacaattcttgtatcagcaagactgtatgtaagctgtaataagtttcctaaaaatactggaatcgcaaatcctaagatcaatgttgaaatctttccttttgtcagatctttcatgatcgatcctccactttctgtaatcttccatctccatcgatcacaactttcattccttcattgatatctctttcgtatagtaatttatcttccatgaagattattgtttcttccttcgttatttcttcttttaaatatactttatctttgatttcctgtccttccgggcggccttcacaaccaaagtctggttcttcgattcttgtgacatagtatgtactcatatattgattttccttctttctttgtttgttatgtttgaaaattttgtaaaataaaaatcatctattatataattatcacgtcatcaccattcacataattttgatcacctaacacggttacttccccatatccatgcagtttataaatccgaatattatcggttactcttgtcatctcttttaattttgaaagtaatttttcaaaatgtttcttagtcagccacgcttcaaatgcagatttttgtattcttgttccatagccttccaaaagctttgatatttccaggcgatgtttattatcagatatatcatatatgatcaatatcagatatttgtcatttccttcatcttctactagtgtttcaaattcaaaataatccataatcatcgtatccttattggcatataatcatcaaaattcccattgtcaatgcattttactattttagatacctgccaccagattgctctacgaaagcttactgggtgttctagatattctaagtaattcatattactttgcaattttttctctagtttttttataaatagattgacaccatttttactaataattacagcacctgtttcttcatcttttgaaaattcattgatactgatctcatttccctgaatcatactcatgactgttgcatctacaatcaccgctctccattcttccaaaagatcactggcaagtgttggatgtctttcaatatctttatgcataaatcctatatatggcgttattcctcgattttctatttcacccataatctcatacatcaagattgtatatcctaaactgatcatcgaattaaatgcatctcgtggtggacgtttatttcgcccagaaaatttaaaatcttcttttatcattttggataatgctgcaaaatattgtctggcagcatttccttcatagcccataatctgttcaatatttgtacaatgtgagattttattttcatgtatttttatcgcttgaatattttcttgaatattcttccccgtactgcgctgatatcttgtcaaaagaactctttgattatgtatcttatttaaaataatcttttttgaaaactgcactcgcatttcctcttgatcacttaaatatacttgctgtttcaatctctttgcattcacatgatttgttgattcaatccgcccaaaatattttccttttgttgaaaacatggatactgctattcctcgctccagacattccttaatacatggtactgtcaaataaacatttccaaatatcacaattgattcaagcgtttctttcggaacaaggcgttctgatccgtcttgacattctacaataaaatgcccaccttttacagcgactttagacccattttcagtaatatataaacatgacataggcactcctttcctagaataagttatattcttctgtcccctgtcggggtgttttatcttcaagatttttctacactataataaatttgttcttttttcgtcccttatcagagtgtctataagttattttaacatattttttaataatgaacgattatttctctactaatcatgaaaattttttagagttcttttgagtgaattacaatgaaaagtaggtaagtatcaaatatatgatttttagttttcgtcccctatcggggcttttattttcttaatattatacatgcgat

SEQ ID NO: 596 - DNA, 2686 bp, Unknown
  gut microbiota DNA sequence
aatatttatagggataatcaaaaatcagatataaagttatataaaattgtatctgaatatattatactccagattaaaatgtacgtccataaatacaatcatataatagttgaatttcaagaagaaaatcgttataatattaacggacataaaataagattaatttttgggaaatgaaggagaaaataatgagtaaaaaaccaacagtcctgatgattttagatggatatggattaaatgaaaacaaagaagccaatgcagtagcagaagcaaagactcctgtaatggataaattaatgaaagaatacccattcgtaaaaggaaatgcatctggaatggcagtaggacttccagaaggtcagatgggtaactctgaagtagggcatatgaatatgggtgcaggacgcatcgtatatcaggaattaacaagaatcacaaaagagatccaggatggagatttctttaagaacgaagcaatgttagaagcaattgaaaactgcaagaagaatggttctgcattacattgttttggattattatcagatggtggagtacacagccacaatacacatttatatggcgttcttgaaatggctaagagaaatggtctagagaatgtatatgttcatttattcttagatggacgtgacacagctccaacatcaggaaaaggattcatcgaagaattattagcgaagatggatgagatcggagtaggtaaagtggcatctatctctggacgttactatgcaatggatcgtgacaatcgttgggatcgtgtacagaaagcatacaatgcgatcgttatgggacagggaaatacagctgacagtgcgatcgatgcaattgatgcttcttacaaagaagatgttacagacgaattcgtggtaccaacagttattgttgaaaatggtgaaccagttgcaacattaaaagaaaacgattccgttattttctataacttcagaccagaccgtgcaagagagatcacacgttctatctgtgatgataaattcgacagttttgatcgtccaaacggatacttcaagacaacattcgtatgcttcacagaatatgatgtgacaatccctaacaaattagtggcattccacaaagtagagatcaagaatacatttggagaattccttgcacagcacggattaaaacagttacgtttagcagaaacagaaaaatatgctcatgtaacattcttctttaacggtggagtcgaagaaccaaacgaaggagaagacagaatcttagtaaaatctccagcagtagcaacatatgatcttcagccagagatgagtgctccagaagttggtgcaaaacttgtagaagcgatcaaatctgacaaatatgacgtgatcatcatgaacttcgcaaacagcgacatggtaggtcatacaggaatcgaagaagcagcgatcaaagcggtagaagcagttgacaaatgcgttggagatgcagtagaagcaatcaaagaagtaaatggacagatgtttatctgtgctgaccacggaaatgcagagcagttaaaagactatgaaacaggagctccatttacagcacatacaacaaatccagtaccatttatccttgtaaatgctgaagaaggattaaaattaagagaaggtggatgcttagctgatatcgtacctacattaatcgagttaatgggaatggaacagccagcagaaatgacaggaaaatccctgatcgtaaaataagatcttaaaaagacatcttgaaagaatcaagagaacaagatataataagaataatggcaaaggcgcttatgcagtatagcataagtgccttttttcttaaggaggtgtccgatatggatgtatacgaaaaattagaagaattacaggaaaaagcactgcatgatgacacaatacgaaagacattattaaaaacaagggaagaaaaagaaccgattcttgccttttgcaagcaatgtcaggaactaggatatgagatttatccgatggaactgatcaatgctggagaagaattttacgcaacaatgagaagaagtacgaatggtggaggagagaactcgcctaaattaagtggtgaagatgatatgtacgaattgtttatgacagcgatcaaataagtgcattgataagaatgctttgacattcatgcaagtaatattttcttaagagagattccgcaggtaaggatcaatgaactatgcgaagatacgttgcttccttatgcgaaacgattaaatattgactatgtgtgggtacatggagctgctactgtgttagaagcaacttttgcacattcattaaatatgatcggaactccagtgcttgtcgtggagatgggcgttggaatgcgcgtgacaaaagagtactgcaaacaattagtggatggtatttttgtagagatgaaagatcttggaatgtggcaaggagaagttattacaccgaaagatccgttgatctccacagatggagaagtccactatctgaatgcgggatatgcaggaatctttcttctaacggtagaacattggacaaatgttaaaaagggagataagatcggagaaattctagatccattggagggcgttgtgaaagaagaattatattcagaatgtgatggaatattatttacactaagagaatatccggttgtaagtgaaggatcactgattggacgtatt

SEQ ID NO: 597 - DNA, 253 bp, Unknown
  gut microbiota DNA sequence
cgagtatgcttttgtaacgaatcaattcatgtactactcacaagttcctgtactctccataggcgttaattcctgactaacgtatcagtacatatctgtaatcacttgaatatattatgctacagatcgtttcagaacatcctctccatattttttaagattcaaagctgcctgaagatctctgtcaactacatttccacattcacatttgtaaatacgttctgataacttcagatcttttttgatctttcca

SEQ ID NO: 598 - DNA, 41706 bp, Unknown
  gut microbiota DNA sequence
ttcttccatttacgatgattggttttggaagatattttatgaaaaaggctccaaaggaaataaattcagtttttggatatcggacttcgatgtctatgaagaataaagacacatgggaatttgctcataaatattgtggtaaagtctggtatgtctgtggaatggttatgttgccgataacagtaatattcatgcttttagtaattggaaaaaatgaagattgtgttgggagtatgggaggaattatctgtggtgttcaacttattcctttaattgggtctattctcccaacagaaatagcattaaaaaagaattttgataagaatggaacaagacgataaagtttgcagaatcaaggaaatcgggatttggaagtgtgaaaggaatggaaatggataaataccttgaactgaaagaaaaatttgaagcaaatagagatgatgaaaatgctgtaaaaatggcggcgtatatgaggaatttgttttcattttatggtttaccaacacctaaaagaaaagcaatttacaaggattttctgaaatttgagaaacgcaaaaaaataattgactgggatttgcttgacagatgttatgcagatgaacatagagaatttcattattttgtgatggattatcttgtggcaatgcagaagtttttaaaattcgatgatgtacctcatatagaaaaatatatcaaaacaaatcaatggtgggacacaatagacggacttgatagaattgtcgggaatatagcttttacagatgaacgaataaatgacctaatgttggagtggtcaacagatgaagatttttgggtgcgtcgaattgctattgaccaccagctttgtaggaaagagcgaacaaatacggaattgcttgaaaaaatattagtgaataactttggcagttcagagttctttatcaacaaagccatcggttggagtctgagagattattctaagacaaatcaggattgggtaaaaaattttgttgaaactcataaagacaagatggataaattgagtatcagagaagcaagcaaatatttataagtcaaatggaaaacacaaaattcaagtttatagaggacttaatgaatccttgtaatattgggcgttgcatgaatgttaatttgcgttgcttgatgtattgatggctaatcggtatgctagttttatcaaacgaaaggagtaactagagatgcttggtgaaaaatataaaaacttatcgacagaaaaaaggatatacacaggaagaggttgccaacagactccatgtgacaagacagactatttcaaaatgggagaaaaactattcggttccagatgctgaagtatttgtaaaattagcagatgtattagaggttcaaacaagtcagttgcttgaagtaaaggtagatagtgatgtgcaaacaacagaagaaaaacagaatgcttatgcagagcaactagcacatattgctgaacagatggcaatcagaaatcgtcaacgtaaaagaatatggaaaacgataggaatagcctttgcagtaatcattgttgtatgtattgttcttatagttatgaatattgcatttttttctgcttacccgactacagaggatgttcagacacatgaagagactattatgttggaagaatagagttacgaacttccagtttgtagaattcaaaaaatttaatatgaaatgtgagatagagcgtatggaaataatctatacgttctatttttttgccttttttggaaaaaagtgattaaaaaactattgacattttgttactggtgaaacaacgattagcattttatcattatttttgatcgatttgcagccgacatggtgtattgtctgagcgatatggaagtcattttggacttccataagcgagttatacaaggaatgtcggcgaacaagcgatcggtcaaaaatgatgaataaaatgcgtgttgttcaccagcaactattttttgattgcaattataatttttacttacatattcaaagactatgtcaaagaaactctatacattaaagcggaatacaataatatctccatccttaacaacatattcttttccttcctgacgtacaagccctttctccttacaagcctgcatcgtaccatactccttcaaatcttcaaaagaaacaacttcagcacagataaatccacgctcaaagtctgtatggatcttaccagcagcctgaggagcctttgtaccttctttgatcgtccaagcacgtgtctcgtcttctccggaagttaagaaactgatcagtccaagaagagagtagctggcagagatcagtttttcaagaccagattcttctaatccaagatcctctaagaattctttcttctcatcatcatctaattcagagatttcctgttcgatctgagcacatacaacgaatactttcgcatcaacgtctgcagcatactcacggacagcttttacataatcattatcttctccagcaagttcatcttcgttaacgtttgcagcaaagatgactggtttgatcgttaacaggttgcaggaatttaagatttcctgatcttcttcatcatcgacttcgaatgtcttagcaagctttccatcttccagatgagcttttaccttagataagaattcaacttcgtgagcaagagatttatcatttcttgatccttttgttgattttgcgatacgacggtctaacacttcgatatcagagaagatcagctcgaagttgatcgtttcgatatcacgaagtgggtttacagaaccatcaacgtgaacgatatttccatcatcaaaacaacgaacaacgtgaacgatcgcatcgacttcacggatatttgcaaggaactggtttccaagaccttcccctttggaagctccttttacaagacctgcgatatcaacgaattcgatcgctgcagggatcactttctttgaatggtatttctcagccagataatcaacacgagcatctggaactgttacgattcccacattagggtcgatcgtacagaatggatagttagcggattcagcaccggcttttgttaaagagttaaataatgtactctttccgacgtttggtaatccaacgattcctaatttcataatctattaatttcctttctcatgggtatttcttaaaacagaccttgaaaaaatatccaaggtcatactgtagatagtttaccataagcgacttgaaaagaaaagagaaatgggataagatatctttgatttgagtaacaaaacaaagaagagacaaaacgaggctttagaaaggaagaaaagtgatggaacatcaaatcagattcccacatttagggatcgtactgaaaaatgtcggtgatggaatcaatattggagggtttgagatcaaatattatggaatgatcattgcaacaggattcttgcttggattgatcgtttcttattacgcagcaaaacatgaaaataaatttgatccggaattagtctttgactatctgatcacgatgatcattccggcgatcgtaggagcaagactctattatgtgatcttttcatgggattattataagaatcatttgtcagagatcatacagatcagaaatggaggacttgcaatttatggaggtgtgatcgcaggtgcaatcacattatatatcttctgcaagaagaaacatttatctatgcttcagtttggagatgtggcggtaaaagggctgcttgtcggtcagattcttggacgatggggcaatttctttaacagagaagcgtttggatcatataccaacagtttatttgcaatgcagattccgacaaatttctttattgaacacggaaggattgatgagatcgtatccaatggattgtatgataaggcaacttatgttgtatctggaaatgaagcagcaacctttattcaggtacatccgacattcttatatgaatctatgtggaatcttgttttactactgttgatcattttcttttttacgaagagaaagaaatttgatggagaattgatcgccatttattgtattggttatggaatcggaagatttttgattgaaggattaaggaccgattccctgatgatcggatctacaggaatcagggtatcccagatcttagcactgatccttgcagtatttggaacggcatttatcatatataaaaggaagaaaataacgaaataagacacaaaaagaagggaaataaaaccacttttagggaatcccttcttttttgtgcaaaaaaacaaggatttctaagaaaaaactaagatttgattgtggattattccttgcaatttataagtctatcgtataaaatgaaatttataagtggtaagaagtggtggaaagtggtgatgtccatgtttatgggggaatttaatcacacgattgatgcaaaaggcaggctgatcattccttcacgattccgggaagaattaggtcaggaatttgtgatgacaaagggattggatggatgcctgtttgtgttcccacaaaacgaatgggaaagttttcaagggaagctaaaaactttgccacttattaataaagatgccagaaagttttcgagatttttcatggcaggggcagctccatgtgagatggacaagcagggaagaaccttgatcccagcgacacttcgggaatttgcccagatgaagaaagaagttgtattaacaggaatggctgaccgcatcgagatctggagtaaggagaagtggattgagaacaattcttatgaggatatggatgatatcgcagccagcatgcaggaattaggattaagcatataagttaggtggattatggaatttaaacacatttccgttttattagacgaaacgatcgaagaactacatattaaaccagacggaatctatgtggatgggactctgggcggaggcggacatgcatatcatgtatgccagaaactatcagagaaaggaagatacatcgggatcgaccaggatgcggatgcgattgctgcaagcacgaagcggttagaatcgtttaaggacaaagtaacgatcgtgcgtgataattatgtaaacatgccgaaagtgttacatgatcttggaatcgaacatgtcgatggaatcttgttagatcttggggtatcatcctttcagttagatgagaaggaacgtggatttacttacagagaagatgttccgcttgatatgagaatggatcaaagacagtcactgactgcaagagatattgtcaatgaatattccgagatggaactattccatataatcagagactacggcgaagagaaatttgcaaagaacattgcaaaacatatcgtgaataagagaaaagaaagtccgatcgaaacgaccggacagttaatagaagtcatcaaaggtgcgattccgatgaaagtcagagccgttggaggacatccggcgaagaagacatttcaggcgatccgtatcgaatgtaacagagaattagacgtattgaaagacagcattgatgcgatgatcgatcttttaaatccaggtggaagattatgtatcattaccttccattctttagaagaccgtatcgtcaaacgagcttttaagaagaatgagaatccttgtacatgcccgccaaacttcccagtatgtgtatgtggcaacgtatcgaaaggaaaacagttaacaagaaaaccaatcattccaggggaagaagaactagagtacaataagagagcaaaaagttccaagcttcgagtatttgaaagggcagaataagggagagtatcaatggacaagacgagacaagaacgatataacatgatctatggcaatacagcaaggaagatagaagatcttgctgcagagccagtgcgcagacagccaaggaagacaagaccaagaagagaacatcaggtaaaggagtcaacaagacagaatcagaagagagcaatgtcaatcgatctggcctttatcaaggtattagttgcgggactttgtgtgatcgcagttgcaagtttcttttatctgtcagagcgtacgaaagttttgaatcaaaaagcggctcttacggatgcaaagacacagttgaacacgctgcaggtagagaatgaagatctgaatcttgagattgaacagagtattcgttttgatactgtagaaactgcggcaaagaaatatggaatggtgaaaccagattccaaacatactcttcgttatgagagccaggatgcagaatacatacgccagtacgggaagataccaaaagcagactaagaggtggcaaacttgaagaaaagaagaaaacctatcaaacgattaaatgatgctatgaaacgacgtacgatgatcgcgtgcggaatcatagcacttctttttgttctactgattggaagattgatctattttagtatatttaagaacggaatttacaaaagacaggtattatcacagcagaattattctagtgaaacgcttccgtataaaaggggagatatcttagatcgtgatggaaatacattagcaaccagccagaagatgtatacattggttttagaaccaaagaatattttaagatccgaagaggtacagaaagcaaccattgatgcacttcataaatatatgaagttagatgaagataagttgttaaaatttataaaaagacataaagattcttactattctgtatatcgagaagaactttcttatagtcagatcgcagatctgaaagattttatcgcttcagacaaagcagagaatgtctcagggatcgtatttaatgaaaaatacaaacgccgttatccgaatcagtcactggcaagccaggtcattggctttgtatcagacggtacgatcggaactggagggatcgagcagtattataacagtactttatcaggcgtcgatggaagaaaatataaatatttaaacgaagaattagaacaggatagctccattgtggagccagagaatgggaaaacagttgtcacaacgattgactccaatattcagaaactggcagaagatcagctttctaagtttgaaaagaaatatggaagtaagggaagcagcattcttgtgatgaatcccaataatggagagatctatgcaatggcaaattctacttcctataatctggaaagcccaagagatgataaaaatctcttaaagaaatactcacaaagtcaagttaataagatgagtgagaaagaaaagacaaaagcatttaatgaaatctggaagaatccaattgtatcaaatgcatttgaaccaggttcaacatataagccatttacggtagcagctggtcttgaagaaggaatcttaaagggcaatgaaacttattattgtgatggataccagaaggttggaccgcatactattcactgttctcatagaagcggacatggattgatcacgttgtctcagagtatttcattatcgtgcaatgatgcattgatgcagattgcatccaaagaaggcaagaatgtattcgcaagatatcagaagaatttcaattttgggaataagacagagatcgatcttcctggagaagcacagacagcatcgcttcttcatgatgcaaaagatatgacagccgcagatcttgccacaagttcttttggacagtcatttaactgctctatgatccagatgggaagtgcattttgttctctgatcaatggaggaaattattacaaaccgcatgtggtcaaacaacttcgaagcagtaatggagaagttgtcagcaatatagagccgacgttagtgaaacagacgatctcaaaagagacatcggataaattaagaaaatacatgaaagaaactgttgattcaggaactggaacaaaggcaaagatgaaagattatacagctggtggtaagactggtactgcacagaagattccaagaagtgcaggaacttatatcgtatctttttgtggattttctccagtggagaatccacaggtgctagtttatgttgtgatcgatgagattcagagggattctcagacgaatacaggacttgcagttgagattgcaaagaaggtattagaaggatcactcaaggaattaaatgttgcgaaaagcagcaaaaagtaatatcatcattttattttcataatctttatattaagacagggatcatggagataaaatgagaacgaaagcaaagaaaaaactgttgcttgtcacggctgcatttttcacagggtttttggttgtgacgataaaactttcttatgtgatgatcgctcaggcggataaatatttaagtttagccagaaacctgcatcaaagagaccgggagattaaagcgccaagaggcagtatttacgacagaaatggcgtaaagatcgcttcgaacaaagcagtctattcgatctctgtgatatattctcagatgacagagagggaaaaagtaataaaagtcttatctgagaatcttaagatcaaagaatctttgatccgaaaaaaagtatataaaaattcagtaagggaaaaaattaaaagtaatgtagaaaaagacatcgcagaccgtatccgtaagtttaaacttgacggggtcaaggtggatgaagactacaaaagagtatatccatatgataacctggcatcgaaagttcttggattcacaggaggagataaccagggaatcattggactggaggttttttatgatcgatatcttaaaggaaagtccggaaggatccggacactgacagatggaagcggcatagaaatcgatggagcatatgaagagagggaagaaccagttgccggaggggatctttatatttcgcttgatgtgaatctgcaaaattatgccgtgcaggcatgtaagaaggtgaagaaagagaagaaggcaaaacaggtatccatgatcttgatgaatccacagaatggagaaatctatgcaatggtcaatgttccagaatatgatctgaatgatcctttctctttgtcagcaaagaaaagaaaggcaaatagtaagaaacaacaggaatatctcaataagaagtggcggaattcctgtttaaatgatacttatgaaccgggatcggtctttaagatcgtaacggcgactgcaggactggaatcatcgaaagtcagcgtgaatgatcattttaattgtccaggatttcggattgtggaggatcgcaagatccggtgtcacaaagtcggaggacatggaagtgagacatttaaagaaggtgttatgaattcctgtaatccagtatttatggatgtcggtgccagagttggtgtggatggaatgtatcagacattccgccagcttggattgtttgagaaaacagggatcgaccttcctggagaagcatcttcgatcatgcatcaaaagaagaatgtcggtgcagttgaacttgcaacgatgtcttttggacagtccatacagatcacaccgttacagctgttaagagcagtcagtgcggtgatcaacggcgggaagctgatcacaccgcattttggaagatatgttcagaagcaggatggaacaagattaaaagcttttttttattcagtgaaagaaggtgtcataaaaaaacagacatcggagacgatgaaagaattgttagaagcagttgtttccgatggatcaggaagaaactgccggatggatggtttttccattgggggaaagacggcaaccagtgagaaacttccaagaggaaatggaaaatatatttcttcttttttaggatttgcgaaagcagacaatcctgcgatcattgggatcgtgttgatcgatgaaccacatggaacttactatggaggaacgatcgcagcccctgtgatgagaagtgtgtttcaaactgcacttccatatatggggatttataaagaatatacgccagataaaaaagaaccgtagacgaaacaagaacaaatgaggtggcgacatgaattatggtattgtaaaaccagttttaattgccttttttatcagcgtacttcttagcccgatgatgatcaggtatttacacaaattaaaattcggtcagtttatccggggagaaggacccgaatcacatctgaagaaatcagggactccgacgatgggaggactgatcatattacttggaatcgtaatcgcatcgttattttatgttagaagatatccgatgatcatcccggtgctgtttgtgacgctgggatttggatttatcggatttatcgatgattacatcaaggtagttatgaaaaggaacctgggactgcgggcctggcagaagatgtttgggcagatcatagtcacaggaatctttgcgtattatttgataaattacacgcagacaggaacttcgatgctgattccttttacacatggtaaatatttaaaccttggagtattttttatcccagcggtttttatcattttgttaggaactgtgaatggagctaattttacggatggattggatggacttgcatcaagtgttacggtattgatcgcaacattttttacagtggcagccattggaatggggcataatgatctggcagctggaatctggccggtatcttgtgcgacggttggctcacttcttggttttttagtatttaatgtatatccggcgagagtgtttatgggagatacaggctcgcttgcacttgggggatttgtggcagcaacagcattgatgcttcgcctgtctttatttatcccaattgttgcattgatctatatgatcgaggtattatctgttatggcacaggtattatattttaaaatgacaaaaggaaaaagattatttaaaatggcaccgatccatcatcattttgaattgtcaggatggccagaaacaaaggttgtagcaatctttgcgatcaccacggcagtttgttgcctgatcggactggtagcgatttagtaaggagaaagaaatgatagatacaagcaagaaatttttagtagcaggagcaggaaaaagtggaattggttctgtcaatctgcttttaaaaacaggtgcagatgtcagtctgtatgatggaaaggaagaccttgagaaagaggcactttatgagaaattatatgaaaagaaagagattccattgatcttaggaaatatcacaaaagaagatgtaagtaagttcgatctattagtgttaagtcctgggatttcagtaaatgcaccgatcgcacagatgtttcgtgatcaggaaaagccagtatggagtgagattgaattagcatatcaggcatccaaaggaagaatcgcagcgatcacaggaaccaacggaaagacaacgacaacagcgctgactggagagatcatgaaaggatattatgaaagcagttttgttgtcggaaatatcggaattccttatacaagtgttgcgcttgatacaaaagaggacagtgtaacaactgcagagatcagcagtttccagttagaaacgatcgttgattttaaaccggatgtatgtgcagttcttaatatcacaccagatcatttggatcgtcatggtacagtagaagtttatgcacagacaaaagaatccattggaaaaaaccagacaaaagaccaggtaatggtattaaattatgaagatgatacaacaagagctatggcagacagagcgaatggaacagttctgtttttcagtttgcatcataaaataaaagaaggggtttccatggaaggtgatgcatttatcatcgaagaaaatggaaagaaacagatcgtatgtacattagatgatgtgaatctgttaggagaccataattatgaaaatattttagcagcgatcgcagtgacttattctatgggagttccagtttcatatatcaaagaaggaatcaagaggtttaaaggtgtagaacatcgtattgaatatgtggatacagtgaaaggtgttgcatactataacgattctaaaggaacgaatccagatgcagcgatcaaaggaatcaaagcaatgaaccgcccaacatggctgatcggtggtggatatgacaagaaatctacatatgatgagtggatcgaagcatttgacggaaaagttaaagaactgatcttgatgggtgtaacagcaccaaagatcgctgattgtgcaaaaacacatggatttgataagatcaagtttgttgattctatggaagaagcagtttcatacattgcaggaaaagccaaagatggagaagcagttttattatcacctgcatgtgcaagctggggaatgttcccgaattatgaagtcaggggagatatcttcaaagattgtgtcagaaaattaaaggagaactaaaaagtggcaaatcgcatcaaagaaaaatatatggccggcaaaagatactttgattatccgatgttgtttctggtaatatttctgatatgttttggtctggttatgatctatagtacaagttcatataagagtactgtcacatatggaaattcctatcactggctgttaaggcaggcagttgcgatagtgttaggtgcggttgcaatggttgtatgctgtaaactagattaccgcatcataaaaagtgagaagtttggaaatggctgttattgggctagtatcgtactgttagttcttgtgttgatcataggtgcagcaaagaagggtgcagtccgctggatcagcatcgcaggatttcagtttcagccatcagaagtatctaagatcctggttgtgatctatctcgcgaacagattatcagcaaatgctcataagatccgaacattcaaagatagtatcgtgatcgttcttccaacggtcccgatcattgctctgatcgttacacagaacttaagtacagcacttgtcgtgtgttcgatgatcggtgtcatgctgtttgtggtaagtccgaagatgaaagaacttatgttaacagcaggcggtggaataatactcttgttcgtgtatctgttgacggcaaatagttatcgaaatgagcgtgtacagatttggctacatccagaaagtcacaaaaagggatttcagacgatgcaggcattatatgcgatcggttccggtgggatttttggaaaaggacttgggcagagtatgcagaagatgggatttattccagaatcacacaatgatatgatcttttcaatcatttgtgaagaattaggattgttcggggcagtttgtctgatccttgtgtttgtggcactgatctttcggatgctcttgatcgcactgaatacagaagacttatttggatcactggttgtgatcggttttatgacacatatcgcaattcaggtattcatcaatatcgccgttgtaacaaacacgatcccaccgacaggaattccacttccatttatcagttatggaggtacatcgatccttgttgttatgatcgaaatgggaatcgtattatcaatttctaagaaaattcacataagataagggtgagtgtgatggaagaaaaaaaagtcatccgtatggatgagcataaaaacaagaataaagtacataaactatcggggaagaaaatactgcttggtatcgttgcagttttgatccttacggttgtgatcattgcagggacgtgtaaaacaaaacagatcaaaatttctggattaagttattatacagaagcagaagttaaaaaggcagttgtagagaatggatatattgataactcggttgcatatttcttaaaatgtaagattgcgtcaccagatcttctgccatttatagattcgattcatgtaaggatcaaccggccagatacgatcacggtcgaggtaaaagaaaaaaagagggctggatgccttctgtataatggaaaatatgtctattttgataaaaatggttatgcattggaaagctatgaaaagaaatatgacgatgttccattggttacagggcttaaatatgatgaattggtcatgcaggagaagatcccagtcaagaaagagaaagttttttcttatcttttagaacttacgactgcaattgataaatataatcttccaatcgatcagatttatatcaaagaagatggaaatgccttattgatcagcgataagataacggttgatctttataataaaaaggatattgatatcaagatttctgaattagcagggatgcttaagaaagtaaaagggaaaggtggaactattgacatgaagtactttagcgaggaccacaaaattgctgtttttcaaccaaaaaagagttgaaaaaacttagtaaagaaggtatcattaagttagtgtacagaatttaagggagtcattttaacatagatggcgtgaaggaggaacaacgtggttgagattatgcctagtgttgagaacacacaagcaaggattttagtaataggagtcggtggagcaggaaacaatgcggtaaaccgaatggtagatgagaatgtccagggtgttgaactcgtgggtgtgaatacagatagacaggctttatctttatgtaaagcaggaacaaagatccagatcggggagaaactgacaaagggacttggagcaggagcaaaacctgagatcggggaagcagcggttgaagagaatcgtgaagagatcacagaattggttcagggatcagatatggtatttgtaacatgtggaatgggtggaggtaccggtacaggtgcagcaccgatcattgcagagatttccaaaggacttggaattttaacagttggagttgtgacaaaaccatttacatttgaaggaaagcctcgtatgaacaatgcaatgtcaggaattgcacgccttcaggatcaggtggatacaatgatcgtcattccgaatgacaagttgttacagatctgtgataagagaacaacgatcccagatgcactgaagaaagcagatgaagtactgcagcagggtgtacagggaattacagatatgatctacaacccaggattgatcaatgtcgattttgctgatattcagacagttatgagagataaaggtattgcacatatcggtatgggtgttgcagacgaagaacttgaagcaatcaagacagcgatggaaagtccattgcttgagacaactgttgcaggagctacagatgtgatcgtcaatttcgcaggagcggttggaatgttagaagcacagcaggctgtggaatacttaaaagatgaagcaggagacgatgtcaatgtcatcttcggtacagtcaatgcagattttggagatcagatcagtgcaacgatcatcgcaacaggaatcaaatccgcagatattacagggaatgcaagaactggatttgctgcagcaaagaagccagtacagcagacacagcaggctccggaattttcagggcagccattacataatggaaaggtcatggaggaagaacagccagtacagacaacaagctatgtttctgaacctgagatgaaagagatcgaacaggaaagctctaagattaacataccagagttcttattaaagagcagaagaagataatttcttaacagataaaagacagaataaaagcgtgtaggatttcaaagattctacacgctttttcatatcataggaaattccgatggaatctcctatgcaaggattctttcttaactgctgataagcaggttattcgatataatctccacggctgaatacaagctgataatcaatactggcaagacgtcttccaagacagccagcacattcagcagcttcctctccagtgcagatcttattgtcatataaagaataatcttttcttactgcaacaggagaaagattcggcataacaacatttgcacctgcaagaattcctttttctcttccacgaggatcgatcgtaccaagtgctgttgtggaaggaagcaaaagatgagggttcatcagacgaagaatactcacaaggtatgtggtaagttctacacttccagaagggaattccttaaatcttgtatcgtgatgtggaacaaaaggaccgattccgaccatctgtgggtcaagttttttgataaatagcaggtcgtctgcaagattctcaaccgtctgataaggggctccaaccataaatccagttcctacagcatagccgatttcttttagattccacagacactggatccggttttctaaagaaagactttctgggtggagtttctggtaaagctctgggtcagcagcttcatgtcgaagcagataacgatcagcacctgcatcatataatttttgataactttctttggagcgttccccaagagaaagtgtgatggcacaatcagggtagcgctttctgatctctgccacgataggaaccataacttcatctgtataatgaggatcctcaccgccttgaagaacaaagcttcgatatccaagctggtaaccattctcacaggcagaaaggatttcctcttttgacagacggtaacgatttgcattcggattgctgccttgaattccgcagtaatagcagttatttttgcagtaattcgtaaattctaccaatccacgtgggaaaacaccatttccatagatatttacagcttcttctctggcaagagaggcaagataagatgcgctttcttcgttccgttctttaataagtgtgataaattcttcttttgtcaatgtatgctctttatgcaaacgatcaattagttcgtgtaaattcataatgtccaactccttttctggtctataagaaatataacatataatagaagaaaaaaccaaagaaatatgatagaataaaggaaaatgttttaaatttcaggaggaagcaaacatgcagggaaatgttacagaatttacacatccattaatcatgcacaagatctcattgatccgcgataagaattgtgggacaagggaatttcgtactgttattggagaaattgcaacattaatgggttatgagatcttaagagatcttgaaacagaattagtagagattgagacaccaatggaaaaggcaatggtgccaatgatcaaaggaaagaaattagcagttgttccaattcttcgtgcaggtcttggaatggtggatggaattctttctttagttccaacagcgaaagttggacatgttggaatgtatcgtgatgaggagactttacagccaaaagaatattactgcaaattgccagaagatatcgaccagagattggtgttgatcgtagatccaatgcttgcaactggaggttccgcagacgcagcgattgagtttgtaaagaaacagggagcaaaacagatcaaatttgcatccattatcgcagccccagagggaatcaagatgttaacagagaaacatccagatattcagatttactgtggaagcattgaccgtcagctgaatgaaaacggatatattttgcctggacttggagatgcaggagatcgtatctttggtactaaataataaaattgcaacttttcattgattgtgatagaataagaaagttaatcttggcatgctttataaatgccatggaaactgatacagaaagatactagaaagaaggatataaatgaagcgcgaagatgtgagaaatattgcaatcattgcccatgtcgatcatggtaagacaacattagtagacgagatgttaaaacagagcggaatcttccgtgacaatcaggaagtcgcagagagagtcatggactcaaatgacatcgagaaagaaagaggaatcacgattctgtctaagaatacaggagttatgtataatggaatcaagatcaatatcatcgatacaccggggcatgctgactttggtggagaagtagaacgtgtactgaagatggtaaatggtgttgtattagttgttgatgcatttgaaggaccaatgccacagacaaagtttgtattaaagaaagcattagagcttgatctgtctgtgatcgtatgtgtcaataaagtagaccgtccagaagcaagaccagatgaagttgtcgatgagacattagaactattaatggaattagatgcaggggataaacagcttgactgtccatttgtatttgcatcagccaaagaaggattcgcaacattagatcttgatggtgagaagaaagatatgaaaccattatttgagacgatcattgaacatatcgaagcaccagaaggtgatccagagaaaccattacaggtattgatcagtacgatcgactacaatgaatatgttggacgtatcggaatcggtaaagtagataatggtgagatcgcggtcaacaaagaatgcatcgtagtgaatgctcatgacccagaacgtaaagaaaaagtccgcatcacaaaattatatgaatttgaaggacttgataaagtagatgtaaagaatgcacaggtaggatctattgtagcgatctcaggaatctcagatctgtcaattggagatacgatctgtgatgtggatggagcagaagcaattccattccagaagatctcagagccaacgatctctatgcagtttatggtaaatgacagccctcttgcaggtcaggaaggtaaatatgttacatcaagacatatcagagacagattgttcagagaattgaatacggatgtcagccttcgtgtggaagaaagtgagaatcaggacagctataaagtatctggacgtggagaattacatttatctgtattgatcgagaacatgcgtcgtgaaggatatgaatttgcagtcagtaaagcagaagtattatatcattatgacgagaatggtaagaaattagagccaatggagattgccgtcattgatgttccagaagaatttacaggggcagttattgagaaattaagccagagaaaaggtgaacttcagaatatgacagcagccaatggaggttatgcaagacttgaattctctatcccatccagaggactgatcgggtatcgtggagaatttatgacagatacaaaaggaaatggtatcttaaatacactgtttgatggatatggaccatacaaaggggatatccagtatcgtaaacagggatcattgatcgcatatgaagcaggagaaacgatcacatatggtctgtttaatgcacaggagagaggtactttatttgtaggacctggtgagaaagtatacggtggaatggtcatcggacagactggtaaaacagaagatatcgagatcaatgtatgccgcagcaagaagcttacaaatacacgtgcttcaggatcagatgatgcattaaaattatctcctccaaagatcttaagcttagagcaggcattagagtttatcgatacggatgaattacttgagatcactccagagaatatccgtatccgcaagaagatcttagatccaacaatgagaaaacgtgcaaaattctcataagatcatgcacggtatgaaagccgtttaaaacatgtcgaaaaagtgtgactaactttgtcgaaggatttttcttctaattgtgtcaaaattggaatacgatttaaagtatactaatagaacacaagaagggagaaagagtatgacagagcagggaatcaatcataatcaagtggaggtttgcggacgtatcaattcagcgtttgaatacagccatgagattttcggagaaggattttatacagtcaaacttttagtaaacagattaagtgaagcaacagacgagataccattattaatatcagagcggctcgttgatgtgacaaaagattacaaaggaatgcttgtaagagcttgcggtcaattccgttccttcaacaagcacgaggagaatcgtaatcatttgatcttatctgtattcgtcagggatctggaatttatagaaagcatggatggagtcagaccgaatcagatcattttagatggatttatctgtaagcagccagtatatcggatgacaccgctgggaagagagatttgtgacatcttgcttgcagtgaaccgttcctatggcaaatccgactacataccatgcatctgctggggaaggaatgcgagatttgcagggaatcttgaaatcggttcaagaattcagctgatcggaagaattcaaagcagagaatatcagaaaagagtttcagaaaatgaactgatcagacgagttgcatatgaggtatcagtaaacaaactggagtttcatgaaaaggatgaagaatagttgtatttatagtatcagaaatgatataatatcctaaaccaaatatattactacaaaaggaagattctttgaggtgaaaagatggaaggacgagtggaaatatactgtggccagggcagagggaagacatcctgtgcgatcggccagtgtgtgaaagcagccgggcaggaaaagcagatcattatggttcagttcctgaaaggaaaggagaccgaagaattaagctttttcaaacgtttagaaccagaagtacagttgtttcgttttgaaaagtacgagagattgtatgaggatctgaatgaagaagagaagaaagaacaagatcattttatttataatggattaaaatatgcacataaagtcatagatacaagacagtgcgacatggtcgttttagatgaagtgcttggacttttggatcttggactattaaagaccgaagaactggtggagatgttagaaaatcgtagtgatgaccagacgatcatcatgacaggacggcagattccagaagcattgattccgtatgcagatgcagtatatgagatcagtacgatcaaagaatcttaatgttgatgctacataggatgataggaggaaagaaaaatgtcaatttttacaggtgcaggtgttgcattagtgacaccattcaaagaagatttatcggtggattatgatcagttagagaaatttattgatttccagatcgataacggaacagacagtatcgttatctgtggaacttcaggagaggcttctacaatgtctcatgacgaacagatcgaagtagtcagtgcatgtgtttctcatgtcaatggaagagttccagttatcgcaggagcaggagcgaactgcacagatgaagcactgaaccttgccaagagatcagagaaagcaggagcagacggattgttagtcgtaacaccatactataacaaagcaacacagaaaggtttggaagaatattatacaacagttggtaattctgtagacattccaatcatcatgtacaatgtgccaggaagaacaggaacaaacatccagccagctacagcagtgaagatcgcgaagagtgttgataatatcgtagcgatcaaagaagcaagcggagatatcggtcaggtagcaactcttgcagcattagcagacggatgcttagatatttattcaggaaatgatgatcaggttgtacctcttttagcattaggtggaaaaggtgtcatctctgtattatccaatgtagcaccaagagaaactcatgatatggtaatgaagttcttagaaggggacgtcaaaggaagtttagatatccagttaaaatacatggatgtgatccataacttatttagcgaagtaaacccaattcctgcaaaacgtgcagtagcagagatgggatattgtaaaaatatcgttcgtcgtccattaacagagatggaagaggatcacgcacaggtattaattcagtcaatgaaagaagcaggaattctttaaggagttacaaaagatggttaagattatgatgcatggctgcaatggagtcatgggacaggtgatcagcaagatcgtagaagagacagaaggagctgttatggcatgcggtgttgaccgtgtggatgatgggcacaacgattatcctgtatttacagatatcaatgcgtgtgatgtagaagttgatgcgatcatcgacttttccgcagcaccagccgttgatggtttactggattttgcagtagagagacagattccagttgtgttatgtacaacaggattaagcgatgaacagttagaaagagttcatgaagcaagtaagaagacagcagttcttcgttctgcgaatatgtcattaggagttaacacattattcaaagtattaaaatctatgacaaagttattagcagatgcaggatttgatattgatatcgtggagaaacatcacagaagaaagttagatgcaccatctggaacagcaatcgcgcttgcagaagctgtcaatgagccgttgaataacgaatatgaattcgtatatgacagaagccagagaagagaacagcgtccaaagaaagagattggaatctcagcagtccgtggtggaacgatcgttggagaacatgagatcatttttgcaggacaggatgaagttattgagttaaaacatactgcatacagcagagctatttttggaaagggagcagtcagtgcagctctttatcttgcaggaaaagaagcaggtatgtatgatatgagtgatgtgatcggataggatcatattttaaagaaaagataagaaaagggaatgaaacaacaaaatgttagtttcattccctttttctgcatcagaagtttttgtaaaagtacctcgatcaatgcactttctttgctttaggatagatgagtttcattttctggtcgttataatgggtatccagatatcgttcaaagaaattagaagcaggtatttttttgttacgctgatcataacggatcaaggcagatagtgacatgaacatatttaataccatgaaaacgacaatgatccatgtaaatacagttccaaatgcaatcggaagtttctcgatcagattggataagaaaggataaatcctcttaaaccagacaacggttgcaattccccagaagaaacaataaagaagattgattcttccattcaagttaaaaggcattttactgtaatcccagaaaacctttccaaagacgatttcacttaaaacgctgcagagatattcataggcgccgccaagaaaagtaccagttaaaaatagaaagctgtctgaacgatctttatagcggtatagaagcaatgtaacaccagcaaaggcaaatccccacacaatgctaaaaggaccccatacaaggctgctcctgctcatccagacgcccatcttcaaacgacagaagatcgtttcaatgatgtctccaagcaaagaaccgatggaaaataacaaaaacaccttataaaaaccgcatccctgggcaaatacaccagtctttgggatcgttggcagttttaatttacgctgtggataagcacgttcaacacgacgatccacataagatgttatcaacgaactcaatttcacgctgatctttgtaagataagcatccgcagattcccaacgtcgtttatcgatattttttccaaagacaacgatcgtggttgctaaaatatcaatgatcaggactgcaagaaggataaaaatgataagatgtcggataaatggcgggatcagatgataaaatttaaagagcagtggattgacaaactttactccgatatatcctaaaagtccccagaaaaccgaatgggacaggcagatgtagccatcaagattccatttatttttggaataatcccaccagcgttcatggtaaaaatgttcaataaaatgtccgccaaaccattcaatgactgtggcatcgatcatggcggcagcaaagatccataggccggtcatctgatgcgtattgatcgtaataacgatagctccgattccataggaaatacaaagcggtgaattgataaaaccacggtttaccaaacgtttctgatgaaatgctgattgtaccacttctaagatccagccgataaatgagtagataaagaagagaaagcttagcaaaaataaagttttgatcatcatttgtaaatgtctccttttgtcggattttgtattcagtatgtataagtatatggaaaaatgataaaaaaggcaagaaaatagaaaaaatctaaacgaaaatttgacaatatattaacgtgaaaaataaaaaaataataaacttacgggtaaaaacagataaaaaaagaatgaatataaatatatttatgtttaaatataacaaaaagagtgttataataataacgagatgttgatatcaaatggtattttgaccatggtatcatgatgagaaatagagttgatatggagggaaatattatggcagcaattattggaagtccaacacgctacattcaaggtaaaggagagatgaagaatctttgttcttatgcagataaatttggaaagaatctctttattctgacgagtgcatctggaagaaaaagagtagaaccggcgatcaatgaaggaaataaagacagcaatcttgtttatgatgtgttcaatggagaatgctgtatgacggagatcaaccgaattataaagattgtggaagaagcaggaagtgatgtgatcattggaattggcggtggtaagattcatgatacatcaaaagcggttgcctattatacaaagaaaccagtgatcatcgtgccaacgatcgcatctacggatgcaccatgcagtgcattatctgttatctatacagatgaaggtgtttttgaaaaatatctgttcttgccatcaagcccagatatggtcatggtagataccgatatcgtctgtaaagcaccagtaagactgttgatctcaggaatgggagatgctttagcgacatattttgaagcgagagcatgtaaaagatctgatgcaagtaactgtgttggaggtaaatgtacattggcagcaatgaatcttgctcaattatgctatgatacattgatggaaaatggagtacaggcaatgatagcagctaaagaaggaatttgtacaaaagctgtggagaatgttattgaagctaatacttatttatcaggaattggatttgagagtggaggattagcaggggctcatgcgatccacaacggatttacagcgattccagaaacacataagatgtatcatggagagaaggtggcattcggaacactggttcagctggtattagaagatgcgggagaagatgagatcatggaagtgattgatttctgcagtgaaattggacttcctgtaacattaaaaggattaggaatcgaggaagtgaaaccagagcagatcatggaagtggcacgtcttgcatgtgcaccagatgatacaatggggaatatgccatttgatgtgcaaccagaagatctgtatgctgcgatcatgggtgcggatgctttgggcagatattatacggaagagtagaattgctgattatttcataagtatagatatgtaaagtatgagatccccctgaaaggttgatcgacctttcaggggatttttgaaattaaaaaatagaattacacaaaaaatcagtaaataacatttggaattttttctttttatatcgactgacaggaacggtgacattagaatttaatatagcacaatccttttgtatagaagttacatatgccatattaacaatatagcctgtatggcagcgataaaaacgttcatcaagtttatcttcgtatgcttttaaggattcatgtccagtgatttcagatccggatgttaaatgaaataaaatatttcggttataagtttctatgtatataatttcaggaaatttgattttgaaaatatttcctgaatcttttatgattaaaaaatgcttttcattagatttaagttctgaaatagcttggtccaaaacattttccaattgcagatatgaaagtggttttacaagataatcaaaagcttttactttgtaaccagataaagcatattctgaaaaagaagttaaaaagattaaaattacggatggattaatgtctcgtatttttttagcaatttctattccgctataggtttggaattttatatctaaaaataagatgtcaatatcattttgagaataaaaataagataacagatcattttcattttcaaaggagttaaattgattgatatttttgtgctttttagaatactgtttcaaaagtaattgaaaattgtgaataaagtctttttcatcatcacaaatacagattttcataatgttttcctctcttatatttaattcaggttttgtgggagtggtatggaaatatttacaacaaattcttcaaggttggaagaaaaagagacatttccgttatatttggaaacgatttttttgattgaaattattccaaaaccatgcatagaagaatctttttttgtagttatgatggagccgtttttatattttaattttttattatatgtattggatgcatgaatgcaaaaatgattttgtgtcgtattacagcaaaaggtgatgcttttgttcttgtcacaacattgggtagcttcaatgcaattatccaacaaattaccaagcaaagaacataactctatattacgaataaaatgaatattctctaattctacgttcattttgcaagaaatgtgttgttcgtggatcagctttaatttctcagaaattaaaacatcaataaaaggatttcctgtgtgtatagcataggaagattttgaaagatcattcagtaaggaatcaatatgttgtgtgtattgattgctctctgctggctgtgattttaaggctaaaagctgatttttaagatcatgacgtataatgtttaaatcttcaatgtccttttgtttttgttgataataataaaaagttttttcttcttgtgattttacaaaattaatataattttcttcagcctttttggaaaggtacaggttgaataatataaaatggcaaaaaaaactgatcattagtacaatagagatccataaaaagacttcatgatattgtgaagaaatattagaaattttcaacaaatatataatgcctaaaatgagaagtaagcatgtgatgatcggaagaaaataaagaatactttctattggtgtaaaagaaatctctatatcgttttgtttatgataaaaaacaaaatgtaataataagagggataaaatttttgaaaaaatgatcatttccaatgaaagaacctgattatcaaaaatatcggataaagatgtgcaatgtaaaacactaaaacaaattccaacagttaataattcacataaacataaaacaatataaaatacaacgatcatttttaaagtagatttcaattggaaatccaaatataagtaacgatttaaaaatatgatggaaaacaattcatagattaatttaaaaataaatgggcaagaaagtaaatttaaaagaataatagaaagaccccataatgtgtaaaggatacctgattttatgtacgaatatcgaaaattaaaatattttgtacaatagcataataaaatcgtgtcaatagaggttccaagaagggttagtaatatagtaagtgtcataagttgatctccttttatcaaatttctctaataatatattttaatacaaaattatattttgtaaaggctttaatataaccatttgagcataaaaaatgactagatacgcaaggtggatttttatttgtatgaaagggtggtattatattaagaaaaaacatatgaaagaggggaaagtaaatgagacaaagcaagagaaataggattgtgttcattgtaatagtgattagtatcatagtagctcttggaattattgggttgtttaaatctggtgcaatgatacaaaaagattataaaaagtctgtaagatataaaaaactgaaatatctatcttataaactagaagatcattataacaaaaagattctttgttcttctggaattaaaggaatgccgtacgagtatcaaattaaaaagaatgggaaattgtatggaacactaatcgatgaatatgggtatccactgaaaaaatatgggcatgtaatgaaagatacgattgcgcataatgtaaaacatattagttttggaggaagaggaagtctgttgtatcttgattataaaaacagattatatggaatggggtggaatagtgatgaagaatttcagattaaaatgccagaagataaaagaaataatgtaagtacagcagtttttcgtcaacctgtttttattatgaataatattatttatgcttccatcaatgaaggaggagcggtcattgctatgaaaaaagatcattctgtatggacatggggaagtaatgcaggcggaatgttaggatatgataaaaatacggatttaatttcctgtaaacctaagaaaatatttgaaaatgtaaaatatattgcagcaggtggatataatatggctgtgattacggaaaaaaataatctatatttgtggggagataatacctatggacaattgggtaacggaaagaaggctggttggtattttggagattctaataaagaatgttggtttaaacctaaaaaagtaatgggagatgtggcaactgttcatataggaagcggaaaaattattgttaccagaatggatggcagcaaatggggtacaggaataggatttggaaatgagaggtcagaatctggaaagaaagttggcactagatttgtgatgatatcaaaataatagttattggaagattaatttaaggagaaacattttgaaagataaaaagaaattaatagtgttaatagtaatgttgttgatgccagtggctggaatctggtattttataaaaatgtctttgaagtatatgaaaggcgctgaaatagaaatattttttccgaataacttttttaaacaatttggggtatggagcattatttggattattttatggattgtaataatgtttatagaaagaaaatataaagttaaaaagataaaagaaagaaaaaatagtataaaaattttacagtgtattgttatgtttgtaatggcagtgattttgttttggatttatgtatctgttttgactggaaagtttaatcattatatgatgttagtttttttagtagaaattatagatgtttttatggtgacattggtgatcaaaatatttagaaatttaatcgatatttattttgactggaaagaaaataaaagatgcgagggaatggattaattccttcgcatctttttttaatgtctgcctactctacagttacagatttagccaggtttcttggctggtctacatcatatcctctaaataccgtgacatgataagcaagtaactgtaatgcaacggtagaagcaaatgttgcaaacaggtcgtctgttgcaggaacctgaatcaaatcatcatagattccttcgtaattactcatatctttatctgttactacgatcacatgagcaccacgagcttttacttcttcaacgtttgccattaattttggtaagacattttcctgtgtagcgatcgcaataacaggtacaccttctgtaatcagagaaattgttccatgtttcaattctccggcacagtatgcttctgcatttacataagagatttcttttaattttaagcaggcttcacaagcaataccgtaatctaatcctcttccaagatagaaagctgagaatgtatctttgatcttttctgagattcctttgatataatcatccatctttaagacttcttcaacagttccgatcgcctgttcaaatttatcacagaaatctttcatctgttcatttgtcattaagttgttaacttctgcaagttttaatgcgatcagatacatacctgcacactgtacagagaacgcttttgtacttgcaacagcaatctcaggacctgcatgtgtatataatacataatcactttcacgagcaatacttgatccttttacgttaacgatagagatcgtttttgctccacgttcatttgcaagacgaagtgcagcaagggaatcagctgtttcaccagactgtgtgatgacaacaactaaagtatgttcatctaagatcggattcatgtaacggaattcagaagctaattcaacagttacaggaatacggatcatagcttcaatcagatgtcttccaactaatcctgcatgccatgcagtaccacaagctgttacgatcacacggtttacacctttaaagatatcatcagagatgttatctgcactaaagtcagcgtgaccattatggatacgaggcatgatcgtattatgaagagcctctggctgatcatagatctctttttgcataaagaaatcatatccgcctttctgggcagctgttgtatcccagtcaacatgaagcatcttaggttcttcaaccccaccatccattgtgtataatgtaatactgtcagctttcatgacaacgatatgttcttcaggtactacgaaataatcttttgtatattttaataatgcaaccatatcagaagcgatgaaagaaccatcttctgtatgagatgctactaatggacttgcatttctcatgcaatagatctctcctggatgatctttgaacataacacagaaaccataagctccttctaaagctttatcagcttcttttaatgctgcaaatggatctccatcatataaagagtcgatcagcattgctgcaacttcggtatctgtttcagaaatagcagtaaatccttttgtttttaaggaagcagctaattctttgtagttttcaatgattccgttatggatcagagttacatttccagatacatgaggatgtgcgttaacttctgtaacaccaccatgagttgcccagcgagtatgtccgataccgcatgttccagcaaggtcagcagtagcttcaactttctcacgaagtgttgcaacttttccagttgtttttacgatcttagtttctgatccattatttactgcgattccggcactgtcatatcctctgtattctaactgctgtaatccatcaactaaaattccaggtgcctgtaagtttccagtaaatccaataattccacacataatataaatctccttaaaattgcgcaaagaaaataaaaggaagtatagatatgtaaaaaacttccaaataaatcttttgttttctttttctaaatcatatgcggttttgtccagattatactgcctctgtttcatgatcactcatgggtttactcagtatatcacgtagtctggagctgcgggaaagcatccgccgaatctttcgatcactttcctcctcgttaaccttcctatcagaccctcatcggtctgtttccgtatcaggaaggtgcatggcgcttaaattctgtaaaactcccttcgaacatattttgtcaaaaactcaaaacccaaagtttttaacgttagtgattttaacacggaatatctatgaagtcaaataagaacgtggtattttataaaaacttaataagttttgggcgaaagtgttacattttaataaagatttaagaagttataactagatactttctgttttgaatgatataatactatgatagcgaaaaagagcaaaggagaaaagcatgaaaactttttttaagaatatcggaaatacgatcgtaaagaagcttcgaaaacacccattgatatgtaattttgtattgtcagttgtgctggcgtttgtattggaagttttgggacgtcagacatttgatcttagtgctgtgggatttgtggatcagagaagcaagatgtttttatatagcatctttattattttcgtaacatactctgtgacactgattactaagagacgactattttcctatataatagtaacactgctatggagtatcgttggaatcgtaaattttatgatgctcagttcaagaaatactccatttacgtatgtagatattacgttgatgaagtctgtattgccagttatgaataattacttctcgccacttgagattggagcaatgggagcattgttactgatcgcattggtattgttagtagtggcttacatgtatcttccaatagaagaacacttaaaccgcaagagcggatttataaaagttatagtgatcatagcagtattttcgggagttacttcttatggatttaagagtggaatgctggtagatcagatccataatatccgaattgcattcagtgattatggaacaccgtattgtttcagtattacagccttgaagaatggaattgataaaccatcagattattcagaaaagaagatcaaaaagattgagaaacgaacacagaagaaggttgcaaagatgaagaaagaaaaggtaaagaaaccaaatatcatctttgtacagttggaatcacattttgatattacgcaggtcaaaggagttaagtttaacaaagatccattaccaaatttccataagtatatgaaagggtattcctctggacagctttctatgccgtcttatggggcaggaacagcaaactctgagtttgaactgatcacaggaatgaatctggaccattttggagcagcagaatatccatataaaacagtgcttcagaatacaacgacagagagcatggcgacggtattgaagaattacggatataaggcacacgcgatccatgataacagtgcggcattttatgatcgagatctggtattctcacagcttggttttgatacatttacaacaaaagaaagtatgaacatcaagaaatggacagaaaatggatgggcaaaagatcagattctgaccggttgtattatggatagtttggattctacgaagggacaggattatgtttattgtatttctgtacagggacatggagattatccaacaacacagatcatcgagaatccggagatcacggttgaaggaattgaggatgaagcactgaagaataaatatacttattatgtcaatcaggtttatcagatggatcaatttgtcgggaaactggtcaaagcattacaacagcgtggagaaccaacgattctttgtatgtatggagatcatcttccaagtttggagatcgaagatgaagatctgacatatggaaataaatatcagacaagttattttatgtgggataatattggattgaagaagaaggacggaacgatcgaggcgtatgatcttggatcagaagttctgaataagtgtaatatccatacaggactaatgaacagttttcaccagacaagaaaaggtacaaaaaattatcagaaagacatgaaagagcttcagtatgatatgttgtacggaaaacagtatgtatggaatcaggagaatccatttaaggcaacggaccttcaatttggaatccggccgcttacggtgacgaagatatatgagacaaaggacagcatctttatcgtaggaaacaattttacgaatttctgtcaggtatttgatggcgatgtaaagatcaatacaacctaccataatgaacatcttttggaggtatcgaagaaagatctcaaagacggggatacgtttaaagtgagtatcgtcagtaaggctctaagggtactaagcagttcaaatgagtatgtttatcaagaaaaaagtgaaaaataacgcaaagatgcttgtataacgcgcaaatcttatgctataataggtgaatgtttgtgaaattacaaaaaagataataatttttaggaggatctatacagatgagtttgcaagtggaaaacttagaacataatatggcaaaggtaacaattgaagttgaagcagcgaaattagataacgctatcaaacaggcttttaacaagaaaaaaggacagtttaatgtacctggattccgtaaaggaaaagtacctttccagttgatcgcaaaagaatacggagttgaaatcttctatgaagatgcagcaaacatcttaattccagacgcttatgcagaagctatgaaagatacagatttagagatcgtttcaagaccagaaatcgatgttactcagttagagaaaggtaaagactttatcttcacagcaacatttgcattaaaaccagaagtaactttaggagactacaaaggaattgaagtacctaaaacaagagttacagtgaaaaaagacgaaatcgaagaagaattaaagaaagttcaggaacagaacgcaagagagatcacaattgaagatcgtgcagtaaaagacggcgatatcttaacaattgattactctggatctgttgatggagtgaaattcgaaggtggaacagctgaagatcagacattagttatcggatctggagcattcatcccaggatttgaagaacagttagtaggaaagaatttaaacgaaacagcagatatcaacgtgacattcccagaagaatatcatgcacctgatcttgcaggaaaagatgctgtatttacagtaacagtaaaagcaatcaaagaaaaagaacttccagaattagatgacgaattcgcagcagaagtatctgaatttgaaacattagaagattacaaagcagatattaaagaaaagatccgcgatagaaagaaagaagcagctaatactgaaagagaaaacaagatcgtagatgcagctgtagaagcagctacaatggatattccagaggctatgatcgaagaacaggttcagcagatgacagatgaatttgctcagagattaagctatcagggactttctatggaacagtatttaatgttctctggaatggatgcacagaaattcgcagatgacttaaaaccacaggcagttaagagaatcgaaacacgtctggtattagaagcaatcgcgaaagcagaagatatcacagcaagcgaggaagacttcaaagcagaactggaaaagatggcaggaatgtatcagatggaaacagagcagcttgaaaagatcattcagggagctcagaaagaccagatgatggatgacatcgcagtacagaaagctgtagatttccttgtaggtgaagcaaaataagcaaggcattttataactttatgttctatttgacagacataaataaactgccttaactatcattaggaggatgcaaggatgagtttagtaccttatgtcattgaacaaacaagcagaggagaaagatcttatgatatttactccagactgctgaaagaaagaatcattttcttaggagaagaagtgaatgatgtcacagcaggacttgtggtttctcagttattattcttagaatcagaagatccagataaagacatcaatttatatatcaatagccctggcggttctgtaaccgccggaatggcaatctatgatacgatgcagtatgtgaagtgtgacgtatccacaatgtgtatgggaatggctgccagcatgggagcgttcctgttatctggtggaacaaaaggaaaacgtctggctttaccgaatgctgagatcatgatccatcagccatctggaggagcacagggacaggcaacagagattgagatcgcagcagaacatattcttagaacaaagaagaaattaaacacgatcttaagcgagaatacaggacagccatacgagacaatcgtcaaggatacagaacgtgataactggctcactgcacaggaagcactggaatacggcctgatcgataaggttatggaaaatagatagtgatagaatagtggggtgatctggtggcaggttataatgacgaaaaaaaagtattaagatgttctttttgcaataagacacaggaccaagtccgcaaactgatcgcgggaccaaagggtaagaatgtttatatttgtgatgaatgtattgacatttgttctgagattattgaagaagaatttgaacagtatgcagagaatgacggagagatcaatttacgtaagccaaaagagatcaaagaatttctagaccagtatgttattggacaggatgaggcaaagaaagtactttccgtagctgtatataatcattacaaaagaattttaatgggtggagactctgatgtggaattgcagaagagtaatattttaatgcttggaccaacaggttcaggaaaaacattattagcccagacattagcaaagatgttaaatgtaccatttgcgatcgcagatgcgactgctcttacagaagcaggatatgttggtgaggatgttgagaatattcttcttaagatcattcaggcagcagattatgatattgaccgtgcacagtgtggaatcatctatattgatgagattgataagatcacaagaaagtctgagaatacatcgatcacaagagatgtctctggagagggtgtgcagcaggcattattaaagatcattgaaggtactgtagcgtctgtgccgccacagggaggaagaaaacatcctcatcaggaatttattcagattgatacatccaatatcctgtttatctgtggaggagcctttgacggattagagaagatcatcgaatcaagaattggcaagaaatctattggatttggagcagatgtatttgggcagaaggaaacagatctcggtgagctgttaagacaggtattgccagaagattttgtgaagtttggtctgattccagagttcattggacgagttccagtgaatgtatctttaaatccattggatgaagaagccttagtgcgcattttgaaagaaccaaagagtgctcttgtgaaacagtaccagagattgttcgagatggatggtgtgaaacttacgtttgatgatgatgcattaattgcaattgccaagaaagcattagaacgtaagacaggtgccagaggacttcgtgcgatcatggaaggtgtgatcatggatttaatgtacgaaatcccatcacagacagatgtatcagagtgcctgatcacaaaagatgtcgtagaaggtaaagaaaaaccaatgatcgaacattctggagtgaaggtgaaagccgcagtgccaaagaaacgggtaaagacaagcaatcatggtgagattgcatagatagattagccgaaataaaaactgctttcatgcaagagattcttgtgtcaaagcagtttttcttcatgtctgacgaaatttacagacaaataattcagaaatgaaaggaagacttgaatgaaaaaaacactaccaatgcttccactgagaggcaagtatatatttccgaatacagtcattcattttgatgtatcacgaagccgttctgtaaaagcaattgaagaagctatggaacatgatcagatgatctttttaaataatcagatcgatccgacggcagaagatccaggaattgaagatttatatcgtgtaggaacactggcaaggatcaaacaggttgtaaagcttccaaagaatattttgagagtttttgcagaaggattatttcgtgcagagctttctgaaactgttgagtacgaaccattctataaagtagaggttttatatgatcatgtagaacaacagtcatttgaggaatttgaaagagaagcatttcttcgaatgatcaaagaagcatttgaaggttatgcgaaagcctggccacatttggatcagaatatagtaaattatattttattattgacagatgtggagattctggtggacgaacttgcaacacatattccattttcttatccagagaaacagaaacttttggaagaaatggatctaaaagagcgctgtgaattaatgcttgtcatgctgcaggaagaactagatgttctgaaattgaagcagaagatccaacagaaagtcaaagtgaatattgacaaaaatcagaaagaatatgtgctgcgagagcagatcaaagtgatccgtgaggaacttggagagacgaatgtagaggatgaagcggatgaatttatggagaaacttaagaatctaaaagcatccgatgaagtcaaagagaagcttaaaaaagagatatcgcgttttcaaacaatgggaaatcagacaccagaaagctctgtgttaagaacttatatcgagacaatgtttgaaattccatgggaagagatgagcgaagattccacagacttagatcatgcacaacaggtgctcgatcgagatcattatggaatggaaaaagtcaaggaacgtgttttggaatatttagcagcacgtgctatgagtggaaagaaagatgcagcgatcctttgtcttgtaggacctccaggaacaggaaagacatctattgccagatcaattgcgaaagcaacgaacaaaaaatatattcgtttatctcttggcggcgtcagggatgaatcagagatccgtggacataggaaaacttatgttggagcgatgccaggacgtattgttgaaacattaaagaaggtaaaagttagaaatccgttaatgttattggatgagatcgataagacagggaaagaccagagaggagataccgcgtctgcactgcttgaagtattagacccggaacagaatgaacattttacagatcattatctggaagttgcattgaatttaagtgatgtcttatttgttgcaacggccaatgacctttctacgattccaaggccactgcttgaccgtatggagatcatcgaggtatcaagttatacagagaatgagaagtatcacattgcgaatgactatctggtaaagaaacagatggaagcaaatggattaaatgatacacagattcactggaaggaagatgccctgagatttctgatcacagattacacaagagaagcaggggtcagaaacttagagagaagaattggacaagtttcgagaaaggtgacaagagacatctaccagaagaaacacagaaaagtaacgatcacaaagaaagtgatcaaagattatcttggaagacctgtttatgaatgggaagaagacactctaagagatcatgtcggaattgttcatggactggcttggacagctgttggtggggtgacattaaagattgaagtaaatgttatgccgggaaaaggagcgattcaggtgacaggatcccttggaaatgtcatgaaagagtctgcacaggcggcgatcagttatatcagaagccagagtagaaaatataagatcaaacaggatttctttgaaaaacatgatatacatattcatattccagaaggagccgtgccaaaagacggaccatctgctggaattacgatgacaacagccgttttgtcagcgatcacaggtaataaagtctgtggaaatctggcaatgacaggggaagttacgatccgcggagatgttcttatgatcggtggattaaaagaaaagcttctcgcagcaaaacggcttggaattacaaaagtacttgttccaaaatcaaatgaaaaagatgtcaaagagtttgaagaggaagttgtcgaaggacttgagatcgtctatgtaaaaactatgacacaggtgatcaaagaagcatttgtacattagatcgaaggaaatagaaactggaggcagtgatgaattacgaagaagcaatgaattttatacaaaatacgagtaaatttggaagtgttttaggacttgataatatcaaagaattattagaaagacttggaaatccacaggatcagcttaaagtggttcatattgccggaaccaatggaaaaggatcaacacttgcatttcttgcaggaatcttcagagaaagtggatatcgtgcggggaggtatgtctccccggcatctttttgctacgaagagagatttcgcatcaatgaagagaacatttcgaaagaagatctgtgcttttatatggaaaaaataaagaaaatttcagatgagatggtgagagacgggatgtcacatccgacaatgtttgagattgaaacggcactcagttttctttattttctcgataaaaaagtggatgttgtgttattggaaacaggaatgggtggcagacttgatgcaacgaacgtagttaagaaaccgatcgcggtgatcattgcatcgatcggaatggaccatatgcagtttcttggagacacgatagaaaagatcgcagcagaaaaagcagggatcataaaagaaggatgtccagttatttcatataacaatcaagaatccgtaaacgaagtgatcaaggaaaaagcaaaagagatgcactgcaaggttacttttgtaaattcggaaggaatccgtgtgttaagtgaatctttaaatggggagagcttttcttatcgctcatctgatggaagatgctatgaaaagatagaaatcccgcttcttggaagacatcagatcaataatgctgccttggcattagaagcattgaatacgataagaaattattattgtatcagtgaatttcagacagaagacggattacgcaaaacaatctggagaggcaggattgagatcttagaaaaggacccactagtcatttgtgacggagcacataatccggatggagcgaaaagtctgttaaattttttacaaaataattttacaaatagacgattaatctatataatgggagtgttatcagacaaagactatgaacagatgatacagatccttacgccgatggcagcaaaagtttatacggtagcaccagataatgcgagggccttatcaagcaaagatcttgcagaatgtgtaagaaaatatcatcatgatgtagaagaaagacagagactgaaagagtgtcttgaagaggtaaaacaacaagcagataaagaagacgtgatcataatctgtggtacattatcatttcagaatgaattaaaatagaggatagaaacagtggaaagattccaaaagatcgtatggcatgagaaatacaaggagacatacgaaagactacaacaattagaaatagatcgaaagttttgcggtcatgatatagaacattttttgtcggtggcaagaatcagttatctgatgatccttgaaaaaagacttcctgtgtccaaagatatcatttatgcgactgcattgcttcatgatcttgggagagctgatcagtatgaaaagggaatttctcacgaggaagcgggagcgattcttgccgaggagatcttaacggactgtggatataccagagaagagagaaagtttatgacagatacgattttaaggcatagagatatgaaagaagaaagcgaaagttttgcatcaatcttttatcgtgcagataaactttcaagagattgtatccactgcaaagcaagacaggaatgttattggccggaagaaaagaaaaacaacaagtatatatactaggagagatgctatgattattggaaataagacatttgatacgaaacatcatggatacatcatgggaattttgaatgtgacaccagattcattttcagatggaggaaaatatgatcatttagatgcggcactaaagcatgctgatgagatggtcagagatggagcagcgatcattgatgttggaggagaatctacaagacctggatacacgttgatctctgatgaagaagagatcgcaagagtcacacctgtgatcgaagcattaaaaaaggaatttgatgtgccagtatccttagatacttataaatcaggagttgcaaaagcgggaatcgaggctggagcagatctgatcaatgacatctgggggcttaagtgggatggaactatggctgcagttttagcagaaacaggagttgcttcttgcttgatgcataaccgtaaggatacagattataaggattatttaaatgatgtggtagcagatttagatgagacgatgaagatggcaaaggaagctggaatcaagaaagaaacgatcatgctggatccaggaattggatttgccaaggatcttgatcagaatttagagcttatgaaccatctggagttattaaatcagtgggatgtaccagttcttcttggaacatctagaaaatccatgatcggtttaacgctggatcttccatcagatcagagagtagaaggaactgtggcaacaacggtcagtggatatatgaaaggatgcagatttttcagggttcacgatgttaaagaaaatatgcgtgcgatgaagatgatagaagcaatttgtgcaaaatagtccagcggtgtgatgtcaagagataaataacacaaaaaacatatatttttgtatatatctcatgaa

SEQ ID NO: 599 - DNA, 18630 bp, Unknown
  gut microbiota DNA sequence
attcttaacttaatgacattgcacaggcactgcgaatttgtaaaaaacgcactcaaaaagtgctcatgtttgcctccttgattcttttaaatatttgtgtttcttttatttctgtcacatacacctgaagtctattcaaatcattacacagtgtgtatgttttactgtattggcaataatagtatctgtctgccactgtcaaaataaaaaacgataatgtttaacatacatccacccacttaagtttttcaatcttgtaattgtccacactttagacttctggtatatgataaaaaataaagaagcaaccgacagcgcagcattggaattttgccatattttgaataaattcgcagcccaattggacgaatgtctgagcttcaaagtctattgacctgaacaaaacttcagagcgagttttcgtaggaaattgggcgaatcagcgatttgttcaaaatatgagcaaaattccaccgctgcgctgtcggttgcttctttattttttatcatatactcaaaatctacagttggccaactacaacttaaaacttctctacttcatccaagtatatacaatttggaatcccaccatctctcactttctgaatcagttcttcttgatccatccacataacctcttcgacttcttctttctgtagtttaagttttgtaatatccactgtttcttcatacatataaaccgtgctgatctcatgattcttaaattctcttccatagaagtttccattcatgcttccttcatgcatacatacttttttaagttgttctggttctgctttgatccctagttcttcttctagttctcttaatgcagtttctaatggttcatcacctgcgctgatatgacctgcggatgagatgtcgtagcagcctgggaaggagtctttttgtttgcttcgtttttggagtaacaggtcataccctttttctgtttttcttctgatccagatatgaacggttccatgtatgtctccatcttcatggaccaaagatctctctttgatctttcctgttttgtttccattttcatctaagatatcaaaaaattccaagtcttttccatctacgactgcttgcaccagatttccttcttcatataccaatttcaacgaaaaaaatgatcttctttcttgcatatagcgtaaaaataacctgtcaccttcccacagatcaaggtctaatattttttctttgtctacccattctagtactccttcatcacattctttgatctcgcctttgaattcttcgatatggtataaacacatatattcccatgcttctttttcagttcccatatcggacaaaaatgtgacgatcccacaaaatctatatgacaatggggttagtcctgtttcctccataacttcacgaaacatgcagtcttccgggctttctccatgttcaaaatgaccaccgactccgatccatttatctttattgatatcatgttctttcttgatgcgatgcagcatcagatatttgttatctttttctatatagcataatgttgtcattcccatttttatttttcctcctttcgtatattgtaattgtttcaaagaaaagatacaatattttcatatgtgtaaaatatattacacaatatcgactatgtataacaaatgcgaaatctggaggtttcttatgaatataaaatgtattgcacttgatcttgaccgtacaacattaaatgcaagtggacggctttctgacggaaattataatgctttatgtcatgcaattgaaaatggtgttcacattgtgatcgcaagtggacgttcttttgatacgctgcctaaagatgttcttgctgtgcctggaattgaatatgcaattacttctaatggtgctgccatttaccatattcctacaagcacctgtcttcatgaatataagatgacacctgcttccgttgaatgtataattcagattgctaaacagcatgagactgcccttgaagtttttattgatggcaaagcttatgccctgaaagcttatgtggaagatcctgtttcctatggtacaactccacaagcaattccttacatccaatctacaagaattcctattgatgatattatttcttttattcgagaacatattgatcatattgacagtatggatattgttgtctctggcgagcagcaaaagcagctcatttggaatgaacttaaatataattgtgatgagatctatattacttcttctgtttcgcagctgatcgagatttctcataaagatgccggaaaacattccggacttcgttttattcgggaatatttgaatctaaaacctgaagaaaccgctgcctttggtgatggtgataatgacattgatctgttaaaagaagctggtatcggaattgccatggaaaatgcttcttcaaaatgtaaggatgctgcgacctttatcacaaaacatcatgacaaggacggagttgcatatggaatcactgaatttctcaaaatatgaccaaaaaacataaattcatcattttttagacacaattctttcacatttactgagtatactaaaaccatagcaagtaacaaacaaacttacttagctaaaactttttttcatactttttcataataccggagaccctcctcgtctccggttttcctcattttataagcttatatttttgcataaaaaaaagagggaatccctcttttttatcgatcttccatctcaatatattctttctcatcttgtacactctgatacgcaggacgaatgatcttatccacatttgttaattcttccaaacgatgggcactccatccaacgattcttgccatcgcaaagatcggtgtgaacaattccaatgggatatctaacatactatacacaaatccactgtagaaatcgacatttgcactgacccctttgtaaatttttcgttcatctgcgattacttttggtgccaatgtttcaatcatagaatagagttcgaaatctttttctctttcttttgcaagggccagtttctttacaaaagctttgaaaatctgcgctcttggatctgaaatactatatactgcatgccccattccatagatcagtcctttttggtcaaatgcttctttgtgcagcagttttcttaagtattcttctacctgactttcatcactgatatcatccacattttttcttaaatcctgcatcatctcaacaactttgatattcgctcctccatgtttgggacctttcaatgatgaaagtgcagctgcgatcactgaatatgtatctgatcctgaagatgtcacgacatgggttgtaaatgttgagttatttcctcctccatgttccatatgaagaacgagtgcaatatctaacactctggcttccaattctgtataagatttgtctggacgcagcattcttaaaatattttctgccatggaacagtttggatctggacgatggatgtacaggctgtcatcattgacataatgattgtaaccatgatatccataaactgccatcatcggcaaaacactgatcaacatcagacattgtcttaatacattttccatagaaatatcagatgctttatcatcatacgatgccagtgttaaaatgctctttgtcaacgtgttcataatgtctttcgatggtgcctttaaaataacatctcttgtgaaattctttggaagtgtcatactctgtgccaaaatttctctgaattctttcaattgtttttcatccggcagttttccaaatagtaaaagataggtgatttcttcaaatccaaattcgcctctcttcataaatccatcgactaattcatatatattatatcctctataaaataactttccttcacaaggtactttctctccattgatcatctcactggattgaatacaggatatattcgtaagacctgcaagaacgccgactccatcgacatctctgagtcctcgtttcactcccagctctttgtacagatctttctctatctcacaattatcatggcagactttcgcctggcgtgtcagaaaatcctgcatctgtgttgttgtttcactcataggttacctcctttgatcaaggtcattttatagtgtttctcctattttatctttttatttgacttttgtcaaatattgatttttgttgattattgatttttattcataaagtggtatacttttagttagaaaaacatcgaaagagagggatttacattgaatgatgtttctgcactttttgaaatttttccaatctgtcagaaatttcttttaaacacgatcgacataccttccatggatcttaccaaaacacagattcttatcttatttgcactgtctggaggtcgttcattgaatatgtcacagttatcttcttatctggcatcatctaaggaacaggctacaagagccgtttctccacttgtgaaggatgagtatgtcacacgttttagaagtgatgaaaacagaaaaatggtttatgtaaaactcacagagaaaggaaaccagctgatccttcaggaaaaagcgcttgtcaaagaatacctttccaaacgttttgaatcactgtcaaaagaagatcaggaattatttcatcagtcattatctaatattttaacgatcttaaagaaaatggaataaatattttggaggtatttttatatgaaagcagacttacattgtcacaccgttttatctgatggtgctatgcgtgttgaccagatcattccttatgcgaaacgtatcggccttgattatattgcaatctctgaccacgaatcaacacattccattccggaagctgtaagacttgggaaagagcttggtgttcatgcgattcctgccgtcgaggcaaacgcatggcatgaggagacacagacgaatgttcatattttatgttattatccgatgctgtcacaaaatcttatcagtcattgatggatgaatatccgatcacgatggatcagctttatgaagtatccaaagaaagtactggtgtatactacacacatatcatgcaggttctttccatgatgggatatactggaactttatgtcctaaaaaaggacttcatcgattgatccttgcaggagagcaggcgaacaaagctttctatgaaaaacatcctaaattcaaaaaataatatttttataaggaagaatcattctttgcaggattctcaaacagaaaaatccctaatggtttagaaacctgtcagggatttttgttttaatatttttatttgatattttatttatttaagatactcttcgcaacgcttaatccattcgcagatgcctgctgtaatcctcttgttacagatgctccgtcaccgattgcgcgaagtcctttgatattagtttcaaagtctttgtttgttaagatcttatttgaatagaatttaacttctacaccgtaaagaagtgtctcatcacttgccatacctggtgttacttcatctaatgcatagatcatctcttcgatgtctttcatgattcgatatgggaatacgagtgaaagatctcctggaacagcatcttttaatgttggtgtaatgttatttcttatcagacgttcttcggttgttcttcttcctctcacaaaatccccaaatctctgtactaagatcttgccatcacaaagcatattgcttaactgtgcgatatgttttccatattgaatcggctctttaaatggttttgtaaagttcttagatactaataatgcaaagtttgtgttgtttgtcttgtattcgtctgctttgtatgcatgaccatttaccactgccagaccattttcataatattctgttgctacttctcccgatggattgctgcagaatacgcggactttatcgtcgaatgttggcgtgtaataaacaagttttgcttcataaagacttttatttaattcttccatgatctcgtctcgaacttctacacggactccgacatcaacggttcctacctgtgtttcaatgtcgtattttctgcagattccgcttagccattcagatccttctcgtcctacggctgctacgatctcatcggctgtatatgtctcacctttatctgtgacaacaccctttgcaaccccatcttcaatgatgatatctttgaccatggtatcaaagatcatatcaacaccttcatttaataaatgttcctgaagtcttgagtaaatcttgtacccttcttctgttcccaaatgtctgatcggacattcgatcagcttcaagtttgcctgaattgctttcttacggatgcttgcaatctcttccgcttcatcaattccgtatactttctcatcagctccgaattttaaataaatgtcatcggattcttttaataattcgatcgttctgtcatatcctaatatctctggaaggttccctcctacatctggagataaagataatttaccgtcggaaaatgctccagctccagcaaatcctgttgtgatagagcatggtttacatccaacacatacctttgtatttcgttttggacaggctcttctttcgatccttcgtcccttttcgatcataagaactttcatatctggcttatttctctttaattcataagcacaaaatatagcagaaggtcctgctccgatcataataacatcatactgatcactcatagtcatttctccttttccatgatgatacgttgcataccaccatattttgacatttgtcttgcttccctgtaacccgctttgacaaagtttgtccggctgtagatattatccggatgaacggttccaaggaagtattcatatatcgtgtcttctaattgtttctctgcctctttgaaaaatcttctctgaagccccaaacctcttgctttacttgtcacaactgcgtaatccatatgtgcaactttgtgtatcttatgatcgtcataattcagatcatatccaagattatgttttgactctcccggaagatcgacaataaaaaagcccaagatctcattgttacttgataaagccttcaatgtaaatccccggtctcttatgtgttcttctatatattgtctgttatctggcagaaaccaatcggaaaccttcacagtatccactgcttcttgcatcaattgcatgattgcatcgacatctgcctgctctgctctcttgatcgttatatgtttcatatacttccttacctattattctcttgattacgtattattatagcataattttcactttttttgcaaaaattatttcaataaggtatactgtttttatagtttttaaggacttttccttatacacattatttagaaaaggaatgtatatatgatcaatcgtttatgtaaaagattaaatcaaaatatcgaagtacgtcagtctttaagttccctgcgtcaggagatcaaggattcttctaaaagagaacttttgttgtcttggatccatgatggtgatctggacttatccgtatttttagaaaatgaagatgcaaaaacaagaaaaaatgctgctcttttgatcggtgatctggcacttatttctgaaagtgatgctgtatttcatgcttatcagacagaagatacacgttttgtaaaagaggcttatttaactgctttaaaatctttaaatgcggctccttatgtggatgttttccgaaaacgttatgaagaattatctctttatgaagcttctgacgatgagaaaaagcatgtagaacatgaacttcatgcactttctgaactgatcaatacgatcgaaccatttaagaagcatagatttttaggcggccgccagacatttcattgtattttccgcactaacccattacacccggaaattactgctgccttgatggaagaatcttcagctgcttcttcaaaaatgggcgtgcgtgtaaagacaaatcatctgaatcgtttattaccaatccgcacatacaatgaattgttatttcagattccaggcatggtttcatgtaaacctgatgctgatgttgctgcatccgtgatcgctggttcaaatttaatggcattattagaaaatactcatgaaggggattttcctttttatttccgaatcggagtgaaaagccgtatggcactttctgaacgttccaaatttgcgaagaaagttgcttcgaaattagaagagctgacagcacataaattaagaaattctacgtctcattatgaatttgagatccgtatgatagaaggtaaatctggggattattatttattagtgaaattaaatacgatcgttgatcgtcgttttagttaccgcgaggagttcattccaacaagtatcaaaccagtcaatgctgctttacttgtagaacttgccaaagattacatgatcccggatgcgcagattcttgatcctttctgtggagttggtacgatgctgatcgagcgtcagaaggttgtaaaagggaatacttcttatggtatcgatcattctccagaagccattgagaaagcgatctataacacaaatcttgcagaccagatcgttcattatatcaataaggattgttttacatttacccatgactatccttttgatgaaatctttacggagatgccttatgcgactggccagaagacagaagcggagattcgtgaggtttatgagaagttctttccatttgccaaaagagttcttggacctgaaggaacaatcattatgtatacaagaaaccgtgaatatgtaaaacaattcactgtaaaatccaattttagaattctgaaagaaatcaagatcacacagcggccggaaagttatcttatgatcttaaaatagttttttttaggaaatttataatacaagaaccattctgtaacatcatttatacggaatggttcttcttattttagatcgtcttatatttatttatgaaatttttgattcttcgttttccctcttccatatcttttgaaaatgctagtgcgtgtcctgctcctgaaacaatatagagttctttctttgatgcacaggcttcataatttttgatcgtcatacacatcggaacgtaatcgtctgcatctccatggataaacaacactggaatcttgtttcgtttcatgatttctgggatgctgacttctttcaatccaaatcctgctactacttcactgatcaaatctaccatgtacattaatggaaatggtggaagatgaaatctttctttggctacgtgtttgatgatatcccatggagaagtgaatccgcagtcagcaataattccttttacattgtctggaaggtccagacctgctgccattaaggttgtagcacaccccatagaaattccacatagaaaaatatctttgttcttggctgccagatgccgattggtatacaaaatccatcgtttgagatcatggcgttctttcactccataagtaatatagcgtccttcgctttttccgtggcttctctgccatggaagaagaatgctgtatccaagattccatagaaatcggacttccggtacgaattcgatatcgtttgttgaatggtaaccgtgcatgcagataatagttcctttggcattttctcttgggatgtaggctgcccgtagtattagtccgtcttttgatctgatttcttttaattcttgttcttggtgttcttttagccattcttgttcttttaaaacgtaatcaagatatggtttccatttttcttttttacggacatctggctgtttttttcttcgacagatcgcataatcgaagacagtaaatgcagatgcactgacaatagttcctgtgatcgctgttgcggttaatagtttttgtttgttgttcatatttggaccctcattttactgttcactgttttattctgtgatatctaaggttgtttcccctgtgattttgattccatgttcttttaataatctagctgtgattccgtccccattgatcagcgtgcctgtaaatgttccatcatagactttgccacagccacaagatggacttttttcttttaggatcgctgtatgacagttatataactttgcaatttttagtgtctcttcggcacctttttggtattgttttgtaacatctttgccatcttttgcgataactttgttttgatgtatttctgccggaattcttggtgttggcagtcctcccatgatctctggacagactggaattagttcatggtcttttagtaattctatgattttatcatttttgttgttttttccgttatatttgcaatcgattcctaacaggcaggcactaactaatattttcattatttttcctttcttctacaaagctaattcaaatccatagcagcttttctcgaatccgtaatgttcataaaatccgtgagcttgtactcttggcagtccagagtctaaagtgattgctttacatcctcgctcttttgccaatttctttgcataatctaataattttacaccatatcctttacctcggtcttcttcgtttgtgatcaaacttgatacatagcaggtaagccctgacatccagaaggtctgaaaataatctccatggcagaatccatgaaaagttccatcatcttctattgcaaaaaatgcaaaactgttttcgtcttgtagtactttttcatagacttctttggttgtttcatagtcgtaggtgttgtagtcccagagttttttgatgtattcataggctgtgtcgaaatctttgattgttgcatttttgatcttcatgttggtgtcctcctttgatgtctgttttttattattgtagcatgtaaaatttttctggtaaataaaaagacaggaagctgaccttctttggtctgtttcctgtcttttttttaatcttataatctctaattaatctctaaccttaatatgcacttcacgaagctgctgttctgtaatctcgtttggtgctccgcacatcagatcctgtgctgttccgctcattgggaaagcgatgatctctcggatgttttcttcgttgcgaagtaacatgatcatacggtctactcctggtgccattcctgcatgtggtggtgcaccgaactggaatgcattgtataatgctccgaatttgtcttttaatgtttctttgtcatatcctgcgatatcgaatgctttttccatgatctccatgtcatggttacgaacggctcctgatgataattctactccgttacatacgatatcatactggtatgctaagatatctaatggatctttttcatttaatgcttctaatccaccctgtggcatagagaatgggttatgtgtaaatcctaatttacccgtttcttcatcgatttcatacattgggaaatcattgatgtagcagaaacggtatgcgtctttttctaacaggtctaatctgcttcctaattcgttacggatctgtcctgcatagatgcaagcagctttttctggtgctgcgatgaagaagattgtatctccttcctgtaatccagccatttcagctaattccatcttcatatcatctggaataaatttatcgatcggtcctttgtatttcagttcttctttgacttctaaatatccaagtccacccataccaattgactgtgcgaattttaacagtttttcatgctgtcctttggaaagttttgcatgaacattgatcgcacgtactgtctgtccatggaatggtttgaatgtacatctctggaagaaatctgtcacgtcgatgattcttaatgggttacgaaggtctggtttgtcactaccaaactgcagcattgcttctttgtaactgaagattgggtatggtgcttctgtgatcacacttccttctggtgcaaatttcttaaatgtctctgttaatacttcttctccgatcttgaagacatcttcctgtgttgcaaatgccatctcgaagtctaactgatagaattctcctggagaacggtctgcacgagcatcttcatctctgaagcatggtgcgatctgatagtatttgtcgattccagataccatcagtaactgtttatactgctgtggtgcctgtggtaatgcgtaaaatttacctttgtattttcttgaaggtactacgtagtcacgagctccttctggtgatgatgcacaaaggatcggtgtctgaacttctacgaatcccatgtcttccatcttttctcttaagaaacggatgactttggaacggaataaaatgttatcttttacctttctgtttctcatatcaaggtaacgatattttaaacgaacatcttcacggatttctttacttgttgcgatctcaaatggaagatctctgtatacttttcctaagatatcgatcttgtgtgcttctaattcaatcgttcctgtaggaatcttagggttaaatgtttcttcgtctctgtgctggatcacaccttctacagataaacattcttcttttcttacatggtctaataaacttgtatctcttaatacgacctgcatcactccatacatatcgcgtaagtcgataaatgatactccaccgtggtcacggatattctctacccatccggcgatctttaattgtgctccgatgtcaccttcagaaatctggtccatggttctggtacggtacatgtctgacattttcttttctcctttttcttgtattctctatcttgcgttcaggcggttttcttagttccctgtcaccttaaaatcaggtacaaaaaaagcccgtcctgaaattgttacttcaggacgaactgtatatctctagtccgcggtaccacctgatttactgtcttgcagtctctcttgtgtgccggttaacgcccagcttacgtcgcacctactgacagggtttgaatcttgttctattcatgttctgcgttcagattgatgctcgggagtgttcttcgcataaattcactttgcaggattctcactatcgcctactcactgggaacgataatttatggtacttttctccgtctttgcctattgagtgattatattatattggggcttgtgttgtcaataggctttctatatgtatatttagatttttatttttatttgatcagttcctgatcattaaataacgcattcactgcctgttcgtaattctttagcgtctgaactttacggatcttttttgcgtatttttcgtggtttgtaaacatgaccgctgcattgttccagaattctttcatcttatagagaacatttttgtcgccgcttaggtaaccctgatatgcttcataaagtgtatcatgcattttcaggagttctcttttggtcaatttctgtccatatttgatttctcgtacaagggctggatttcttaacagacctcttccgatcatcactgcatctacatctggaaaccttgttgtgatattgtcgtagtcttcttttgttacgatgtctccattgtagcagagtggattctcgctgtggtttactgcatattcaaagacatcaaggtgtggttttcctttatagaattcctgctgtagtcttggatggatcgttagttcatagactggatggcggttgtagatgcttaagatttcttcgaattcttctgtgtctcttaatccgattcttgttttaatcgagatcttcatatctaatgcttcgaagatctctgtaaggaaatcatctaatacttctggttctcgcaggaatcctgagcctttttgtttggctacaacggttcttgacgggcagccaagatttaaattgacttcatcgtatcccagttcttttaattcttttgctgttctgataaaatcttcagaacttttcgttaaaatctgtggtacgatatgtaatccttcattatgttccggcaatacatcctgaaattctcttgttttgaatgttctttttccatttggcatgataaatggtgtgtagtatttatcgatttctccaaatagttgttcataaatgtttcggtataagtaaatcgtgatactttccattggggcataataaaatttcataataacgatcagtttcctccatttaaattatacttcttgacactcataccattatatatgatttacgaactgagggcaaaatatattacaaatactgaaatcgccaatccagactttattttttcaacaattgatgttatattagtaaacaacgagtgaaaatttgagaaacattgatacaatttatcagcgaggtatgaataatgaaagaaatgaaaccgatcaaagaaggtaaagttcgtgagatttatgacaatggtgacagcctgatcatggttgcaactgaccgtatcagctgctttgatgtcatcttaaagaatgatgtcacaaagaaaggaactgttttaacacagatgtccaaattctggtttgaccttacaaaagacatcgttcctaaccatatgatctctgttgatgtcaaagatatgcctgaattcttccaacaggaaaaatatgatggaaacagcatgatgtgtaagaaacttactatgcttccaatcgaatgtatcgttcgtggatatatcacaggaagcggttgggcaagctatcaggagaatggtaccgtctgcggaatcaaacttcctgaaggattaaaagaatctgataaacttcctgaaccaatctacacaccatctacaaaagcagaaatcggtgatcatgatgagaacatttcttttgaaagaagtattgaagttcttgagaaagaattcccaggtaaaggacaggaatacgctgaacagttacgtgataagacgattgcactttataagaaatgtgctgattatgcattagaacacggaattatcatcgcagatacgaaatttgaatttggtcttgatgaaaacggtaacatcgtcatcggagatgaaatgttaacaccagacagctctcgtttctggccagcagacgaatacgaaccaggtcatggacagccatccttcgacaaacagttcgcccgcgactggttaaagagcaacgaacacgactggaaactgcctcaggacattgttgataagacaatcgataaatatttccaggcttatgagatgcttactgggaaagatttgtaagtagtattttgttgtatggaatataaataaaagaaaaagaaagatcatgaataagcaaagtggcactccgcatttttgaaagcgttttttacaaatcgctggtccgcgcctgttccttcgataactcactggctgcgagccaaaatgcccgcagctacgttcaaacaatcgaccacaggacgctgcgaatttgtaaaaaacgcattcaaaaagtgctcatattgccacttttgcttattcatgatctttctttttcttttatttatatcccatacaacagaacactattcaaatctccacacagagaatgtatgttaaacggtattggttgataatttcagttatcgaaaccactggtaggtgtgtatgttttactgtattgacaataataatatctgtctgccactacataaattgaaaacaataacattcaacatacacacctacataagttttccaatcttataattgtcctcactttagacttctggtatatgataaaaactaaagaagcaaccgaaagcgcagcattggaattttgccatattttgaacaaattcgcagcccaattggacgaatgtctgagcgtcaaagactactggtttcagtaactttcaacgcgagttttcgtaggaaattgggcggatcagcgatttgttcaaaatgtgagcaaaattccaccgctgcgctttcggttgcttctttagtttttatcatatactcaaaatctacagttggccaactacaaatttaaaattaaaatttatcttaaaatttctcgtccagtaaacaccacaatagaccgaggtttcatcacatattcacgatcaatgcgaatctcttctccttcttgatagaagtactttcctttctcatctccataagtatccacacttaagtaccatgctccatgatttgcaaggtttggaagtgtgatctttacttcttcccaataagcattgactgctacatatacaagatcgtcttttccttttttgcggtcatatcctgcaaagcttactgccagtgtttttgcattttgtggtacttccatacgttctgcattaacatcgtgtgcatgcattgcttccattccgcaaactgcattgtccagtttcttgcggataactggatgtttttttcggtaatcgatcataaatttaaagaattcaaataaatctttattcttctctaataagctccaatcaatccatgagatttcattatcctgacagtagctgttattatttccaaacttcgtatttccgaattcatcgcctgagaagaacattggcgttccacggctgcacattaagatagcacaagcatttctgatcatgcggtaacgtaatttgagtacttccggatcttttgtatctccttccataccacaattccagcttcgattgtcatttgccccatcggtattgttccaaccatttgcctcattatgtttattattgtaagaatagagatcatacattgtaaatccatcgtgacatgtgaggaagttgatacaggaattgtatccagcgtaattactgtttccatcagagtaatatccgccatacaagtcacctgaaccacaaattctccatgcagcactgttagcttcccagaaatcaccttttagatagcctcgcatcgtatcacggtactgtccgttccattctgcccatcgtttgctggctggaaagttccctacctgatataatccacctgcatcccatgcttctgcgatcagttttacattccttaaaagtggatcataggccagactttttagtaatggtggattattcattggcattccatcttcatctcgtccaagaatgcttgcaagatcaaatcggaatccatctacacgataatgaaccgtccaatgtcttaaacattcaaggatcatctgctgtactactggatggttgcaatttagagaattcccacatccactaaaattataataattaccttctggagttaataaatagtagatattgttgtcaaatcccttaaaactgaagaatggtccattttcatttccttctgcagtgtgattaaatacaacatccagaataacttcgattccattttcatgaagttcacggatcaattcttttaattcctgtccttcattattgacttcctcagcagctgtataactggcatttggtgaaaaaaatccaaccgtattatatccccaatattcaacaagttgtttcccatccacttctcttgcgttgatcatctcgtcaaattcaaagatcggcatcaattctaccgcattgatccctaattcttttaaatatgggatcttttcttttaatcctgcaaaagttcctggatgtttgactcctgaggatgaatgatttgtaaatcctctgacatgtaactcataaatgatcagatcactcatctctctggttgactgtggctgtacaccccagtcaaaactatctcttaccactcttgcatgatacgttctggttcttttatgtccccagacttcctgtcctgcaaccgcctgagcatatggatctaacaaaacttttgttttatcaaatagtaatcctttttgttcatcatatggtccatccacacgataagcatattcaaaatcttcggatttcagatcataaacgatcatagaatagacatctccgatcttatatgattctggaaatggaatgattgcatatggttcttcttctcctggatgaaataatagcagatcacatgatgttccattgctcgtatgcactgtaaaattcactccacatgaaaattctgatgctccgtttagatcaaaaaatcctggccttactttaaaaccattgatttccatcattggctttaccattctgacatcgtctgtaatataatcattcaaaatatattgtttcaaaactatcacccgttctatcttgtttcatcatctttcttatttctattctcttagtttcctagatcgtctgtttacttaaggccgatacaaaagtaactctctgatcgatccagctgcctgtgatcgaaaccattttccccatcgtaaatgcagcaacgatcgttccaatacctaatccatctaaatatccaagcatcagacctgttaaaagcccggttgttgcaagacatagaacatcaaatgtaatcttgactcttgcatatggtttcttaatgatcgatgacagttctcttggaaataaatccgttggaatgatcggaagctggcatctgttctctaaagcaattcctatacttaataagaaataactgatcagaaaatatgcaatcctgcacggaatcgtctgtggcaggatcccgatccataattcattgacatctaataattcactaaacgcaaatcctgcaacgaagctgaataaataagatggtacaaattttcttcttaagatcatcagacttaacactaatgctccctgaaatatatatgtccatgtacctagtgataaacttttaaatacctctgaaaatgcataaggtacacttgagattgccgaaattccagaacctgaatacagcatcagtactacactaaaactattgatcacgattgctgccatcaatgcgagttctcctcttagtattggtt

SEQ ID NO: 600 - DNA, 14028 bp, Unknown
  gut microbiota DNA sequence
gctgagggagattactttcgattaatacaacaaatcaagaaaaaaattgaaaaatccaagaatttaattcaaattgctgatgaattagaagaaacacctgaaaatattgagtctttatatcattgcatcaaagatcattttactttggaaaataaagatatctataaactttataaagattgtaattagaataggatttcgatgcctgaaatcatcaatcatggaagaatacctgcagctgatctactgcaggtattcttccatgatcttctttgttttattgaccacgtatccacttccgcctcgtttcttcacgttttctgtcatggataccagttccaatgcttccctattgtttgttgctggcattatggtcacaaaccagccgatttctgttccttttgtgtctgtctgtgattgtttgatctctgcagttcctgtctttcctcgaagatctaccccttctatgttcgctgcgtgtcccgtaccagagggatctctgattacttgtcgcatagcttcatttacggtattcacagcttgtttggtaaatatagtttcctttaatacttgtttttttgatccgttttctttgaccagatacggtttcagcatattaccattattagaaaatgctgtgtagattgctgccatatgtaccgggtttaccatcattttcccctgtccatatccactgtcagctaactgaatatcggaagtaaatccttcacttccataggatgaagcgtttagtccaaatgtaaatttcagactttctccaaaacctaagttgtcaagctgatcctttaaggtatcttttcctatcttcagggctgcttttgcaaaatagatattgtcagaatagatcattgcattttgcagattatgcccattataatcgtgcaatgttgttacgtaataaccaccccagcttttatccttctgccagcgttttccactgtttccaaagtcatcatttgcacgaaatttattctggcttagtccgatcgctgctatgatcggtttgatggatgatcctggtgcaaatgttgctttaaagcgattttgcattggcagtctttgatcgctattgatcacattccatttcttctggctcattcctaagataaatgcctgtgcatcataagacggagtacttacaagtgccttgacctctcctgttgaaggattcaatgcaacatgagcacttttatcatttttatactgttcgtaaatagccttttgcaaactactgttgatcgttgttgttaaatcctttccatctgtctgagatctgaccgccagtgactgttttttctgtccattagaatcttctatgtatatctctaagccattcgtgccagaaagctgctcatcatataatttctcaagtcctgcttttccttcgccattttgcatataaccgataagatgtgctgctgcctctccaagtggatagattctcccagtttctgtggaaacaatgatccctttcacatcgagaagatcttctgaatattcttttaatttgatcaatggtacaaaagaatcatccgtcacccatttttgatcaagtttcttctgaatctcttctttggataatcctaatttctttgccgcaagttttacagaattaccgtccatcttcccaggaacaaatcctacagaatagatcttaccctgtacagcaagtgcatttccctgtgcatctttgatccttcctcttttggcatataaagtttttactctgactttgtcttctgctcctaattgcggaaaaataacggagtcatcccaatctatgcgatatctatgattttctttgacaaaatctgtacggttattataggtaataattccagcatttgtctgcatttttacgtgatatgtcacggttgttgatctcttctttgaagttacatcagcatcaatcgtttggaccccgattcccttataaatatttttatttctcttgataaattcttcttttgaaatacttttttggctttcttcattcaaaagatcgtacatcttttcatactttccatcttctgcatatgacatatattttaataatgtgtcacctggattcatcgcaatattattcttatagaataatacagctcccgcagctgcgatcaccagtgcgactcctattgctgccttctttgctatacttcttctatcttccatatgatactacctctttctgattcctaccttgatctgtattattttatttaatcgtagagatcttttctcctgttttcaaagacaggattggctgttcttatattttgaatctgttctttatctatctgtgcatagagcagctcttccttttcttctcctaaatacaatctggttccatctggtgcaaatccagtacttcttcccatgtaatgttccttactgtaatgacaacatcctaaaacatacatctcattttcaatagctcttgcccgaagaagtgtctcccactgcataaattttcctttacccttaacccatgccgctggatacaacatgacctgagttccagataatgcttcatatcttgcaagttccggaaatctgagatcataacagattccaagtccgatcacacctgcaggtgtcttaatcggtgtaaacaaacaatcccccttaagcgtattcattgattcattccatttatatgcattaaacaaatgtgtctttttataatcagacacaagttctcccaggtcattcaggattaccattgtattgtagttctttgtttcatccacagtctgttcattcatcccaaaaatgatccacatcttaaactcttttgcaagcatcttcattgcctgtacaaattcgccatgcaagctttgtgccttttttgtatagttgtgttcagcatccggataataattcatgaaatattctggaaaaatgatcataactgcctcttcttctgttgctttctttatatattgttttgctttttctatattttctctccagtttccggaagatgttgtctgtgcaaccgctattttatccatgaaattttatcccctttccagtctctagaataccatatttcgggctttttttgtaccgttattaactttctttaaattttttgtaaaaaaaaataaaaaaaattaaaaataatgcttgcatttcttaaaacattcgtatataataaatcttgcgttaaggaagcgcagtaaaaacaacataatttaagcgtgattagctcagttggtagagcacctgactcttaatcagggtgtcgagggttcgaacccctcatcgcgtactaaagcactgtttttggttgattttgtagccggggatggtgtttttcttttatttaaatcttatattgtcttgtaactgatcttggaaacgtctataatagatgatattactgattaactatcattctaagaggagcctcaaatgtcaagcaaccacaaattcgaatcgaataaaaagtattttacgatttctatctataccattgctgttatcctgatcggatgtgtgatcttccgctttataacacaatggtctaatacaagcaaactgatctctcaattatgggaaatcttatttccattttttatgggatttctgattgcctatattttaaatcccgtcgtagctttctttcaaagaaatgtatcaataaaacttttaaagaagaaatctgccaatgcacagcgtggactcgctattttgatcagttatctcgttatggttggttttatcattgtctgtctacgatttatcattccacagttatatgacagtattcgtgaactatccctgatgattcccgatatttataaatcgatcatgtcaatctttgaacattatcgtgagaacagcacagatatgtttcctggtcagattgccgatatgatcgagacaaaaacattaccaaagcttttcgaactgaccaacaatcttctgaccaatatcgtccctatgctttatgaggcttccatgtcttttgccaagggattatttaacctgtttatcgcatttattgtttctatttatatgacgatcgataaatttattttaaaaaatgctggaaaacgattggttcttgcaatctttaatgaaaatttctcttatcgtgtacttcgcactttaaaagattgtcataatattttttctggtttcattatcggaaaatccattgattctctgatcattggtttactggcttttgttgcgatgactattttaaaacttccttataccgtattgatcagtgttattatcggtgtcacaaatatgattccttattttggaccgatcattggtgcagttcccggtgcttttattctttttatcgtaagcccgacgaagtgcctgatctttattatcatggtttttgtcctacagcagtttgacggtctgatccttggacctaagatccttggagaatctaccggagttcgtccactactgattttattttccatcactgtcggtggcgcttatttcggtccacttggaatgttccttggagttccgttttttgctacagttcaatttttgatcggaaactgggtggattatcgattgtataagaagaatattaagttagaaaaagaagcttaacataataagaggattgactcatatgatattttgtgagtcaatcctcttttattgttattgattcgctatctgttctgccagatcatttaaatatacccaacggtccatcttttcattcaaagcttcttctgtctcttctttttgctgcgtaagctctgctaatttaccagaattcgttgcattttccatgatctcttcatctaactgttctattttttcctccagtttcgcgatatcatcatcgatcgtttcaaattctttttgttctttgtatgtaaacttgagcttcttttggtgttctttctggaatttctttccattgttttcttttttctctggtttacttttctcttgtttcgcaattggctttactttctccagataatccgtataaccgccttcgtactgttttaaatgaccaccttcttcaaacgcaaagatcctgtttacaatacgatcaagaaaatatcggtcatgagatactgtgatcacgattcctgcgaacgtatccagataatcttctaagatcgttaatgtctggatgtcaaggtcgttggtcggctcatcgaggatcagaacatttggtgcttccatcaatacttttaataagtagagacgtctctgttctcctccagaaagtttatcaagcggtgtgtattgaagttctggcgggaacaagaaacggtctagcatctgggatgcacttgcctgcccttttgttgtctggatatattctgcgacatttctgatataatcaatgacacggatatctcctgtcatatcttcattttcctgtgcaaaatatccgatctttacggtgtcaccgatcgtaatgtttccttcgtccggctttaagattcccatgatcatcttcatcaaagttgattttccacatccatttggtccgataaatccaatcctgtcatctcttaatacgatgtaagagaaatcattgatcagatgtttatcaccaaatcctttggaaatgtgttctaactcgatcgttgtctttccaagacggctgctgatcgaatccatctcaacattttgctgcatggatggacctttggcattcttaagttcttcaaaacgttccgttctggctctctgtctcgttcctctcgctttgattccctgtttcatccattccatttccacgcggagtaaactctggcgcttacgttctgtcgctagttccatctcttcgcgctggacttttaactctacgaatccagaatagttggtatcgtattcgtaaagctttcctttgtcgatctctacaatcttattcgttacacgatctaagaaataacggtcatgggttaccatgatcaatacacctctaaagctgtttaagaattcttccagccatagaaccatatcgttatctaagtggttggttggctcgtcaaggatcagtacttcggttggatctactaaagttcttgcgagtgcaactctcttcttctggcctccggataaatgatcgcatccttcgtcaaaatcatagattccaagctttgtaaggatcgtctttgcttcactctccgtcttccagtcctgatgttctttcccatccatcacatattcaagaatgctttgtttcttcggaaattctggattctgtggaagataagatacacggattccatttccacagataatctgtcctttgtctggctcgttgatcttggcaatgatctttaataatgtagtctttcctgtaccattgaccccgatcacaccgatcttatcgccactgtggattccaagagacacgtcatcaaaaatgactttctctccataaattttgctgatatgttcaatatttaatatattcatcttactactttgcctgatcgatcacttcgactaattcttctttggatactgctccgatcagttttgccttaacctctccatctttgatcactaaaaatgttggaactgacatgatcttgtactgtgctacgatatcaacattctgatcgatatcaagttttccgacttttacagttccttcatattcttcagctaattgtgctaccactggtgccatcatcttacaaggtccgcaccatgttgcaaacatatctactaatactggcacatcactttttaatacttcttcttcaaaattatcacttgtaaatgtatattccataataattcacctatcctttgctatttatttaaacatcgttttgcttcgtctagtgactgaaaaaattgacagacccatctgttcatacatggatgcaaatatagaaacaactggatcttgcatcgaaactttccttgtttcatgattatattaccactttttgtttattttatgcaatccttttacttggcatgacgatatgctactaaacggcagattggatttcctttggctgagaatttctcctcgtattctgtcatgacatttccttcattatattcgctgtgatgaagatcgtatgtgtgattttccaggatccatcctgcttcttctacctgctctaaggagaaatcaaataagtctttgttatctgtcttaaacatcactcttccttctggtgtcaggatattatcatatcgttctaaaaatcttgtagatgtcaatcttctctttgcatggcggtcttttggccatggatcagagaagtttaaatagatcctgtctacttcatctttatcaaacacttcttcgatattctctgcatccatacggatcaaacgaaggttgtcctgttcaaaatcttctaatttctctacagctcttactaagacacttgaatatttttcgattccaatatagtttacttctggatttcttcttgccatttctatgataaactgtccttttcccattcctacttcgatgtggatcggatgatcattttggaatacttcttcccattttcctttcatctgctctggctgctggatggaaaactgattttctatgatcgtctctctcgctcctggtacatttcttaaacgcatttatattcatctcctttgtctttttctcgaatctttgttgattatatcatagacgatgggtataataaagaaaaagtatgcgccttaaaaaggcttaggatctgcacttcaaggaggaaatgcccatggaaatcgaaagaaaatttatcgtccacaacttacctgataatctggattcttatccacactctgagatcgaacagggctatctttgcatggaacctgtgattcgtatccgcagaatgaataagcagtatttcttaactttcaagagtaaaggattgatggctagaactgagcatgaatttccacttgataaagcagcttatgagcatctgcttccgaaggtggatgggattttaatttctaagactcgttataagattccggatgaacatggatttattattgagctggatgtctttcatggagaatatgaggggcttgtaatggctgaggtggaatttcctagtgaggaagtcgctgtagagtatgaagggcctgaatggtttgatgatgaggttacgtttgattctcggtatcagaataataatttggcgaataaataattgtttgtcataatctttgacgtatataagagatataaaataaataaagggtagctaaacacgaatttcattgacggattttttacaaaacgcttgttcgcaaactttccttgcaaaactcgcttcgctcagacattgcaccaagtttgctgcgattttataaaaaatcctatgaaattctatcgtttagctaccctttatttattttatatctcttatatacgctgaaggttattgatggaaactatgtattattacaaaaaatttcttacaaaatttttctaaaaatgataatggttctattttatattatttgtctaccaaaactttacatcgttttttataacaggcgattccataatttaatattgtttcgtatccttctttttctaatttctgatcgtagtgtttttctttgatctgttttagtgccttttcgcatgctttatctagcattttgatgttttctgcgtattttacttctataatgattccgattctggcttgttctgcttcgatcatgatatcgctgtatccgtctccgctttcttggtttgaggtaatgtaccagtctgggtcgtagcttagtaagcctaggaggactccatggtagaagttttcttttttggttgtgaaggtgtctcggatgctgatggttttcattaggtagttattaaattgttcttcgattgcttctgcgtttccttcttcaaatgctttgcagaaatcttttaagcggttttcgtcttttcttgtggtttctttgaaccattcctgaatctgttcgataaagatctgtcggatggattcgtttgggattatcagagagtaagttcttccttgtggttttccctgttgggtgaggtagcctgttgcgaagagtacactccagagattctcgatcgtgctgtctagttcgttgtatgttagttctaacctgatttctttctggattgcttttccttcaattaattgttcaatttctcttcttgtctgttggtttgctttctctataaagcgttttacgatataatttccacttgtattgatccagtatggctgtggtgtcgcatctggttctacttttaatgctcggcagtgattgattacatcccatgggcagtagatatctgtgtttccaaagcgatagccgtcataccatttctttgtttgttcgaaagcttctggtactttgtaatattgtaatatttcttttacttctttgtctgtaaatccaaagtactcatcaaaatattggtctgtgatagaaaagatattgaagttatttagtcctgtaaagatgctttctctggcaattcttaagcagcctgttaatacggccatgtatagattatcatttgtttttaatgattgttctaacatgtttcgaagtaagatgatcatttcattatagtagttattctcgaacgccttgtctaatgggacatcatattcgtcgatcaatataataacttttttcccataatattcttttaaaatagaagataaaatccacagtgctgtcattaactctgtatctttcatgttatctgacattaatgatttcatctgttctttttgtttttcgcttaacttatctcctgacattcgatcgtataatcgtctggattctgctgccatgatatatttcatcatagcttttgcatcttcataatttcctgctttcgctccttttaatgaaactgagattactggaaattttccctgatattgatcgcataattctttgtcctttgaaatttcaaggccttcaaaaattgcctgatcatttcctatttcaaagaaatattttaacatactcatatttaaggattttccgaatcttcttggtcttgtgaatagattgactagaccgtgttcatttagcaattgtttgagcaggcctgttttatctacatagtaatagttttcttttatcatatcttcaaagttttcaattccgattggaagtttcttttgcatgaggttccctcctttccgcatttatcttaccttttgttcatattttactatttgattattttatatgcaactcaaaataatcttttaattttttcatagctttcataaatgttccctgtgtggcatcttctgccaaatgataatcctttaagtaaagaaagcacatacgaaaaacagaatctccgtattctcgcataagcctttctaaaattagttctgtcgacattcttttgatctcctttcatctttttagagacaatgaatttagaaaaaattacataatctgaaaagattgatggttttaatttaacaaaaaatcctgcctgacactgatttctcaatgtagacaggatttctttacatatttaaatatattcttgcttttatcttgatttatcttttaaaaagaaaaaattcaaaattacatctaatataaaaaatataagtacaaataatccccaatataccaccaaactgtcatatcctaatcccagtattctgaaaattatcttatgtactaacactgtaaataagatcaatactacattcattgctgccaataaaatacctttcatttttctctacctctttctttttttaaatcaatgattcgatctgcactttttgccatttcttcatcatgtgtaacgcatactattgtttttccttctttttttaattctttaaataaatgaataattttttccttattgcttgtatcaagatttccagttggttcatctgcaagtataatctcacatggttttaacatcgttcttgcaattgctattctttgttgttctccaccacttaattcgcaaaccttatgtcccagatattctttggatatcccaactttctctaaagattcttctaactctttttctttaaaattctttcgatacttttttgataacaacagattttcttttactgtatcattttctatcaaggcataattttgaaaaatatacccaaatacatatcttcttaaattttgaatatctttcttagaaaagctattttccccattgattgaaatactcccactatctggtttatcaatcatagaaatcatatttaaaatagtagtttttcctgccccgctctcaccaataattgcaataaattcatttttattgatttttaacgaaaaatttttcaaaactacatgatcaccaaatgatttacaaatatcttttaattcaatcatcaccattgctctccatttattattttttcatgtaaatttttcttacttaaataatcatactctaactttgtaacaataatttctatgatacatgctataatcataaaataccatactactacattatgttttataatatatactactgcagttgtgcacaaattaatgcctataaaaactagaatgatttcttttattgacgacatatagccatatccccataaagcttctaataataatctttgttgttttgaaaaataatatccactaactgctattgttataaatactatggaacaaagtataactgctaataaaattgcactctgccacattactttctgtcgaataatcacaagattactggctgcctgtccataaatatttgtcacagagttaaattgataaatgcctaacttttgttctaatgcttctacttttcgatacgcataaccttgttttttagaattatcctcaaaataaatgctacctgaaactgtatctcctgcatacatagatgcaatacaagatgaatccaccccgcctgtataaatgactgctattggatctataatctgatttttcccatttcctgtatctgaatcatatgtaaaataagattgattcgttttcacatatataatatgaatagatagtttatcttttttcaacatattttttggtttattcatattttttctaaaataattatctattgtaaccttttggaaatagaaattttctttataattttttacgatttttttttcatatttcttatactgttctggcactaaaatattaagagtattttgatcgtaatcaatcaattttgaaatggatttcccattacatgtttgtattggatttcgctttaaataattttcatctatttgaatacttcttcctgctggtgaataaatttgctcttctttatctccagcatactcaaattcgtacctctgatttcctcttccatccgattccttttcataattatctgagtttataagaaatattttgagtttatcttttgatttttgataaaatttttctaactcatcattaatatttcttgcttccaaagaatcttctaccactgaagaatcatatccttgaaaattaattgtataaatattttttgtcttattccaataactcaaagtatgttgtttatctttcaatcgttgtgcatcatttgttgcattacttaaagttaacaatacaactataaatacgctagtcaacactatataagatatttttttgatttgattaaaaaagcccgttttttccccttctgatatatacttttcaagagataatatcatacaatttattataattgccaacagaaaaattataatacttatcaataaatttaccaaaatacatgtagacatatattctattattttttgtattccttcaaacttccatccaactccaatccatatcattaaccatatcatctcattgaatatccaaaatcttatgatatctttatttatcttccatataattgatgctttcgaatatccccaatatttcattaaagctattttctttctcgaatatatataatagacactaaatcctagcaataaaaataaaacactaaatcctaacaaatacaacacagaaagattatttattgattgccatttttgttgattggtatatatttttacaataccatattgggataatccctgttctaatttctgctctattgctctcgtcgtatgatctataaaaaatgtgtttccatatcctacattcttcaaatctttaaatggatacacatttattttccatgtcgtatatggaaacttcatatttaaaacttcttgttgatttgttgtataaatagataattccttttcattaaggaattcatatttcataattgttacatgatattgatttgcaaactttaaaagttctttatgaacttctgatacattcacaagttcttgttgtctggcttgaacttctaccactctcttatggaaaatcttatctgtcatgcgataatcactgaaaattgcaaacccaaaaacattcatgcctatcaatacaatgctatataagatgcaaacaatctttttgcttttcatttcacagttttctcctaaaaaataattactgtaacctttttgtatataggctgcagtaattattttatatttctattatttagttgcccatttagccttatttccagttaatgtctgaaaaattcttcttgtagctcgtgttccttttgggacccatgcactagcataccatttagaagaatttgaatttttcactaccactctatgtgtataataatcattatcaaaatgtgcagcaaatttttcaccttcccaagttacccaaaaatagcctctattagcgttaggtttacttggacgaccttttaataatttatttgatgctgtatcacctgacacaccataaatcacatcatgtaatgatttatcaccattatttaaatactggtctaaattaatttcctgctcttgttcagctgtgttctcttttgttgtacttgcatatgtatctgcatatgttataccaactagtccgaaacatgcgcagaaacaaaatgctattaatgctaatttttttgtcataatgctctccttatat

SEQ ID NO: 601 - DNA, 34368 bp, Unknown
  gut microbiota DNA sequence
accaatacatagccccatcttccgccacttctctattaaacccaacatccaacaataaattcaactgtgtacttccaagagcctccaacaaactaggattcgtaccgcccacctcatgtccatgaaaatatccatatgcatcttctctaattttctttaataactcctgatcataaactgttccaacaaacttgattcttttatccttttcaaatccggttttttcgcgcaattcctcatagaatttattctgctctacattcgtaattaacacaaaatctttatctgtatcagaattcataaattcacgaaccatagtctcataattattttctggaacaaatcgtccaacaactaaataaaattccttaggcttcacattgaatttcttataccaatcaacgagcttttgatcatcatcttttaaatttgattttgctatatcagctccataagcaataaatgtagtattcggagtatactgcttatattcttcctgtatatatttttcaatattcatagaatcacaaattaataattctgcatgttttaccataagcttttctgaaattttccagtatttttttatcaatccattccattttgctcttagccattcatgcccgtctggatttacatataaatgtgctcctagtttatccatttgctttttaaaatgacctataaatggtcctattctacatgctaaaacataaataactgcatcttgaatattatgtgcttttatatatccaatacaccatttcaatgctgcaatatcataataaactgccttggctggcccaacatctggcactgtaacattaaagcatttagccccattatgtttaaatctttttctttttgcattcatacaagctacataatattgtatagattcatctttttgatattcagttaacttttcaacaaaagtttcaaatcctccatattgggctggaattcctttagatcctattataaatacatgttttttttcagaactcatcttctacctaaccttatcttataatcttttaccttgctccatcgctatgcaacacaacttgaactgtcttcaagataatctcaatatctctcttcaaagaccagttcttaatatattctacatccatagaaacaatttcttcaaagtccgtaatatcactacgtccacttacctgccatactccagttaatccaggagtcatacttaatcgacgtttgtgatatccttcatactgctcgaattcatctaccgttggcggtcttgtcccaacaaggctcatatcaccttttagtacattccaaaactgcggcaattcatccaagcttgtcttacgaataaacttcccaatctttgtgattcttggatcatctgtcatcttaaacatcagaccatccatttcattttgttccatcaattctttttttcgttcctctgcatctgcatacatagaccgaaatttatagattttaaaaatacgtccatttcgcccaactctcttctgtgaaaagaatagtggtcctggcgattctaatttaatcattggtcctaagacaatcgttacaactgctgtaatcagtaatccaacgattcctcccagaatatccatcaaacgtttcagtacaatcatatgtaatggaatctctctttgtgcaaatgtgattgttggatacttaccgattcgattaagatacttacttccactttctacatctaattcatataaattgatatgtaaatcaactgtaattcccatctcctcaaatcgttgcactaatttttgaatctgttcatctggctcttctggaatcagaataaacacttcgtctactacctctctgattgcatattgaagcattgtattcctgtttgcgacaattggaatatccataactttctgtcctgtcaaatctttgtctgtaatgataatccctgtcacccatagattccatgtcttttccttgataatacttcttaccacttcatccattcgatctgacgttgttacaatcaacatctttcttgtgatcgaattatatggtcgatactttaaaatataccatcgataaatcatatgtgatatctgcatccaccaaaaactaaatatcattgttgtaagataaataaatctcgaataatctcttgcatcatcaatcaaatatgcaaccgtcgccatcaatgcagctgtaatcaaatttgttttgaaatttgcccaaaattctttccaaaattttcttttaaaaaaattctgatttggatcaattgccaaatacacgatcgttaacacaaaaatagcaactaaccaacgataaatcactcgattatcttgcgcccataccccatagatatccggataaaacctaatatgtgacattaaaaaatatccaattgtaattccaaacacatcacctatatatatgatcagattttgtatttgtgaacgttttactcccatactctttgttcctttgttttattaatcctaatttctttttgctttctttgttaaatctacaagatagagcacaaaaaatactcctgctacaactacaaatccaccaactgcacctacggctaaaaatttctttgtgctaactgtctgttctgcctttatcttagatggctgatctgcgatcactagtttatttcttcccaaatctttctgtactactttctgaaatactggcaaaacttcttttgaaatcttcttcacatcatctttatcatctgattttaccttaatctcgagcaatcttgttccatccacaacttctgctgaaattgcctctttcacatcatctttcgcaattttcgttttcttcgcaatctcattcacaatcagatcagttttaattaatttctgataatcatacgccagatccccagcattatccctgatcaacaccttatccgatgtcttaggcacagtaacatatacctgcatcttagagctatactctgtctttcctttcaccttcgcatacccaaatccagctccagcgaatactaccattcctatcaaaataaacacccactttgacagaatatatttacacatatccaataaatctacctcgatcaaatcgactctttccttctggctcataacccttctctccttttgattctttttctctatattttctgcctgtctccttggcatatatcctttattttaacatatatataacataattactacatttctgtaacttttcttttcatcttactttcttctctggtattcttttgctgtcttcacgatctgaaagactctttctgtgtccattttgctttcgcagagcattctgatccgttctcctagccatgtaactaatttatctcttcttgatgttgtgataaatggtgatcgttgtaataattcattaaattcttcctcaagtcctatcagtttttggaattcataccgctctatattctgaatcaaagcgatctgttcttcatgatatttacagaatggttttgattcattgagtggcaatgttttgatcttattttcgctgattcctgcaaatactgatgttcctgagtcaaagattggtgctgctttttctatctgcagtgtatttacattacggatcatcccaaagttattataatgcctgtctctgttacagatgataagatccagaatcaacatatcgtccagactttctgttatatcaactcccatctcctgacagcattccttgtaatgttgatagtatgaatggtgattgatcttcttttttatcttcataaacatatttgcagtaatcaattctgtatcaggtgttataaagttatcacaagcggaaaatgcatgatcttcttgataaccacattgatactttacgtaattcttaatatctaatctatcacatatcatattcgccaagacttcatttaatggttcttgttgtgactctccactccctgatttcaacaacactcttctttgattctgaatcacccatttttttctaagccatccgtcagatgtattatctggtgacataaaatcgccgctaaattgtcctccaaacaaagcacttcccacatcttctgaaaacggattctcaaaaaaattgatatctttccattgtatttttgagtgatctggccggatccaatattgatcgcttaatgataatccatagcttttctccagaagttcttttgatgaatcaattcccatattctcaagtgcttctttgatccctgtgcggcttgccggtatagatcgtccatgccaccaatgatttaaagtcttgacatcaattcctgttttagttcgtgttccaatcggaagatactcttcattccacgtatctgttatacgcaagattgtccccatctgtgtttcaaaatcgataacggggttattcttattcatcaatgtgtaaatcatgggcacaccttctttctataactatgggcatagttttctttttattataccacaaaccataacacccaaaaagagacaacacatatcttcatctgctgtctcttttcttatggtttctattcttaccagaactttgtatttgttgtaatataatccactttctgtgcaatataatctgcgactctttctgtatcgtccacagtccaaagtcctacattcactcctccatctttgaatgccttgatgtctgagagcgaaatcttatcacaatttgcatccaattcaatcttacgtttcttgtaataattgatcattccctgatctggattgtttgttacatgctgtaattttacatttgtggatgttgttgcattatcgtctaagacttttctcatctgtaccattgtttcaaaatcataggcaataaacatatattccttattccccataatctgattggttaatgcatacagatcttccatgttgttctttgtcactgcctgcattcgagagtcattggttgtttcatttccgtattctacgaattccatcttgatctcaataactggtaccatattgtacttcttgcatgttgttaaataatcttctaatgttgcaactgtcgttgctgattttacattcttatattttgaaatgttatttccagatttaatcgtcagtttctgaatctctgataatgtcatatcttctggtttcttatcaactccgcataatctcttgaatgtcaggtcgtgctgcagaatgaatttcttgtcttttgtcatacggacatctgtttctgctccccagaatcctgctccacccgccaattcataggctttgatcgtattctctggtgcttcgacacttaatccgcggtgtgcgataaacttggcactgttttttgtgatcggtgctacaacagttactttgtaactgtttttcttctttgatccatcggctgctgttgctgtaatcgttgctgttccgactttctttcctgttacaactccacttgtgctgactgttgccacacttgtgctagaagatttgtatgttacctttttatttgctgcgtaagttggtattacgatcgctggattgctgaccgttttccctttctgtacggctacgcttgcttttgcaaatgtgatcgctgtcactttctgttttttcactgtgactttgcatgttactttctttgatttttttgattttacgtaacatgtgatggttgcttttcctgctttgacaggtgtgacaactccttttgcactgactttggcaatcttcttattacttgttttccatctaagtttcgctttagatgcttttgctggtgtgatcttcactgcaaatctctttgcatttccaacatacattgtctttgtatatgctgaccatttgatctttgatactttcgttgctgcggatactggaatcaggcttgtcataagaaatacacctaagatagtgatcactgtgaatttctttaatcctgcctgtatcattttttttacgtttttcatagttcctcccactcatttaacatttttgtaatatttgtctaagggctattttatcatgttttttgtatttttaccagtatctctccttattttaatgttgatttaatagcttttttctgtacttttcaaagtacaatctatatatccccagtccgatccatgccaccagactgatccctgcccctatttttaatcctggtgtttcataatctaatttgacactttgtgttccttttttcattatgatccccataaacatcccgtttgccttataaatctttgtgcgatttccattgactgttgctttccatcctttggagtatggaatcgttacacacagaatctgatcttttttcgcatgatagactcctctgaaatgatttccttcgtattggatctgtttcattgagttcttcttgcgttcctttaatctggcaagaacatcttttttaggaactgtgatcaaactgatatcatcaaattcatattcacctggagacaagaaatttaatcttactttttcttttgccttgcttgtctgatgattaatctttacgatgtaatcttttcttccaaaatagtatggattgaaggtgctttgaatatgaattttctgttgtacatcattttgtgtcacaaggattccttttgtcccctttcttccagtcaatatgaagttatcgtctccatttttctttccatggtaaacgagatttttaaaatagagataagtttccttgtctttctctactggcaccgtaatatccgcatatttctttccttttggagatgagattcttgtctctggcaatgagatcgtctgtatatcaggattgtttctttgttcgttatgttgaatctctttgtctgccggatgctgatccaatatgatctgtgcaagcattgcctgttccttgccgattccatttaactgttcgtattgctgctctgtcatataagaatcatatgcatatgcaaatggcagtgcatatttattcttatataatgtgatatttccttttttattttgtttctcaactccgtatggtacatcccccttggaacttacgtcttttgcaacctgactgttatgtgctactgttatgtattttacaccagctaatgacagaagtcccagtctttgatcgactcctttatatttatctgcatactgcattcccagcgtatcatatcctttgatcgtatctgtcacacattttgctgtgatactgtaatatccgctgatcgtattcaaatggttgatcagtccataatttttatatcgatatccctctgcatgtactcgataaacagatggatcatttaccttactcagcatacggatattatcttccttcaatgttcgatatgcttgtccctgatccataaattcctgtgtataagcatatccttttggatcgaatctgtaatatccatgcactcccactgatatcaggagcaagattgccatgctcactcgcacaattctcttctgtgcatcatagccaagtctttgaaagatcaacaatagaatataaaatactacaattaatccacaggctgccatgatccctttattcttcaggatttcttctcctgatgcatttacaatgatacaaaatacagtatatatgatgattcctgctccgatcccgatctgctgtcgttttgacatcacaaatagacgtggatacatttctgctgtcaacaatgccacaataaagctcagtgcaaatgcccaccggttgtttgcataggaaaacccattaaatgcatatccaaaaattgggagaatcaaagcaatgatacttgctataaatgccgctctgtattttttatgtttcattcgctgtgaaaacagtgtaaataatacaacgatcccaacgatcggcagatatcctgcgttcgtattgctgcccatatttccgtatccaataaagttttcaataaacagcagataatatttccctgggtatacgatcaatgatttccagtcaacccccttgccgtaacggccatttcctaggaatcctataacggatggcagtaaaatcactgctgccattgcaattccaagtgtataatacattccaaacttcaagattgccaggaaaaagtttttcatcttgttttcttcggtatattcataaaaacggatccacgcatagattaccgcaaatatcgtcagcatatataaaaaataataattgctcattgctgatacgcagactgcgaaaataaatacatacggtctttctctctgatagatcttctcaatcccaagacataacagcggaaaataaatcatcggattgatgaagaatggatggcgcagtcctagtcgaaagcaaaatccgctaaatacatagaccagtgccccaatcacagttccataacttcgttttttcatttttcttgcatacatgataaacgtgatccctgccagatacattcgtaacacgatcatgaaattatacatagtttctgtattctttggcgaaacaaatccgtagaggaggtttaacggatcaccgatcgcatagtaattcaatgttgagaggatatctgcaccatacccaagactcatatcccacatcacaagttttgggtgtcccgccagaagattacggaaaaattctcttagtgcttccccataatatgctaatgctgaaaaatgctggcttaatccgtcttctactcctgctccccatacaaagctttttccttcggtaaaaaatggcagaaatgccacgatacacatcagtaaaaacatcagtgtatagactccatagcaatactttctttgttcttttatcattatacttttcctttaccctttacccttttttgttcattatcacgcttagtataccacattttggattgaaaattcctgaaaaatgtcttaagatattggatgtatgtacattttagaatattttatatctatcggaggtaatatgatatgttaaatttgataaagaaattatataatgattcgcgaattcgttatttgttttttggtggattgacaaccctcgttaatcttggaatgtttgctttattaaaaggaccatgtggaattgattataagatcagcaactttttctctgttgcgatcgcgatctgttttgcatttgttgtaaataagctatatgtatttcagtctaaatctgaatccttcgcagatacgattcatgaattcatcaagtttgttctcggtcgtcttgtaaccatggctgtcgaagtgggcggagtccctttctgtgttgagatccttcatcagccacagatgatcgccaagttagaaacacaagttattgttacaatcgtcaattattttatcagtaaatttcttgttttcaaatctcaaaaaaaatgattccctgtatcacataaaatccctgagatcagatattcatctcatccgatctcagggatttgtattgttattctttggatttgatcacttctgagataatgtatctcggacgcatcttcacttcatcataaatcttcgcaatataatatccgatcacacctaagctgaacatcaaaatgcttccaaccaacagtaacaacaagattactgttgtgaatcctgcaactgcatgtccagaaaaatacatataaagcgattgtattccaagtagtactgcaaatacgaagaatacaacgccaaaaaatgtgacaatctgcattggtgcggcgctaaatgatgtgatattattcactgcatatcgtactaatgatttgaatgaccatttggattctcctgcttctcgttcctgcacatcaaattctacgtatgttgtcttgaatcctacccaggatgacaatgcacggaaaaatacatttcgttctggaagtttcagaaattcttctgctgcttgtcgatccatcaacttaaaatcggatgctctggacatatcgattcctgttgcatcactgataatactgtaaaatgtttttgcaaacatcttgtgaatgaaactttctcttcctctggatgctttcactccctcgatcacctgatatccgtcttcccataaatgatacatctttataagtgtttctggcggatgctgaagatcacagtccattactgcaatacagtctccctctgcctgtgcgattcctgcaaaaacggctccttcttttccaaaatttctggaaaagcagactcctttgatatgtgctctttcttccttgagttctaagatcttctcccatgtatgatctttagatccgtcatttacgaatactaattcatatgggatctgttctttctcaagcaggtctcctaccacctgtgctgttttcttgatcatctgttcttcgttataagctggaagaacaaccgataacatcttatccattgtaaatatctctccttatattttattctaccgtgatctttgcactgacgttcttctcaatcgacatattcttgatctttgtcagctgaacctgtaccgtatgcgttccgggttcgtacagctgcatgtcaatctttggatttaaatccttcactacaactttatctactacagagcgcaatccgctgatcttcacctttaactctgagtcatcaaatttgacatcataattcttcgtattattgatcaatgcgatctgttctgtcggaatcgtcaatgtacgtttcgtcttcttctcgatatttgcacggatcacgatattcttgatcttatctacagattttacaaatgtaataccatctggcagtttaatatcggacgctttgatcgttttttcaatactctttgtactatcactgatatctaaattcgccagtttgatactgctgatcttctccagatcatcttcagctccagtaatttctatatgttttggttcataatcaatgcttccaagtacatatcccttgcccggcgttccttttgtttccactgtaaatggtattgtcttcgttcttgataatccaatctttactttaatcttggtcgtatcaagtttgatgcggtcctgacttacttcatctccgtcttcatcataacacttgacattctgagccattgtcacatctttcttcaatccggatacatctactttcgctacgatctgtttgatcctgcttaccacactctttggcccagatacagagatcagattcggcgttgctgtctgcgtgcttaccgtatatccactcgctggtgttcctttcaccacaacattgactggtatctggtcactcttcacatcttccaatacgactttgactgttgcaccacctgtatcaatatctaactgactcttgtatcgtaaagcctcaacttcgatctggattgcatgaacatctgacatagaagatacatctgccgttgcacggaaatctgactttgtcaaacgatctacaacatctttctttcccttcacagtaaagcttacggtatctccagattcaatcttataagtctgattaagatcgtctaaaacctgttcattcagcatatcaaccggtacatcgctgaaagtcttcttgatgaccgggttatcggtgttgataacaaacatccaaagtagaaaggcaaaaacaacagaaattatttttaaaagcagatcactttccattctttttttcatttcgattccgccccttccatagtttgaatttcttattctgtcctttttcttctctcaggacagccagttcatctctcaatctctgtggatccagatgtctgatgatctttccatcccttgcgatagaaatatcaccagtttcttcggatacgatcacagtgatactgtctgaaacttcactgatccctactgctgctctgtgtctggtacccatttcctttccaatctctacactatcgcttaatggaagatagcaggttgctgacacgatcctgttgttgtgaatgatcaccgcgccatcatggagtggtgtattgtgttcaaagatattgatcagaagctggctgctgaccttcgcatcaattggaattcctgtacgctcatactctccaagtgctacttctctttgcagtacgatcagtgctcctgtctttacctttcccatctcaatcgctgctcttgatatctcttgcagagttcttgctgtatattccagttcttcctgacggctatctgtagagaaaatatcagtcacccagttctttcttccaagctgttccaatgcgcttcggagttctggctggaagacgatcaaaatcgctgtgattcccacactcattgtattggaaagaatccatgaaactgtatgtaattgcagtaaatatgccgcaaatgcaatacaaagcaagataatgatcccttttaataatacccaggctcttgttgtttttatccatttgacgatcagatagatcataacactgacgatcagaatatctacaatgtcattcagaccgatcttcggaatcgatgtccaatatatatatttttcaagtccatcaaaaaatttactcaaatttcctctcccttttctttgtcctgttctttatgttcttgtttatgttcttttctttttaaactaaatctatgtgatggtaccgtgatctgtgtaacattaaattcttcttcttccacagtcactttcggtatcgctcttacataataatagtattcttcatcttcaaattcaaatgtttcttctctggtatagtcgatcacattgtataaaaactgtatgatcagggcgatcgcaatgcttcctatgatcgttccgatctgtgatgtgatattgatctcattgttaaccagatatcctcctatgaacatgcagatcagatatacaactcctcctgcaaggattgaaatattccatccatgcgctgctccccgcttgcgaattgctgttacgagtgctgtcaccagacagaataccacaaaatacaaaagcagatccttattatcgatcgctcttgccgcgatcagactgtagaccttcccatgtgctgatcctgatgccagctggttcattgtctgctgaaggatattggacagataatagatcactgttcccattaagatcgctggaagtcctgcaattccacaaaacatcccaacaaagatcggtaaacatgcaggcagttgaaaataaaagaagattggcaccatcatcagataaatccttgtctctggaaaaactctctgatatacaagaaaatataatacaactaccagtgcaaaaaataatgtcacttctaacgatacatgaagtaactctaagaatataacgacataaaagatcagcgataatgctgatattggaataaaaacactgatcactcccatcataaagataaaaaatggctgtgaaaaggtctctgtatatccaaacaatttccctaatacataaaataaaacagttcctccaaggaatctcatccctgattgaatatatcttcctctcgccgtgaggaatttcaaaaatcgttctctatatatcaataatttttccatcttcgtcttcctcctcgactatcgttggactaatgtcttcattctctttttccttatataatgtttctagttcttctaaatgcttgtcatagatcagtacccttgcccttacctcatcatactgcctggatgctcgcatcttcgtaaaatgcaggtagacaaaaaataccgcaacataaattcctatgatcacagccgcagatactataactttaccttctctcagcttcatgatcacaatatctaactgcatgatacacaacaatcctgtcatgatcagaaatgagatcaacaaggcaatgcttgtcttgatcttctccgatctgacataatctttcttggtatatttgtaaatacggaaatcaccttttccataattcttctcatacttggccatctcagccataatctttactttctcttctgaaatcatatgctttcacctgctttttcagtcttatttttattatagcatggaatatagcaaaaaaaaaggaggtatgaaaactcatacctcctaaatcaattcttcttatccgaagtatctctttaataatccttcaaatgctttaccatgacgtgcttcgtctcttgccatctcatgaactgtatcatggattgcatctaagtttgctgctttcgcacgttttgcaaggtcaaatttaccttctgttgctccatgttctgcatctacacgcatctctaagttcttctttgtgctgtctgttacaacttcacctaataactcagcaaattttgctgcatgttctgcttcttcgtatgctgctttctcccagtataatccgatctctggatatccttctctgtgagctactcttgccattgcaaggtacattcctacttcagaacattctccttcgaagtttgctcttagatcagctaagatatcttcgctgacacctttggcaacacctactacgtgttctgctgcccattctttttctccttctacctgctctttgaatttatctgctggtactccacactgtggacatttctctggtggctgttctccttcgtgtacatatccgcatactgtacaaatccatttcttcataattcttgttctcctttatactttatatgatcatttatgttgctttgcctttcggcttagtatcttttgtttaaaacagtaatggttactatttttaacttgtctttatattaccatcacattttacttttgtcaatgattttttaaacaatttttgcagattcctttaaaataaacaatattctgtgtaatctttccaggaaagttctcacttgcgatctcatttaacttctcatcgatcggtgccatctccaaatcgatgactgctccacattcctgacacacaaaatgatagtgtggatcggtgcatgcatcgtaatggtctgctcctccttcgtaagatagctttagtatttcccctcgctcacttaataatgcaagatttcgatagactgttccaagactgatcttaggaaactcttctttgatgttcatatataccatatcggcagttggatggtctttgcgagtcattaaaaactttatgatggcatctctttgcttgctttttttcgttgctggctgcataacctcttcctttcctctttaattcaaataataactgttactgtttttagtatatatatttttatacattatgtcaaccatttcgaagaaaattgtataaatttatatacacaaagcagacaggtatttgatttcctgtctgctttgtgcatttttaaaacttagggagtataaccaaagtgtcagttttagctctggaatactttatgtggattcaagatattctttggatcaaatgctttcttaattccactcattaactcaattgtttctagatcaagagattctctcaaatatggtttcttcgcaaatccgattccatgttctccggatacttttccacctaactgtgcagctttctcgtagatcttctccattgctgctgccattcgtttttcaaattcttcctggcttaagtcatcttttaagatataagaatgaaggtttccatctcctgcatgtccgaaactcttgatacgtatatctacttcattatgtaagttatgaaggtattctaccatttcattgactttatttcttggtacgaccatgtctacttcatccatatcagttgtagatcctttgatcgcttcaaggaaggctcctctggctttccagatagattcttctctttcttctgtatctgagatcagtacgtcaagtgctcctgcctctaaacaaagttttgcaactttatcataatctgcttcaatctcttctgttgaattgccgtcaaatttgagcagaaggtacgcatcggattgggaatctgggaattttttacctaggtactcttctgcatcaatgatgacctccctctgcataaactcaatggcagttgggattgctttggacttgataatgagaggtactgtgtcaattgcttcttttaaggttttaaatggtatcagtaaactaattgcctttttaggcagagggagtaattttaatgtggcttttgtgataaagcctaaggttccttcggaaccgatcatcaggtcttttaaggaatatccggaactgttttttacaacctttcctccaaattccacgatctttccatttggaaggacaacttcaagacctctgacataatctctggtcacgccatattttacagcacgcataccaccggcatttgtactgatatttccaccgatcgttgcggatttctctcctggatctggtgggtagaagaaatcatgatcttccacgtaggcagcaagtcccattaataaaactcctggttctacggtgatcgttaagttttcttcatcaagttctaatatatgattcatgaggcttgaatcgatcatgatcccgtgttcgatcgctacggaagatcctaccagaccggttccagctcctcttggtgtgaccggaatattattttcatatgcatatttcatgatctcagagatttcttctgcagaagttgcttttactacaacatctgggtagctttgtgctcctcctaattcatcatgactgtattcttcgttgatattttctgcatataaaattctttcatcgtcttttatgatatttttgataacttctaaatcagcttgatcaaatttcttataactcatatctcttacgcccctttcgcagctttaatcttctcgatcagttttggtacgatatcatagacatctcctaccagacaataatgtgctgtcttaaagatcggtgctttttcatcggaattaatggatacgatgcagtcagagtgatccattccagctacaaactgaatggctcctgatacaccacaggtaatgatcagtttcgggcgtacggttcttccacttaatcctacctgacattttgcttctacccatcctgcttctgcaagtggtcttgtgcaggctacctgtccgtctaacagttctgctaattctctgatcattgcaaggtcttcttctttcttgattcctcgtcctgcaacgactaaaacatcggcagattcgataaacttctctggctctttctttacaatatctaatacatccacatgtgctttgatcttttctttatcgatcgcacatgaaatgatctctccatgtgtttcttctgttctttctggtgcattcatgactttgtatcttaccgttgccatctgtggacggttatttggtgttaagatatgtgccatgatgtttccaccaaatgctggtctgatctgagaaaggtctgtattctcatccatctcaagaatcgtacagtctgctgttaatcctgtcttcattcttgcagctacccttggtgccaactgtcttccgactgttgttgctcctgtcaggatcgcacatggctgatgtttcttgatgaaatcttcaaatacagatgtataagattctattttgaatcttgctaactctgggaagtcgtaaacaaatactttgtcaactccgtagtgtaataattcttctgccttatctgaaatgttatttcccataaataaagcatagactggatgattgatcttacttgccagctctcgtgcttttccgatcaattcgtatgttactggatgaatttctccatcaacatgatcgacataaacagcgattccgttccactgactcttatcaatttcttcttttttctcatcttctacatattctactgctccagctggtcctttcttcacacataatttacacatcttacatgcggcattgatagaaagttttccgtctttttcttccatcgcaccgaatggacaaatatcaaccagaacctgtggatcttctactttttcctgatgtattactaattttggcattctcatttcccccttttagataaatttcatatctgtgatcatatggaataatttgtctgcgacttcacttccgtctccgtcccatacttcatgatggtcattcgctgttggagggaaaattcgttttacctgtgttggtgaaccatttaatccataatgtgtttcgtctttgtcttccatatcatctaaggaatatacttcaatttcacggtctgcggtatccatcttctttacataggatggaagtcttggctggaaaatgtctttatctacggataacaaacatggatactgaactttagcaatctccagttcttccggcagatccatctcgatcgtgatcgcatcggattctactttagatatcttctttacatttgatacacttgggatatttaaccattcagatacttcggaaccaacctgtgctgtgtcaccatcagttgtctgttttccacataggatcaggtcaaaatctcccatcttcttgattccctgtgcgatcgtataacttgttgccagtacatcggctccaccaaatcttcggtctgataataatgctccacggtcaactcccatggcaaatgcttctctgatcactgtcattgcctgtggtggtcccatactgatgacactgatcgttccacctacttcttctctgatcttaagcgctgtctctaacgcatacagatcatatggattcatctttgaatcggctccgtttcttaacagcacaccggttactggatcaacttccactttattagatgccggtacctgtttgatacatactaaaatgtccattgctattcctcctcattcctaagactttctatcctttatcttaagctcttccgctctgaattggtactaccaattttgtttgaaaaaaatttggatgtttttcgcatccattgtttttgtcttattggtactaccaatttatgtttttattatatatacattgtctacttttgtaaagtactatttgacatttttcttttttttgttaatcttgcataaaaaagaagagccaaaatggctctttccttaaagttctttgtgaataatgttatcaatcatatcaaaatgtttcatcaatgctttctgtccattgaccacatctctctttaataaacattcgacaatctgcttatgtgcttcctgtaacattccttttcgcttctcagttcttaagatttctcgacgcatttcaaaaatgaagatatccatcacttcagataatgcatctaagatattcacgatcagaacattgcctgatgctttcgcgatcgcataatggatcttcttatcgtacattgtcttctcatcgttatctgtactctgatctaatgcattcacatattcttgtaattctatgatgtcttttgtctctgcattcttcactgcaagtgcatatgcctgcatctccagtccgatacggatctggttgatctgatcataatcaagcttatcaagcataaacatcatagaaagggcatctaccatatatcccttaaaatttcctgatatataatttcctgctccttgtctacttgagaccactcccatgacagttaagatcttcaacgcttcacgaacggaattcctgctgactccaatcttctctgagatctctctctctggtggaagtccttgtccaagaacaagttcctgattcatgatctgctctttgatactatctatgacaatctcataggctttctttgttttctccatattaacattccattctgtctattactttttttcttaatcacataataggtaacattataccagattcacttttttttgaaaaccccttgcaatatcctttgaatagttgtagtatgtaagaaagttagatgtggtttttaatactatgtattgaattttataacactagaatgattggaggttttaccatgaaacataaattaaaagatccaggaagtgcaattacccatttgatcggaatgatcctggccgcgatcgtttccattccattgatcatcaagagctttttaagcggtgattatgtacgcattatctctttgatcatatttactataagtatgattggtctttatggtgcaagtactgcttatcactcttttaatatttcaccaacgatcaataagaagttaaagaaacttgaccatgcaatgatctttgttctgatcgctggttcttacacaccgatctgtacgatcgttcttggtggcacgcttggatatggacttttatccgtaatctggatcatagcgatccttggtatcgtatttaagatgttctgggtaacttgtccgaagtgggtatcttctgtcatgtatatcgcaatgggatggctttgtatcgttgcgatcgcaccgatcatccatagtttatccaagacatcttttggatggctgcttgctggcggtatcatttatacagttggtggtgtgatctatgcactaaagattccttggttcgaaaatcactggaagaattttggtctgcatgagatctttcatctgtttgttatgggtggaagtttatgccatatgatcttaatgttccagatttaatttttgctcctgttggtagttttctattaacaggagtttttcctttctggtaagacgtttgatctttgcttctttactcattgcttcctgctttgtatcaaattcttcaagatacacaagttctactggccctcgtcctcttgtatattttgcaccttttccttcattatgcatcttcaggcgatgtttgatatcgttagtccatcctgtgtataaactgttatcactgcattttaatatgtacgttacattcttcatctgtcttatcctctgtctatctgtatattgatccagccctgatcttcattttctttgaagaaaggctgtcagatgttctctgaccgcctttcctctacatcaaccagatatgttatggctgttattttctcactttattttattccagatattttaaagggtctacactttttttatctttttccatctgaaaatagagattcgttccttctaatgtgtaataacttgtcggctctgcgacttttgcaataacttctcctgcattgaccattgttccttcttttactctgatatctttaagctgtccgtataatacggtatattcatttccaagatccatcaataccgtttgtccatattctgctgattttttaatttctcttacctttgccttacggactgccttcacctcgtctccttcttttgcttcgatcaggattcctttgttgatacggtactggtcaagagattcaaaatagatggttgaatttacactgtatggaagaatgatattgcctttgatcggccatgtcagtttggatgtaccattatacgtaacactttcactcatggtacgtttcatttgtgccgttgtctctgtttctttcttgtcttgcgttgttgtttttgttttttcctgtgttgcgctgttattagctccaatcgattcttcttccaggctgacttcctgttttgcctgatctctcctctggcggaatgtagcactgtagtacgccatgattccaagaaagaatacgaatcctatgatcattgccccatagtatttgcgcagcggaaatgggttttgtttgttattttttctcattttcatcacctcaaacatagttttgcccatttccatctgtttattcatatagtttttgaatcattgtttttggatagtaatattttaatattttttgataggtttttccttgctttgccatctgatctgcaccatactggcttagtcctaatccatttccctttccgagacagatgatccttaaatttcctttatattgttcaaaataaaaattattggatgccagttgcagccatcttgcaaaatcttctccggaaatgatatatgatccggccttgatctgtttgacatatccattctttgttaccgttaaaagtctcagatttttttgtaattgttgtatggtgattttctttttcatgtgttcttctagtataatctgcatcctttgatatgaaattgtcttaattgacatataatctttggattcgatatcacttaaactttctttctgtcttagataaggaatctttttcccgaaccattcacttgcatctaatgtcatccccacactcactgcatgaaaatatggttcgatcaatgttcctttgtatgtgatcacctttccgatcgtttctttgactgctttttttcgtttctgatccatgatctcataggcacgatcacccagtttacttttatattgttcgtctttgtacagctgatatggtatgctttccatctttatcttctttgatctgcccattttccggatcagatctgtccttaagatcacagcctggcatttgatcgtttcttcttcttgatccatggaaatctgtcctgggaggatttttaaaaggtaactttccaaatcaatatcttggtccttgtcttgtattttatatccactgtcatagttttcaaacgaaatatttttcttgttttctttattgatatatatcgtaataatatatggaatcgttgttaacaaaaaaaataaaaataatatatatgtcattttgtacctcattccaatcctccttttgtccgtcttactattttatgttacaatagaaaaaaatatgaaaggactcttatattttatgaaaagatatgattttacaattacatctgaccgtggacttcacgcacagcctgtagctgctcttgcaagtatcgcatgtaaaagtgcttcttgtgttacactagaatatgatggaggagaaatcgatgtatccaatgcgatccatctaatgtctgcttgtatctcctacaatgataaagtaaatctgatcgtttctggatctgacgaggatgaaacaatggagaaattaaaggaaatcgtcacttcacaacttttataagaatactgttcgtttttgtcagattatgttatactgaagttgttatagggcagcttatcctgacccttctatttttatgttgaaaaggagtattcaatggatataaatcatcttaccttgctcacagatctttatgaattaaccatgatgcaaggatattttaaaacagggaatgatgaaactgtagtttttgatgttttttaccgtaataatccttctggaagtggctatgcgatcacttgcggactcgatcaggtcattgattatatcaaaaacttatctttttcatatgatgatattgattatcttcgtaatcaagggatttttgatgaagattttctggaatatcttgctggatatcattttacaggagatatttatgcgatcgcggaaggaactgttgtattcccaagagaaccgcttctgaaagtgaaagcacctatcatggaggcacagcttgtagaaactgcgctccttaatatcatcaatcatcaaagtctgatcgctacgaaggcttctcgtgtagtttatgctgctggtggaagtggtgttatggaattcggacttcgacgtgctcagggacctgacgctggtacttatggtgcccgtgctgccgtgatcggtggttgtgatggtacttcgaatgtacttgctggtaaatgttttgatattccgatccttggaactcatgcacacagctggatcatgagttttgatgacgaatatcatgctttccgtgcctatgcagatctttatccagattcctgcactttacttgttgacacttatgacactcttcgttctggtgttccaaatgcgatccgtgtatttgaagaattaagagcagaaggtcatatgccaaagcactatggaatccgtttagacagtggggatcttgcttatcttacaaagaaagcccgtatcatgcttgatgaagcaggttttcctgatgcagtgatcgctgcttctggagaccttgatgagaatctgatcacaagcttaaaatctcagggtgcaccgatcacttcatggggtgttggtacaaaactgatcacttctgcagattgtcctgcatttggaggtgtctataaacttgctgcctctaaaccaaaaggtgctgatgaatttactgctaagatcaagatttctgagaatcctgcaaagatcacaaatcctggaaataaaacgatttatcgtatctacggaaaggaagatggaaagatccgtggtgatctgatctgtcttgtcggggaacattatgatgaatctgacgatctgacaatctttgatcctcaggctacttggaagaagtctacacttgctggtggtacttatacaatgcgtgaacttttagttccaatctttatcaaaggtcaatgtgtttacaagagtccttctgttatggacatccgttcctattgtaaggatgaactaaacacattatgggatgaaagcagacgtcttgtgaatccacaggaagtatatgtcgatctttccatgcctctttacaaattaaagaatgaattgcttgatgcaaatcacaaaaaataaaatcatttatagaagggagaacgatcatgattcgtttttttgcagatattatttatctgttctttttcctgacattaaccgcaccgctttatccattgtttgatcattggaacaaaaccggaaaagctcataaacgttcatccatagcacaacgcatgatcttacgatcttttaagatctgtcttgctatggctggtacaaaattaattgttgatggccaggaaaacataccagaagatggtgctgttttatatgttggaaatcatagcagttattatgatattttatgcagctacgttgctactgaacgtggaatgggattttttgccaagaaagaaatggaaaagattccttgtctatcccactggatgcgttttatcaactgcctgtttttagatcgtaagaatatcaaagctggacttgctactatgaatgaaggtacaaaacttttgaaagatggtttttccattgcgatcttcccagaaggtaccagaagtcaggatgaagatcctcatgagttcaaagaaggaagtttacgtcctgctctgaaagctggtgttcctgtaattccgatggcaatttcaggtactgctgatatcttagagaataacagacgttttcaggtaaaaccaacgactgttcatattacttttggacagccaatctatcctgatcagcttgaaagagctgagaaaaagcatctcggtgctacaattcgtgaagaaattatcgaaatgcgaaaaaaacataagacaagttaaggaaaaaatgctataatagttaagatattcaaatgtatatattaggaggagaagataatatgagtgtatggacagttatccttattattgcggtaattgctgcgatcattcttggtgttctgtattttgttggtagaaagatgcaggcaaaacaggaagatcagcgtgcgcagttagatcagatggcacagacagtgaatatgcttgtcatagataagaagcgaatgaagatcatggaagctggatttcctaagatggtaactgataacattccgaaacgtgctaagatgtctaaggtaccagttgttaaagcaaagattggaccaaagatcactccattattgtgtgatgaggcaatcttcgatgacgttcctgtaaaggctgagatcaaagctgttgtcagtggtatttatatcacatccatcaagaatcttcgtaatgttgcaccacctgaacctgaaaaacgtggtctgcgtgcaaaacttactaagaagagtgctgaatttatgcgtaagaattaatttcttattattgtataagaatctaaaatgcaaaataccggaaacttatcatttgaaagtttccggtattttttgttgtaaaatattcttttattttctttcctgaatcttaacgatgacatatcctttttccgttgaaatataaccgatcttgagatactgaccgtctttcttgatatatccaccctgtgtcgatggtctgtggtaaccaaacttcttaataaatttatcaccataggaaaaatgaacacccttgatatcaaagctttcttcttccatatcttcctgatcttctccaccactggatgctggtataaaattctctacatatccttcaacactcttgtaatttccttgcttatatgcttggatcacctgcacatatccaaaacagaatctaagtgctgcgatcgcacagattacaagacacactgcagctaacaacttaaaaaatggtttccgtgaacataagagcagtaatactcctataattcctaaaatagcaaatggaatgacccatcttgcttgtatcgtaaaattgctggcttcatataatagtttcatatattcaagcctcccttccatactctttccactccatgtgaaagtattacttaattcagatttgttatcgttgcatcgcaatattctaagactttcgaaaattccatatctccaccaaataagtctaaggcacttccgatcgtcacatcaatcttatcatttccatagtttttcagcaattccagatcgtcaaaattcttaactccacctgcatatgtgactttattgccattatatcgagctaataattgcacgagttcctgatcgatcccctgtgcttttccttctacatcaactccatgaatcagatattcatcacaccatgattccagtttgtgcagaagttctatggttaattcttcttccgtaaacttctgccagcggtctgttgtgatatagtatttgtcatctctctttcgacaactaaggtcaagtaccagatgttctcttcctacctgttcttttagagcatccagtctgtcataatgaacctttccacctgcaaatacaaaagatgttacgatcacatgtgatgcgccagattcaatgaattctttggcattctcatctgtgatccctccaccgatctgaagacccccttcaaatgctttcaacgcctttaatgcctgtaccttatcttcttcgtagtacttcgaatctctggcattcagcatgatgatatgtccaccattcaaatgattctctttatataattttccataaaatgtaccatctttttcggatacaaaattctctgttgcaaaatctccctgatcaagaagacttcctcctacaatctgtttgatcttgccattgtgaatgtcaatgcatggtctaaatctcatcttttcttaccatctcctgtttattctgtcatctctaataagtcaaatgcttctccacttggatctgctttaaataccattttctcacctgttgttggatgttcaaatgcgatccgtgctgcaaatagaccgatctctttgtatttcttctttgtcttttgatagatcggattatactttgtatctccccagattccaaatcctctgcttgatgtctgaacacggatctgatggtgacggcctgtctctaaatggatcagacaatacgtgtatttcatcttggaatcttccatcatatcaataacttcatagtcaaggatcgcttctttggctcctggcgttccttctttgacaattttggatacattattcttcggatcttttaataaataatccctgaatgtcccttcgtcgtcaggcagccatccggtcaatactgcctgatagtctttctcaaaagtatgatctttgatctgttctgtcagagatgcagctgccttcttggttcttgcaaataccattaccccgccaactggacggtctaagcggtgaactaaataaagctgtggctccccatctgtattttcctcaaaaaacagttgatttttaagctgatgcaaaagatccatgtcccccgtcttgtcactggaaacggggattccttttggcttctcacagacaacgatctggtcatctttatatatgatatttatctttttattctttctcataaaaatctcctacatcttgaaacgatatccaacaccccatattgtctcgatatattgaggttttgctgtgttaacttcgatcttctccctgatcttcttgatatgaaccgtaacggttgcgatatctcctaaagattccatatcccagatcttattaaataattcttccttggtaaagactctgtttggatgtcctgcaaggaatgttaaaagatcaaattctttcgttgtaaagactttttcctctccatttaagtatacacgtcttgcagtcttatcaatcttcaatccacggatctcaatgatatcattgacttccatctgattatttacaagacgctgataacgattcagatgtgccttcactcttgctacaagttcacttggactaaatggctttgtgatataatcatctgcaccaagtcctaaccctcgaatcttatcgatatcttcttttcttgcagataccataaggatcggaatttcttttgcttctcgaatctgcttacagatctcaaatccatcaactccaggtaacatgatatctaaaatgatcatatcaaaatcattttttaaagccttctcaagtccctgctgtccatctgtttcgatttctacttcaaaagaacttaattccagataatctttctctaattctgcaattgaaagttcgtcttctacgattaatactttgctcatgttatttctcctttgactgatcgattactttatttagtgtaaagaatattgtcgttccagcacgcagcttactctctgcccagatctcaccgccatgttcttcgatgatcttcttacaaatagataatccaagaccacttccacctgctgaatttctcgacatatctgcacgataggttcttctaaaaatatgtggaagatcttctttggaaattccgattccattgtccttgatcgctacctgtacctttcggtcatattctgttaacgtaattcctacttttccttttgctttgttattgtatttgcatgcattattgataatattgtttatcactctcttaagctgttccggatctgctgttaccatgacattggctgcacagtaattgcgataagagaacatcatgcctctttgctcaaggtctgctccgatctcatcgacacagtctttaaaatacgaattgatgttgatcttctcaaaattatacggaatgatattcgaatcgatcttagagtataatgataattcattgatcaatacattcatatcatttgccttgttatagaccgtcttaatgtaacgatccatcttctcaggtgtatcggctacaccatccataattccttctacatatcctttgattgctgtgatcggcgtctttaggtcatgggaaatgttactgatcaaatctctgttttgcttctcataaacaattcttgcatcgatagagtctttcaattctgccctcatctcattaaatgcattgcacaattccctgatctcttctccaccactgttgatcactacatcgttgtcaagatttccttccttgatacgttctgcacctgcttttaattcacggatcggtccgacgaattcacgatacataaaccatgataaaaaggtacttgttaagatcagtacccctatcacagcgcaagatacctgaataataatattgcgataatgtggaagtactgttccaagatctgtcatgataaaaacagatccttgtccgccatcattgtatttaaagtcctgctgttttacaagatagtttcctggtctgctgacaaaaaagccacggtctgcatcactgtctttattcccataggatggaagtttatgaattaatttatcagatacttttttcttccctatatattggatctgaccatttttacggacgatcagataggaatccttcgcttttaaacgttcattgagatcatttaaatactgttcattgtcaaagatttgtggatctttccttacgtgatcttctaattcaaagaaaatttcctgtgtctcggtattcatcgtctttaatggattcacaaatcgttcaaaagaccctgctgagaggtctgccttgttgattcttgaataccctatactcaaaccagcgatcgatactatcatcacaaagattggtagcacgatcgctggtaaatagatcaaccgaactttatttactgctttcatcccattaactctcctttggtattaatatctattattataccatagtcatacgaagaaaccagaatttgatcgattattttatttaatttttagaaacgataaaatcaagaagtgcatctgcaacttcttcttttgtcatctttggaagctgcttttcttcatcctttgtgatcagtgtgatcacgtttgtatctgtgttgaatccagctccctgttcctttaagttattggctgcgatcatgtcgatctttttcttctctagtttagctctagagttttctaacatgttctgtgtttccatggaaaaaccacataagaactgaccttcttttttattctctccaagtgtctttaaaatatcttttgtccttaccagttcaatcgccatatctccgtcttttttcttgactttctgatcgctgacattcgctggtgtataatctgcaacagctgcagatttgatgatgatatcttgttcatcgcttctgcttatcactgcatcgtacatatcctgtgcactcacgatcggaacaacatctacaaacatcggaggttcgattgctgtctttcctgtgactaacgtaacatccgctccacgaagcatcgccatcttagcgatcgcatatcccatcttccctgaggaatgattggaaatataacgtactggatcgattgcttcgatcgttggccctgctgtcacaaggactttcttgccttttaagtctttttctttggcgatcactctctcaagatgtgcaaccagcacttcttctgaaggcatctttcctgcaccacttgttccacatgccagatgtccattcgcaggctctacgatctcatatccaaatcttcttagtttatcaagattatcctgcaagatcggattattatacatctttgtattcatcgctggtgagatgatcactggtttgttacatgccattacggttgttgataacatatcatctgcgattccatttgcgatcttaccaatgatattcgctgaagctggtgcgatcagcatcgcatctgctttgtctgtcagtgatacatgcgctacatgaaactgaaaattacggtcaaatgtttctacaagacattttgtattggtcaaactttcaaatgcgatcgggttgatgaaatttgttgcattcttcgtcatgactacgtgaacttcgcatccacgtttcactaacatactcgctacatttgccatcttataagctgcaatacttcctgtcacacccaatactatcgtttttccttttaacatgatctttctcctacatatcttctaaacgtccatgtctttcatagtttgtgcaacgggaaatctgattctcatcatctacaaatacaacttttggttcaaatgtttttgcttcttctggtgtcatatctgcatatgcgataatgatgatcttatctcctgttgccacgcaacgtgctgcaggtccgtttaagcagatcatcccacttcctggctctcctggaattgtatatgtctcgaaacggcttccgttgttcacatctacgatatgtacgtgttcatattctaagattcctgctgcttctaataatacaggatcgactgtgatacttcctacataatctaattctgcctgttttacggttgctctatgaatttttccttttaacatgctgatgttcatttttctttctccttaagtctattcgttaatcagtgtattgtcaatgagtcttgtctttccaatgtaaactgccatagctaacatacatgttccttccagtttctcaactggtgccatagataaagcatcaactgcttctacataatcaatcttggcaagtggttctgtctcaatgtttttcttcattgcttctacgactttgtttgcatctttttctgtcttggcaagttcttttcctaatgctaccgtcttagaaaggatcagtgctgcttttctttcttcaggagaaagatatgtatttcttgaactctttgcaagtccgtcttcttcacgaacgatcggacatccaacgatctcgatatccatatttaagtcacgtaccatacgtttgatcactgctaactgctgtccgtctttctgtccaaaatatgcgtggtctggtgttacgatattaaataatttatttacaaccgtacatacgcctctgaaatgaattggacgagtttttccacaaagtccttctgtaagtcctgtcatgtccacaaaagaacagaaatctttttcatacatttcttctgcttctggatggaagatcaggtctactcctgcactttcacataatgctgcatcatggtctaaatctcttggatatgttgcaaggtcctctgttggtccaaactgcattggatttacgaaaatacttacaacgactttatcgttaccttttcttgctgcatccatcagacttttgtgtccttcatgaagatatcccatcgttggcacgaaacctacgcttagtccttgtttcttccactcttttacctgttctctgacttctttgactgttcctacgattttcattactaaaactccttcttcccattatacgtgggaatctatttatataaattatgtcctttttattgtctgtttttgatcttaatataatttttcaatgacatcatcactgatcgcatatgtattttctggtccagggaaagttccttctttgactgcattgatatagtctttgactgctccctgcatcacttctccaacttgtgcaaactgttttacaaattttggtacaaagtttccatacattgctaacatgtcctgataaactaatacctgtccatcacattcagcacttgctccgattccgatcgttggaatatgtactttctttgtgatgatcgctgctaatttctcaggaattccttctaaaacgagcataaatgctcccgctttctcaactgcctgtgcagcttcgatcagttcttttgctgcctcctcgctttttccctgcactctgaatccaccaaacatattagatgactgtggtgtcagtccaatgtgggcacatactggaatctgtgcattcacgattgcttcgatctgtggacatacattttttccaccttctaattttactgctgtacaacctgtttctttcatgattcgtccagcatttgctaccgcatcatatacagatgtgtgataagataaaaatggcatgtcgacaacgatcatagcgttttttgcccctcttacaacggctgctccatgatggatcatatcatcaacagttacaggaatcgttgaatcatatccaagcataaccattccaagagaatctccaaccaacatcgtgtcaattccagcttcgtcaaataattttgcagtggaataatcatatgctgtcagcattgtgatcttttctccattatccttcatcttctgtactgtgcttactgttgttttcatttttcttcctccaatacatgtttcatgtctgcataagaaatatcaggatgtcgcatctgcgcaagttttatgatctcttttgtcagggcactataagtttcctttgtctcctgatccaaggcattcagatgtttctgcactgttttgatatcatggcgttccactgggcctgtcagtgcatcatatgttccaacatcaaatatattgttcatgttcgtaactgtcagcggtttcaatgccttcagtgctgcatcttcatcaaatccgcactccataagcagtcttttggcctgattgatcagtccgaccgcaagattcgatgcaaacacagctgctgcatgatattttggtttatcttcgctttttaatctcacgatgtgatttggacacgcagataacagatccatgatctcttctatgtgttcttcatttccttccacactgaatagagcctgtgataaatcttcgtatgcagtttttttacttttaaatggaaacattggatgaatagagtaaccgtacgctccggtttcttcaattccagaaagaacagctgatcctaatgatccgctgcaatgacaaataaactttccttgtatcggataagttttgactagttcccagactgcggctattgcatcgtctggtactgttaaaaatagaacatcactctttgttaatattttatcaattgaggttgtaaatatcttctgagtctgtttttccgttccacttacctttgcttgtgtacgggtgtaacaccctgtgacgggtatattgttgtgtacaaagtaatcataaagagagcagcctactttccccgctccgataaatcctactttcatacatgtatcacctgctttcctgcgggtgatgttctatgttatgctgatttgccggtatgatttctttcgagaataccatccagatgttaactataacacccgtaccattaaatatcaagtataaaattctgaatttcc

SEQ ID NO: 602 - DNA, 1931 bp, Unknown
  gut microbiota DNA sequence
ttcccgacaatgaagagcatgggagccgcaaagaatgaagctaataatgctgcacagtctgcgccggttgaaaaaacagtggaaaaagcaatcgctgaagtgaaagaaacatatgatttctctaatgtagaagtggaaccattattcaaagatatggttgattttgacacattcagcaagtcagatttccgtgctgtaaaggtaaaagaatgtgaagcagttccaaaatctaagaagcttctgaagttcgtattagacgacggaagtggcgtagatcgtgtgattttaagcggaattcacgattactatgagcctgaattcttagtaggaaagacattacttgcaattacaaaccttccaccacgtaagatgatgggaattgattcttgcggtatgattatctccgctacacatcttgtagaaggaagagaaggactcaatgttttgattcttgatgataagattccggcaggagcaaaactgtactaagtgagtaaaaatacttcgcaatttgacaacaaaaattttctttgacaacaatttgacaacaaatttgtattccaacatgaatcatcatgaagaatggtgattagttgtcagtaatactactctaacaatatagattgttgagggcactttttgaaagaaaaatctttcagagagtgccctttttttattcattaacaatgtccgttgtggttgagtaaaagctgaaaggagaaacagatttgaaaacagaaaatatgtactataaccaacagaaacgttcagaggtaaaagaagaagcccgtcgacttagaagaaaatttcttcgttatcaacaagcagaaatcgtatatagcctgtcacataaaaagttgatggaacttgcaaatgatgcgggtgcgatttacagaatggatggaatcgttttgataaacagagaaatctttgatgaatatcttgaacaatttcatgaaaaataagatgacaaatcggagaaaggaatttagttgagatgcatggaaaggtatggatgttttctaatcttattgatgatgaagatatagaatttatgcaacatgaatttataagttataaacaagctatggattattacgagcttggatataagccaatcgtaagattatcgcataaggcaggagcagtttataagattgggaaaaaagttctaattaagcgaagtacatttgaaaaatatctgcgagaaaatatcagaagggagaaagaagaatgggaaaggtaatttcagtagcaaaccagaaaggcggagttgcaaaaagtacaacaaccttaaatcttggagtaggattagcgagaaatggaaagaaagtattgttaatcgatgcggatccacagggaagtttgacagctagtcttggatatgtagaaccggacgatattggaactacacttgcaactattatgatgaatattatcaatgacgaggaaattgctgaggaagaaggcattttacatcatgaggaacaattggatctcctaccggccaatattgagttatctgctctggaagtaaccatgagtaatgtaatgagcagagaactgatcatgaaggaatatattgatacgatgcgatcacgatacgattatattttgattgattgtatgccgagtttaggcatgatgactatcaatgctttagtagcttctgatacggttctgatacctgtacaagctgcatatctgccggttaaaggacttcaacagttgatcaggactatttctatggtaaagaagagattgaaccggaagctgacgatacagggaattcttttgacaatggtggattttcgtactaattacgccaaagatattgcttccagagtgagagaaacttatggatctaagatttctatctttgaaaatgtcattccactatcagttaaggtagctgaagcaagtgcggaagg

SEQ ID NO: 603 - DNA, 20067 bp, Unknown
  gut microbiota DNA sequence
ggatttcataaaataacgataaataaaataacttatcaaatgttccatatatgactcatcgattccttgttctttgatcatgcatggcattggttccatcttgcaaaacatcttctgaatctttggctccataaaatctaattcctgatatatagatatccagtttttgatatatgtttcttctcgcatttgacttaatatatgattcttctttataggatcatttttccatgtattcagaatctcacccgtttggttcaaatgatcctggattccctgcaccacatcaaatatctgttctattctttgttccactgggttttctttctttttcagcaaatccaatatccataattgaatttctaaaactgattcatcaaagtcatccgttgactctgtattcgttccctgaatctggcataatccaaattcctttgtctcaaacatcagccgtgtagcttcttcgcatgccattccaagacctgtctggcgaatatttccatattcattatgaaatctcggatgctgtgtacatatctcacacaaagcgtcttctcctaattcaatataaatatcacataaatttttctgattcaaaaacacacagcggtcgcgatcatcaagatgaaatgctggagtgccttcatgatcaatgcctttcatcagcctgtcacgaaattctcctttaacattctgatattttttataggacttagaatcgatcatgatctcccatccaatgcagcaactatctttgcatttatctgcaatgcactgaaaatccttataataatcaggaatatattctttcatcttatcctccaaaatattttcattcttatgaaacttttatctgatgttccagccgcatccaatctgcaactgctgcaataaattgtgaatttgtcggacgttcctgtccttccatcacaaatgttccaaaaatctcttttaaaagttcttgatttcctttgatccatacaatatcgatcgcatggcggatcgcccgttcaacactactggtcgttgttttacatttctttgcaatctcagggtataataattttgtaatataatttatacgattgcagtcttctatcgccattagaatcgcatatttcatataacggcaccctttaatatgtgcaggcacccctaaattcctaaccaaaaagctaatctgccttcgaacatcattcgttccacacatgctacacattctttttgatcgtccatgcaatgctttctcatttttttgaatatcattatttactgaacgtatccgtatcatctgtgaaattctctctgcaagaattcctgcctgaaacggtttcatcatacaataatcaacttttaaccgtctgatacactccatcagatctctattttcgagcattgttaatgcaataaatgctggaattttatctggttctatcaattccctgcatttttcgattacaccaattccgtcaatctctgaaagcatcagatcaataactacaagatcaggttttaattttataatatcatccaatgtatccaccccattatctcttactgatattacattatattttcctgataattctttctttaattgttctgcctcatccggataactgtctgcaattaaaactctatgtctttcatccatattttctccttcagacaatctccctgtattcgtccatatgcatcttatattatctcatcatcatcttaagatgcattcatatgataatcgagtcttagtttatccgcgatcaatgcaataaactctgaatttgtcggctttccctttccagaacttatcgtataaccaaacatttcttccagcaattcaacttttccacgactccatgccacctcaatcgcatgccgaatcgccctctctacgctgcttgatgtcgttttgtattttttcgcaattgttggatataataactttgtaatataattcatcatattaatatcctcaattgccatgataattccctctctaatatactgatacccctttatatgagccggaattccaagatctcttatgatctttgtcacatcctgtttcatatgaaattcatgatcgatcactgttctttgatcatttttcttaaaattattttctgtttctttctgaatgattttctgatccaatcctttgatttttgcaacttgtttgatcctgcggcacagtacctcattcttaaatggtctcatcatacaataatcaatgtccatatgattgacgcattcgatcaatttctcggtaccgatcgatgttaaaacaataaatactggtaattgttcatattccatacattctctgcatttttcgatcaccccgactccatcgatatatggcagcatgatatcaattaagacaacttctggtttctttctaatgatctcatcaactgctttcattccatcgaatactgttccaacaatatcaaactctctattcagttcattttctaactcctctgcttctgatacgtccccatccacaattaaaatatttaacttcttttccaactttttcaacctcctgatcatgattatgatgtcttatgctgttatttttcctcgatcagtacttcatctccatattccaggcgtattttatccgcgatcaatgcaataaactctgaattcgtaggttttccttttcctgcatgaatcgtatagccaaacaatgcatcgatcgtgtccatatttcctcttccccaggcaacctcgatcgcatgtctgatcgctcgttctaccctgcttggtgtcgtatcaaacttctgtgcgattgacggatacagctgttttgttatggaatttaaaatatccatatcacagactgccatcatgatcgaatctcttaagtactgataacctttgatatgagccggaaccccgatctcatgaatcatattcgttatgatgatctccaactggttttctgtcaatccatgaatcttctctggtacagaaacgaatggtctttcaggaatctgctgttttatctttgcctgcttgatctgcttaatgatcgttcttagatcaaacggctttaaaataaaataagatgctcctaattccatagcctcttcgcagacattttcctgccccattgcggagaccataataatgatcggtcttttacttagatcttctgtttgcaaacgttctaatacaccaattccatcgagtttcggcataatgatatccagtaatacaacatccggttgtttttccttgatgatacgcaatgcttcttctccatcatccgcacttgcgattacttcaatatcactttcctgctctaacagttctgtcatcatctcaacagttctctggttgtcatctgcaatagccacattaatcttgttcatcttcagtcctcccattctgtttttctctacaaattaattatatatttgatttaagtttacaaacaacccatatttcttcgcaagttttggttgatttccaaaggattcgacataattcgacaaaattaattctattttttaaaatctatgtcatatttcgctgcgtaaattgttaaatatacaatttctcacttcgatgattccatatgacatccagtaactctgttgttgtcacaacaatctgatctgctttggcatgcatcagctcctctctgttctcaaatctgtacaatgttctaatgtttgacagattattttctttctttcctagtatatcatgtcttcgacttcctgtcataaaaatttgcaattcctttttatttcactttacttcctgcatgatctttataaacttcaatcttttgatcgatctgatctttcaattcatcgacatgtgaaattatgccaaccagcttatttccttccaaagacagtgaatttatgatctgcatcgccttatttaaagaatccgcatctaaagtaccgaatccctcatcaataaagatcgtatcaacctgtatcccgccttttttgttctggatcacatcacttaatcctaacgcaagagataatgctgctttaaatgattctcctccagataatgatcttacatttcttctttttcctgtccattcatcgagaatctccaattccagaccagaagatcctttgtttatatcattttcttcttttcgaagcagataatatctttgttcactcataacagacaaccgttcattggctgctgccaagatcagatcaaaatatactgactgcacaaaacgttcaaatgaaatctttgtctttcctttttgttctccatttgctgtatctgacagatcttttaacagtgtatagttcatttctgcttctttatactcttccatctttttgtccataaatcttatcgattgttcgtttacagagatatgttgatttaattgttccagattctgattttgtttttgtatttcttttttcatctgatgaagttttgtttcaaattttctaaaatctgaaatttcttcgttcatctctttctgttcttccaactgttttgtaacactcgaaagtgtattttctttttcttcaatggccgctttgatatgaactccctgtatttcaacactttcttttttcttttctatttcttctttattaaatttcatctgatcgatctcatcagataatcgctgctgttctttactggcatctttatatgttttatattcaagattcttacagatttcttctattctggcttctgtctgcttatataaactatctttttcatgtgattttccggcaatttcctgcagtttttccacatagttcaattgtctttctttggatttttcaacttttactctttgttctgctatcttttctttctgttttttgattctttcaaattctttttttacttttttatattgtcgtaaagagatttcatagatctcgtcaagtttttcaaactcttctgatcttttcccactttttttgcaaagctgttctttacatgtctcaacaatacctttactctgttttacttttgcaaatgcagtattatattgctgatcgatcaattccgtttcttcacgaagtgcacgaagcatctcctgcgtaatatcactttctttaaaatctgctgtttttggatgatgtaatgatccacaaaccggacatggatgaccgtctatcagatttcttgccaaaagtcctgcttgattacagtcatatcgatcctgccagtctgacaatcgatctctgtattcttttctttgcattctgatcttatcatagacttctccagcctcttcataaatccgaagtttctcaaaataagcttctttctccttacacagttcatgatttttttctgtctgaacatgaagtttcaattcttctttttgcaaatgatcgtattgtgtttcaatctcatctgcctgtctaagaaattctagcagttttaattctctttgtctttcgttctcttttttttgctccgtttcttcctgctgtctgatcatacgttctttcgcattctttaaagattccttttttttctctaatgcttccagctctttatattgttttatctgtttttgtagttcttgaaaccttaattcctttttatgtagtttcggcagttccttttggatctgatcatattcttttttgatcgctcgctgttctgctttattttctttttcttgtactataagttctttaatttcttcttttacatctttgatcttctgtctcttctccgttatctgtgaaaaaacaatccgttgcttctgatatagttcttcttgtgtttctttttgtttctggaaattctcatattcttgttgttttcgatactgatatctttttactacatccataaattctacaatttgatgtttttgttttaaataccgtgtatattcttcatattcttctgcatcttttgatacaaaaatgttatcttcctgctctaacaaggtattcccaagattctcatattcgtatttacaagaaagatgtctgcgtttgatcttttcctgaaattcatacagataccatgttccaaaaatcttacgaaagatttcactccgttcttttcctttcgcgtaaagaagttttaaaaattctccttgtgcgatcattgaaatctgctgatactgcatacggtccattccaaggatttcttccatctgcgcggtcacttgctggcttcctgttgttatgatctcatcttcttgatataataccgcatacggagactgtcgtgtcattttgtctcctcgtttgctctttcgcatataggatggatttctttcaatcttgtactgctttttgcgatgcgaaaataagaataccactttcgtctctgtctcatctttggcgaaatcacttcttagcatatcctgttttcgataagaaccacttggttcaccgtataaggcaaaacagattccatcaaaaatggtcgttttccctgcacctgtttctcctgagatcaaaaaaatcccatctttaaatctggtaaaatcaatcactgtttcctctgcaaatggtccaaatgcagataatattaatttttgcggtctcaacgaatcacctcctcaaaaatggatattgccatctgtgctcttttttcatcaagatcaatatgattttgcattttataaaactgttcaaataattccattggattttgatctgcaatctggttttctttcatctgaatggtttcatattgcatcatatgacgacgatttttaaagctgatctgcataacattcggataaaccgtacgtactttcccgatcgcatctaaaatctgctcctcatccgtcagaatgacatgcatataatcttcttcatttccaatttcacattttctttttaacaatgattctaacgaacattccatttctctcatatcacgtaatggttttagcaaatgatgggatagggagatctgcttgtttttactgatcgtaaggatcgttgcctgtttgtctttgtgaatttctgaaaaagaatattttaagatcgatccagcataccttaccatttcacgtcccattgcctgcggcttgtggatatgtccaagtgctacatagtcaaatgcatcaaatagacggtaatcaatattatcaatccctccaaggctacttgtttctgaatctgacaattctggagaattctttccaaccgttacaaactgatgcgccagcaggatattcgtctcatcttcgttgatcttcacttgttccattagatgcttgaagcattcttcataggtttctgtctgaatttttaatacatgattgatatacgctggctttacaaatggaagcatataaaaattaatattgtatccatcttccttgatcgtaatcttttcaatttcctgattaaattgtgatgcaatatataaattagatcgtttaaataagtttcttccaaatgacaatctttccgaagaatcatgatttccactgatcatcaatacttttactttaagatcactcagttcttctaaaaattcatccagcagatgaatcgcctcgatcgtcggtattgccttatcatagatatccccacataataaaataacatctatcttttcttcttttactaatgtaacgatctgatccaatataaatttctgatcttcaatcatggatatctcgttcactctctttccgagatgcagatctccaagatgcaaaatcttcatgtctctcaccctcccttttttctattgtagcaaacttatattttaaaaacagcttccatttccctttactctaattttccatctcatagagcattgtttccataagaatagcataccctttcatcgggtcatttacaaaaacatgtgtaacagcaccaataagtttcccattctgcaagattggactgccactcattccctgtatgatcccgttggtaagctttaataattctttgtctgtcacttcaatctccatactttttaacacatccttgtcggatggcacgatcttattgatctggatctcatattgtttcatagtaccgcttacattggagagaatataagctttccctggtttgatatcttgacgatatcctatcttgtatgctttttgttgtttctttggtatggttccataaattcctttttccgtattttttttgatggaacctaaaatattctcttccttgtattcaatacttccaacaatctctcccggcgttcctgattttccttttttaatggaataaatctgtggattcagcaaaagaccacctttgatctttaaaagtgtgcctgtatccatatcataaatgccgtgccccaaccctccaaatgacgtaccttttacataagtcatcgtaccgattccctgcgtgttatccctgatccatgttccaatcttatacatgtgatccgtctttgaacgttctggcttgatcttgatccgcatcatctttgcctttctttgaaccgttaatatcacagattttccttgaccctgattaattttttcgatgaattgtttttttgatacaatatcttttccatcaatctttttgatatagtctccacgatataatttgtttttactcggtgcatattccatactgttttctccggtaaactgatccgtatcaagcacaaacaatccatctgtttctacatagacaccgatcacttcgccgcttggcgtgatcttttggtcatctacgaccttcactttaatcttctttaatggaatcgcgccaaataaattggttttcatttcatactgacccatgtgacattgtttgaatacaatgggctgatttagtcgtatcgtttgatgatcgatcgttgcactgactggtacatcataacaaagagagactgtttcgcccttgttgatatgaatcgtatctggaagtctggcattgcagtattttatataaactgcagctattgcgattaaattgatcataaaaagtagaattaaaaatttgcggtaagtgtattttttcatattcttcctcctaaaaaaggacatatcgtcattgatatatcctttttattatatgaagattaccgctcccatactcagtataattttgtttgatctgccaaagatttcatttcttttgcatgttccatagacgtttcactccattgatctccgctaatcattcttgaaatctcttttaacgattctgattcatttaattttcggatcattgtctgcgtattcttctgatcagtttgttttctaatgaagtagtgactatctgccatcgctgcgatctgtggaagatgtgtgatcgcgatcacctgatgatcctttgagatcactgccatctttttagctacacgattggcagtttccccactgatcccagtatcaatttcatcaaaaatcaacgtatctactccatctgcctgtgctgctactgatttgagtgcaagcatgatccttgataattcaccaccagatgctacttcttgtaccggacgcattggaagacctgggttggtcgatatcataaaacggatctgatccattccatctgctgcaatctggtcttttttcgtaacttcaatttcaaatctgacatctaaaaagttcagatcttctaatgcttttgtgatattgcttccaagtgtctttgctaccttacatctttgttctgacagattctttgcttccttaagatatcgttccctgatgcgttcctgttcattctttaatatttcaatctcatgttctgcatcacacaacatattatatcgtttttctgccttttgtccatatgctgtaacatcttcaatcgatggaccatatttgtcttttaaagaattaatgatattcagacgttcctccacttcctgatacgtctgctcatcaaattccatattctccatatatgtcgtcaattcctgatgaaaaccatttaacagatcttccactgacaacagttgttcataaaattctgagatctgaggatctaaatgactgatctcctgcattcttcttatgctttcacttaactgattgccaatcgatgtttcttcctcatatcccgtcagcatacgtgctgcctgacaagaaataatgatatctcggctatggacgatcttttgatataccgtttctaattcctcatcttctcctttgacaagattggcattctcaatctctgaaatctcatgttttaagaagtccatctctcttaatctttgctggtcgtctattgatatttcttttatctttgttgaaatctcgtgatattctcctgcaagatttttgcactgttctaaggaatatcttgcgttttcaggtaaaaaatgatccatcatacttaaatgatttttctcttttaacagtacttgatgttcttgctgaccatgcagatcaaataaacgtctggaaacttctcttaacgtattgagtgtcaccgtactatcattaatcttattaatacttctcttctcgttgatcacacgtttgatgaagatctgaccgtcttctacttccagatccagagcttcgatttctttgatcagcttttgatcttcaatccaaaaaagcagttcaataactgcttcttttgctcccggtcggatcatatcttttgatatttttttcccaagcgcactttctatagaacctatcaagacagattttcctgcaccggtttctccagtcagtatattcaaatgttcatcaaatgtaatttccacttcatcgatcaacgcaagattctttacatgtaaattctgaagcatagatttcctctctgtatatttattcttttaattttttgatcatatgatcgatctcagcaattgcagttcttccaatattcttatctttcataacacacatgatcgtatcatctcccgcgatcgtaccaaccattccaatgatgtttaaagaatcaagtgcagcagcagacgccattgccattcccgatacggtttttacaaccagcatattctctgctagttccatggaaatgatcgcttctgctaaaatcctctgatactttcttgaagtctcatcttcctgatcgatcagacaataaatctgcttcccatctgcatccggtttcttgatcaatgccagttctctgatatctcttgaaatcgttgcctgcgttgtcttaaagccgatctgatttaatcttgacaacaactcttcctgtgtctcaattggatattgctggatcaattcaatgatcgcttcctgcctatttttcttcattctgacctccaactttgattcgaaggattctgtaaaagctgtctcctttcactttaatgatccttgcgatcttctttgatttacgcacctgaagaacatctcctggctgaagttttctcgcaacctgaccgtcaaaggtaacgtaggcttcctctaactgagattctctcacgttctcaatataaatatcaatctcatcttctggagaaagaacaagactgtttgactgcaacgaatgtggacagatcggggtgatcaaaataacatttgcttttggattcactaccggcccacctgctgataaattatatcctgtagatcctgtcggcgtcgaaacaataatcccatctgcttcatatacatctaacaatttgccattgaccataatacgaaacgagatgattcttgaaaaaccacttcttgcgatcacgacgtcattgagtgctggaagatgatctgtctcatgatccgcatggatcacgcgcccatctaacatcattctctcctcgatctggaaagtatcatttaacaatccgtccaatccgtcataaagtttagataactcaatctctgttaagaatcctaaggtaccgagatttactccaaccatcggaatatcatgatctacgatcaatcttgccgcatgaagcatcgtcccatctccacctaaaacgatcacacactctgtgtcttttgtgatgcagttcatatctttttgaacatgtcttgtaaaatcacacattctctggctgattccaccttgtttttcaatataatcctggatctttttggaaatacgcagtcctggatcttttttctcgttcgttaaaatcaaaaaattcttcatgttattccttattctttgccagatccgcatgtgatgcatccaccacttctttgatctggtctgtcattgtatgtccattctccattgtctctgtttttctcatatgtaataaatactcgatatttccctctggacctttgattggagaataatcaaggtgtaataattcaaacccgttcgtagatgcgaaatcacagatcttctcaatgacttcttcatgaacttttggatctcgtacaacacctttctttccaactttttctcttcctgcttcaaactgcggtttgatcagtgcaacaacttctcctcccgtattcaaaattcgatataccgctggaagaatcttggtcagtgaaataaaagaaacatcaatagatacaaacgatgccttttcatcgatatcgtcttccgtcatataacgcatattcgtgcgttccatacaaacaactctctcatcgtttcttagtttccagtctaactgtccatgtccgacatcaactgaatatactttcactgcaccattttgcaacatacagtctgtaaatccacctgtagatgctccaacatccatgcagactttgtcttttaatacaatatcaaagttcttcatagccttctcaagctttaatccacctcgactgacatattttaaagtttttccctttacaatgatctcctgcttttcatcaaaagttgatcctgctttatcttctctctgtccatctacaaaaacgattcctgacataatgatcgcttttgctttttctctggaagacgcaagccctttcttgacaagcagtacatctaaacgttctttcttcatttttctattccttcatccattgtctgatggagtctgcaatactttctccatcaatcttcaacattcttcttaactcacttacagaaccatgttccacaaactggtcatctattccaaggcatctgacttcacctttgtaatcatgttcactcagaaattcattcaccatcattccaaatccgccgtttaatacgccttcttctgcgatcatgatcttatcataggtctgtgacagtttcatgatcaactcctgatcaaatggtttgatatatcttggattaactaaaccaatctcatatccttcttctttaaggatcttttccgccttgtctgcctcttcaaagatatttccaactgcaatgatcacagcttcctttccttctttaagtatctggccttttccatagtgtaactcttcaaattgatcttcatacaaagagcttgcttctcctctggaatatttgatcgcagtcggtccttttgcatgatggagcgtatgttttagcatctcagataattcccttccattgatcggagccatcaccgtcatatttgggatgatagataaatacggaatatcaaaaataccttgatgagtttctccatccgctccaacaagtcctgagcggtccaatccaaatataactggataattcccaattgccacatcatgtaagatctgatcaaaacctctttgtagaaatgttgaatacactgcaaatacaggctttaaacctcttgatgccattccggcacaaaatgtaactgcatgttgttcggcaatccctacatcaaagaaacgatctggaaaatgatttttaaactttccaagacctgttccatccggcattgcggcagttaccgcaacaatcttcttatctttcttcgcctctttgatcagtgtatctgaaaacaccgctgtgttcgatggattgtccgatttctttaaaacttcccctgtctttaaggaaaatggactgattccgtgaaatttggctggattctgctccgcaggacgatatccttttcctttcttcgttaccacgtgaataatgatcggctcatctaattgtttcgctctatttaacgtgtctaccatcaagggaacattatgcccgtcaataggtccaacatacgtgatccccatatcttcaaaatacattcccggaacaaataattgtttgatcgaatcttttgatttcttgagaattgttgttaattccttcccgattcccggaattcttaataaggattgttccacatttcctttaaattccacgtattcttttcttgttcgtactttattcaaataagcagacattccaccaacattctccgcaatagacatcttgttatcgttcaggataatgatcagattcttcttctccttgcgtagtcttgccatattatttaatgcttcatatgccattccaccagacaacgcaccatctccgatcaccgcaacaatcgtctcatctgtatgattgatatctcttgctacaaccatcccaagcgctactgataacgacatggagctgtgtccactgtgaaatgcatcacaatcgctttcttttctcttcgggaatccactcatcccatgaaattgcctcagattctcaaatccattctttcttcctgttaagatcttgtgcacataagactgatgtcctacatcaaagatcaactggtcttttggaaaatccaaaacaagatgcagcgccatcgttagttctacaattccaagattcgatgccagatgcccccctgtgcgactgacatttcttaataaaaaacgacgtatatctttcgccaggagtttataatcttctggctgaatctgtttaatatcattcggatcattaatatactctagcataatgctccctcttcctctctgccttagtgtgttcgatggatcaaaaatcttgtaagatttgtaagataacaatctcccttatcatatttttctaaaatatcaattgctttctttgaaatatcttctacatctctttgtgaacgttctaatccttttaatgtcacataagttgttttgtgattcttttcatcacttccaaccggtttcccgatctcttcttcatctcctgtaagatccagaatatcgtcttgaatctgaaacgcaagtccgatatattctccacattcttccatcttcagaacatcttctttggatgctcctgcaagaactgctccgatcatcatacatgcttcgatcaatgcagacgtcttattcttatgaataaataaaatctgctccatactaagcggtgtaccttccagttcaacatctgcaacctgcccgccgatcattccatagattccaggtttgctggcgagaatcttgattgcttcaactacattcatgatctggtctttctccgcaagatcaaatgctttcgttgcaacttcatacgcataattaagaagtgcatctcctgcaaggatcgccatatcttctccataaacgatatgacatgttttctgacctcttctgtaatcatcattgtcaagtgctggaagatcatcatgaatcagagaatacgtatggatcatttcaatcgctgccataaatggctttacgatatctccctttccgccaaacatctgatatgtctcgttgatcagcattggacgaagacgctttcctcccgccttaacggttgtgttcattgcagttaaaactgttttttgtaacccttcctgtgctggcagatattcatctaaaataatttcaatctgtgcaaccttttgtttcatctcatccttaaagttcatgttcttccccattctcttctaatacgatcaattctttttctactttatccagagaatccttacactgtttcacaagatttactccttcagtatatagtttgacagcctctggaagtttgatttcttcactggaaagctttgtaagaatttcatctaactgatgaaaaccctgatcaatatcaaatttcttctttgccataataaacttcctctttcttacttccctttttcatccattgttctgatctgttttgccattgcaatgatcgttccatctgaaatcgttaaggaaatctgatctccctctttcactttgtgaacacttgtaactggctcaccattctgatcttctaaatatccaaatccattgatcaatttcgctgttggtgataacccatgaagttcttttgcgtacaattccagtttgtgcttataccctgtcatcttattcttcatcacttgctgaatctgttcttctaattctgacaaacgcatcttctgttcctgaagttgaaatcgtggatcataatttgcaatggtaatctgatacttctgcaatttcatctgataacgccggatgatctgttttaacaacgcagccattgtatattctctgtttgcgattccttccatcacttctgtgatatctggaactgcaagttcacaggctgctgtcggtgttgccgcgcgaagatctgccgcataatccgcaatggtagtatccacctcatgccctgttccagaaatgatcggtgtctttgcttcgtagatcgctcttgcgacattctcttcattaaatgcccacaaatcctcgatcgagcccccacctcttccgatgataatggtatcaactccatactggtccagagtgcgaattccagaaacgatcgtatcagatgcaccttctccctgtactttagcaggatataatactaactgtacatacggattcctgcgctttgctgtactaatgatatcatgaattgctgctcctgttcttgccgttaccacaccgatcttctttggattctttggaatcggcttcttgatctcgtggtcaaacaatccttcttcataaagcttctgttttaacatctcatatgcaacatataattctccgattccatttaaacgaatctcctgtgcatatagctgataacttccgccacgctcatagacactgacatttccatccacaatgacttcctgtccatcttctaattcaaactgcaatccattatatcttgcactcgcaaacatcacacaagaaatctggctttcttcatctttcaatgaaaaataaatatgcccagaagaatgatacttacagtttgacacctgtcccttgattgaaatcctccttaaggcataatcactttgaaacattcgtttgatataagtattaatctgtgttacagaaaaaactttactcttcatccatatcctgtccaatcttacttaagacaccattgataaatggtgctgccttttcattgcagtatttctttgcaagttctactgcctcattgattgctacttttcttggcacctgctcatctaataagatttcataggttgcaagtcttaaaatagataattcagcttttccaagtctctctaaattccatgcattcgtatgtgcagaaatctgttcatcgatttcatctaaatgttcgatcagattctctgttttctctgtaatttctttctgtgtcttctcattgatattttcatgcccatgaaaatataattcaacctgatcttcaaattcttctttctcacaaaattctacacaaaataaaattctgaaaatatgttctcttacctcacttcttttcattagggttcctttctgcgatacaaagacggaactgtgatcagtcccgtctgactttgctttatattctttcttactcttcttctgctgcaacgcctgtgacacggacgttaacttctctgacctttaatcctgtcatgttctcgatcgctgctttcacacgatcttgaactttcttagaaatctctggaatactaactccatagtcaagttctaatgcaagattgactcttacatgatgattctctacgacaactttgactcccttggacagattattcactccaagtttacttaccagttcattcgtgatattcccacacattctggcaactcctgtcacttcagttgctgcgattcctgcgatcactgcgatcacatcatctgcaattttcacttccccgagcactccctgctcgtttatctggtaactacttttattctccatagtaaaagcctcctgtatttctgcatactgatatgatttattataccaaagatgaatatgttattcaaactattttataacattctttttgatcttatctctttaaaatgttaagaatagttgattttcttccatatttataagataatacctttggcagatatcctttgcgaatctgaccttttattaaaggagatcatataatatgaaaaaattaacaagacaggagaaacatgaacagtgcattcgtgagatccgtggaacactgatcgttgtattgatctgttgtgtttggcatattgccagtgcgtttttgttaaatggtactggtctttattttctaggtatgcccgcatggtttagtgtgtcaacattcgggacgatcatactttctttgatcggtgtctggtacctattaaaacatgtatttattaattttgaatatgacgatgaagaggagggagaagaataaatgtcagcaaatcagaaaatcattcttgcaatttttattgtttacctcgccttaaatgctgcgatcggtatcattttcagtaaccgtcagaataaaaaacagcatacatcctccgagaaaaaattcttcatcggtggaagaaatatgaacggacttcttctggcaatgacaaccatggcaacttatacttctgtaagttcctttatttctggtccaggagctgctggtcttacttatggatatgcacaggcatggatcgctacagttcaagttccgatcacatttctggtactaggtgtccttggtaacaaacttgctttagtttccagaagaactggtgccgttactgttgtaggttatttaaaggctcgttataaaagtgatgttttagttattgtaaccagcttacttatggttgccttcttcatggcacagatgatcggacaatttactggcggagcaactttgatctcttctatcactggacttgatcatgttgtttctttattgatctttggagcagttgttatcatttatacatcttttggtggtttcagcgctgttgtgatcacagatacgattcagggaattatcatgtgtgtcggtacatttttacttttattctttgtattaaaagctggtggcggacttgcgggtattgatgctggacttgcacagaatctgcctggagtatatgatgatctattttcaaagtacagtcccggtacgctacttagtttctggattcttgtaggatttggtacacttggacttcctcaaacagccgttcgttctatgggatttaaaaatacaaagagtcttcattctgcgatgtggatcggtgctgttacctgcagttttatcatcgttggtatgcatatggctggtacatgggccggtgcactggtagatactaagaaccttccaacgtctgattactttatcccatacatcgttcagaagatcatgccagtcggacttgcaggaacttttctagctgctcctatggctgctgttatgtctaccgctgattctcttttgatccttgcttctgcagcgatcgtgaaagatctatggcgtaactatgttgtcaaagatgatcctgtgaaaattcagtcttataacaaaaatgttgggaaaatgagtacgctcgttacgttcgcatttggtgtgatcgttatcttacttacgatcaatccacctgatatcattttcttcctgaatctatttgccttaggtggtctggaatgcagttttttctggcctttggtcggaggattgttctggaagaaaggaacaaaacaggcagcaatctttagttctctcggtgctgcgatcacttatgtattttgttattataacgtacagattgctgggatcaatgccgttgtatggggacttcttgctggtggaatcttatattttgtgataggaaatatcacttgtaaaaatggtcttgatgaagatatcatcaaaaattgtttctaaattttgaatcatagaaactatcttaaaagcaatacacattaaaagtcccccatgtatgatatttgaaacttcttattaatatcatacttgagggattttatcattttcatcctttttgtgcataagctggtatcttctctaattttatgagat

SEQ ID NO: 604 - DNA, 12265 bp, Unknown
  gut microbiota DNA sequence
gggagctgttgcggtttcaattccagtatgtggggtgataatgtttcttatgaggaaaatttattatatgctctttctgatcacaaatgatcaggttctggcatactgggaattgtatgcactcgccacatggctcatagtgatgtttatattttataagatcagaagtaagcgatggaaaaaggtggatttatgagaatttttaaattagagcttcaaaagatcatgaaaaatcctatactctggttattggcagtgatattttgtcttgtgaattgtttaattatttacaatgaggcaggaaataaggatacatccaaagaattagtgatcatgcatgacattatcaaaaaaacagatgatacaaaccactcacgtcaagctaaaaatagaaatgaaagaaagcagttatccgaggcatatcaagaatattacaaagaaaatatcgacttgtatgacaaacttgatatggcgaagatcctaaaacaaaaagaagaaatgcttcagtatcaccccaagggatttatgaagaaattcgtaaaagataactatgagcatctgcaaaaaagagtggaggagatcaaatctgataaagaatataacgatgctttttatccaggacagtattatgagatccattcgttattatattcaaagttagggaaaaaattaatcgtggaaatgagtcttttgatggcactcagtattttgtttatcatggattatgagagactgcaaaagacaaatgatcttgtagatgcaaccagaactgggaagagaatcatggattgtaaagcttttgcagggacgttaagtggaattttattttcagcgatactatgcagtgttacatggatttattttttttactgcgtatcattcaaaggactatggaatgtctcggttgcctccacactagttgcagaaaaaagatattcgggatggttttatccatttgttacattctttaaaataacacagatacaatacttgattctaacacttaccgtatatcttggaatcatcctgttgatcgcactagcaacgatcgcaatccaatttttgctgaggaacagttatttttcatttattatattaattctcttaaacatggcattgttcctaggtgcttactattcgaatgtaacatttatgaatgttatattacgcctgctaaacccaacaaatctctatattacaagcggagcttggtttatggaaaatgacattacattgtcatttgcaggaaatgaattctggatcataggagtgacgggggtatggatgactttgtgtgttaaaatagcaagaaattttaagttgtatgacagaaatgtatcgagtattcataaaaatataaagaaagataggtgtacgaaaaacgaatttcattgacggattttttgcaaaacgctgatccgccaacactcctgcacaactcactgcgttcaaacagtgcccgtgttggctgcgattttgcaaaaaatcctatgaaattctatcatttcgtacacctatcttcctttatgtttttatgaatacctgaagacattcccgtatacaattaagattttcaagacagaagagtggatgttttactatgttggtttacatcttttagatgattgataactacaaattcaaataatcccggataaaaaacgctgtcatcaaatgaaatctctccaccgtatcgtccaacttcaaattccaatgatcctcgatcacgcgtattcgataagtaatggtatttcgatgacaaaacatattcgaagccacatgctgaatactcccattacaaagcagatactgatgcaaagtctccaggtaattcgtatcatgaatctcatcatattcttcaatatccttcaaatactcatcatgataagccatcaaaagatttttatcattcacagaatgaagaattcgaaagaatcccatctcctcaaaccgggcaatttcttgtccattattcgcagcataaacaagagcagccagagaacgttgataacttacacgaatctcacgaagcgtgtggacagaacttccaatccctgcataaatctgcatttttttaaacgaacttttcagtgtagagatcaaagaaaatatttcgttataaatcaattcttcttccatgtcatgaaaaacaaacaaaaaatgattcttataaaaagcaatatggatatccagatcgtttagtttgatataactttccatcaaaaacagcagacgtaatttaagatcatcagagatcgctttcttattacatttcattaaagcaatctcataacaatcttctttctcgaaatgattgtcttcaagaattcgcaaagcatcataatggtgcagggaatcttcttcaataaaagataaaaatgcatccgtgatcgaagtatctttctgtgtatccataaagatcttattataataatctctcgtaatatcataaatatgaactttccaaggcatctcgatcaatggatagttgtgtttgttgcacaatgctttaatagaatcagtgatatcttcggaaagaatatattttcccgtatttaagatcatcccgcaagtatggcttttgatcatcgtttcaataaaatcataaagagaagcctcatcctgacagttgatccctgtcgtgatgatcagttctccaccctttagaaagttgtgggtagaactgtcttcagagacataaacccagttcatgatatgatcgatcccagtttcacctgcgatcatggaaagatggtattgatgtttggtttgtgtatataattcatttaatgtaagaggcataaatctgccctcctttatttgtgtcctattcatttgaagtcatgtaaaaatagtctaccatatttgatactatttgtgcaatgaacacaaagaatcaaaggaaaattgtgataaaagaatataggaaactaataaaaaattggtggaatgatcacacaaaaatgaaaaaaattattcaaaaaaataaataactatttaataagaagaaaccagagaaaaattgatgaaaaattcaatttctctggttatttttggcaaaaatagataagaaacaaaaaatatggtggtttgcatttgtaaaaaatgttataataatttttgtaaaaagatttcgcaagaaggaggaaatatctatgcataagtatggaccagtgatcaagatgttgtcattggtgactcagataggaattacgatgttgacttctgtttttttatgcatggcgatcggaatgtggattgataaacatttttccacaaatctatttcttctttttctgattcttggtattatgggaggaatcagaggagtatattctctgattcacaatatactggaacaggaagatatggaggataaagatgagagataaattaagacagctagacgagacatacctagatcttgtgatcggaattcttttgtgcggagtgttatctgcgattttgggtatgataataaccagaggtgatctaagatatctgatcggagctattgtgggaacgatctttgctctcgtgatgatcacaacgatgatggtaagcatccagaagtccgtacagatggatactcatcaggcaagccggaatatgatcaagagtgcgttgataagatatgtagcgacattggttattttatacgtgatgatcaaacttagtatgagtgcttttattgctgcattggttggattcttaagcagtaagtttgcagcatttttacaaaaaccgatccacgagcatatcacgcgcagagttttacaagaataacgtgaatcacattttccgggtttctaacatggagaaagagaaaatcggagaaatggaaaatataataaaaaggaggttgtgccatgggaattatgaatgcccccatgatgttggcagcatcatccggtgatgacgttgactttatggtgcatgggctgatcccgctgaagtttttcgggcataaggtctggatcacgacaacgcatgtgacgacgctgatcgttatggtgtttatcatcgtattagcgttgatcgcaagacatgcagttcttcacggtgatgagaagccgtcaggacttcagaattttgtggagatgatcgttgagatgcttgataatctggtaaagggaagcatgggaagacattggcgtccatttgtaaattacattggaacgatcatggtctttatcttttttgcaaatacatctggattatttggcttaagaccaccgacagcggattatgggacaacgcttgcgttagcgttgatcacgtttgtactgattcagtacagtgcatttaagacgagtaaattacatgtatttacagatcttttcaaaccgatcccaatcttatttccaattaacctgatcggagagtttgcgacaccgctttccatgtctcttcgtttgtttggaaatattatggcgggtacgatcatgatggcattgtggtacggattgctgccatggcttgcgcagctaggtattccagcattcttgcatatgtactttgatctgttttcaggagcgatccagacatttgtatttgcgatgctgacaatgacatttatcacagataagcgggaagcttaacattatctatcaagatgggaaactttaacatgtagttcaggaggaaaaaactatgaatatttcaagtgaagcatttgtattagggtgttctgcaatcggagcaggacttgcactgatcgcaggtatcggacctggtgttggacagggatacgcagcaggacagggtgcagcagcagtaggacgtaatccaggagcgaaaggtgatatcacatctaccatgcttcttggacaggcggtagcagagacaacaggtctttatggtctggttattggtttgatcttattatatgcaaatccactgtttgcaaaactttaataaaacaagccgaagggaggccaaggcgtggacggaagaatatttggattagatattcagcttggctttgatgtgattatgcagggaatcgcagtgttcatcatgtttgcactgctttcctatattctgtttgaaccggttcgcaagatcttagaagaccgtaagaacagaattgcagatgagatcgatcaggcagcagccgatcaggcagaagctgcaaagttaaaagccgaatacgatcataaactaaaaaatgttgaaaaagaagcagatgccttaatggcacaggccagaaagaaagcactgaagagagaggaagagatcgttgcaggagcgaaagaagaagctgcaaggatcatagaaagtgcggatcatgaggcagagcttgcaagaatcaatgcacaggatcagatgaagcaggagatggtcaagatggcagtcttaatggctggcaaattcatccagaaccagatggacgagaaagaccagaatgcttttgttgatcagaccttacaggaaatgggtgataagacatggcttcaagagtagataagatttacggggatgcctatatttctgtgaaaacagatgaggacgatcttttagaagctttggaagaggcgaaagctgtcaaagaaatcttagattccaacacagatttcgtgaatttcctaaatcatccccagatcacaaaagaagagaagatggaggcagcaaagaacgtttttgatggccgggtttctgatgatatgacaggatttttgatgattatcattaagaaaggacgttttaaagaatttgatggaatctttacttacatcatttcgaatatcaaacgtcagttaggaatcggagccctacatgtaacgtcagcaatgccgctgtcacaagaacaaaaagacaagatcttaaagaaagtcattgcttcttcagaatatcagaagttagaggtgacttatgagacagataaagacatcatcggtggattgatcctttgtatggatgatcggattgtggataattccattcgtacaaagcttgattcgatgggcagatatctgtcacaaatacaactatagaacaggaggaagataagccccatgaatttaagaccagaagagatcagttctgtgatcaaagaacagatcaaacaatattcaacaaagcttgaaacctctgatattggaacggtaatacaggttgccgatggaatcgccagaatccatggattagagaaagcgatgcagggagaactgctcgaatttccaggggaagtttatggaatggtattaaacttagaagaggacaacgtaggtgcagttctcttaggtgaccgaaagaatattaacgaaggcgatattgtcaagacaacgggccgcgtggtagaagtgccggttggagatcaactgacaggacgtgtcgtaaactccttaggacagccaattgacaataaaggtccgatcgagacagataaatatcgtccaattgaaagagttgcgtcaggagtaatctcaagaaaatccgtagatactccgattcagacaggaatcaaagcgatcgatgcgatggtaccaatcggaagaggacagcgtgagctgatcatcggagaccgtcagacaggtaagacagcgatcgcgatcgatacgatcattaatcagaaaggacagggtgttcactgtatttatgtggcaatcggccagaaagcatccacagttgctaatatcgttaagacattagaagagtttggtgcgatggattatacaacgatcgtagcatccacagccagtgaattagcaccgcttcagtatatcgcaccatacgcaggatgtgcgatcggtgaagaatggatggaaagaggagaagacgtattagttgtatatgacgatttaagcaaacatgcaactgcataccgtacactttccttacttcttcgtagaccacctggacgtgaagcttatcctggagatgtattctacttacattcaagacttttagagcgtgcagccagattatctgatgaattaggtgggggatcattaacagcccttccgatcatcgagacacaggcaggtgatgtatctgcatacatcccaactaacgttatttccatcacagatggacagatctatctggaaacagagatgtttaatgcaggtttcagaccagcgatcaatgccggactttctgtatcacgagttggaggatctgcacagatcaaggcaatgaagaagatcgcaggaccaatccgtacagaccttgcacagtatcgagaactggcagcatttgcccagtttggatcagagcttgacgatgatacaaaagaacgattagatcagggtgagagaatcagagagatcttaaaacagccacagtatcagccattaccagttgagaaacaggttgcgatcatttatgcagcagtcaagaaacatctcttagacctgccagtagatcagattcttgatttccagaaagaattatttgaactgattgatacaaaatatccagagatctttacaagcattgccgagacgaaagtcatggatgatgcgacagaagagaaactgatcaaagcgatcaatgaagcaaaagaatcatttagaaagtaaggtgatctgtcatggcatcgataattgatattaaaagacgaaaagccagcgtcgaaagtaccggacagatcacaaaagcgatgaaacttgtatccacggtaaagttacagagagccaagcagcgtgcagatgagtcaaaagcatactttaataagatgtatgagacgatcagctcgatccttgccaaagcaggtaatatcaatcatccgtatttacaggaaaatggttccacaaagaaagggatcattaccatttcatccaaccgtggattagcaggaggatataataacaatattgtgaaactgatccgggacagcggtatgaacaaagaagatatcatgatctatgcggtaggacataaagcgatggatacattaaaacatcgtgggtatgagattgtttctgatgattcagagatgatcaacgagccagtctatgatgatgccagaatcttaggagagaagcttctaaaagcttttgaagatggagagatcggtgagatctatctggcatacaccgattttaagaataccgtggttcatgaaccaaaacttgtaaaattactcccaattgagaatgatcagcaggcaaatgaagagaaatctgaaagcaaggctccaatgaattttgagccagagccggaagaagcactttctttattaattccaaagtatatctgcagcatgatctatggagccttagttacatctgtagcaagtgaaaatggagccagaatgcaggcaatggattctgcgacaagtaatgcagaagagatgatttcaaacttagaacttgcatacaaccgagcaagacagggagcgatcacacaagaattaacagagatcatttcaggagcagaagccctgaagtgatggactcgatataagaagcaggaggaaataacatggcagataatcgtacaggaaagatcacacaggtcatcggtgcggttctggatatcaaatttggcagtgacaatctaccagagatcaatgatgcgatcgatattcagacaaaagacggcgggaaattagtcgttgaagttgcacagcacctgggtgatgacaccgtaagatgtatcgcaatgggaccaaccgacggattagtccgtggaatggaagcacaggctacaggcggaccgatctccgttcctgtaggagaggcaaccttaggacgaatctttaacgtgctgggagatcctattgataataaaccggcaccagaaggagccaaccgcttaccaatccacagaaaagcaccggaattttcagaacaatctacagagacagaagttctggaaacagggatcaaggtcgttgaccttctatgcccataccagaagggtggaaagatcggtctgttcggtggtgcgggagtaggaaaaaccgtactgatccaggagctgatccgaaatatcgcaacagagcatggtggatattctgtattcactggtgtaggagaacgtactcgtgaaggaaatgatctatacacagagatgagtgaatcaggtgttatcgacaagaccgccatggtctttggacagatgaacgaaccacctggagcccgtatgagagttggtcttacaggacttacaattgcagaagatttccgtgatcgtggaggaaaagacgtcttattattcatcgacaacattttccgtttcacacaggcaggatctgaggtatctgccttacttggacgagtgccaagtgcggtaggttaccagccaacactgcagacagagatgggtgccttacaggaacgtatcacatccacaaagaatggatcgatcacatccgtacaggcagtctatgtgccagccgatgacttaactgacccggcaccagcgacaacgtttgcccatctggatgcaacaactgtattatcacgtgcgatctcagagatgggaatttatccagcagtagatccattggaatcaacatccagaattctcgatccaaaagtcgttggagaagaacattacaaagtagcacgaggtgtacaggagattctgcaaaaatacaaagaattacaggatatcatcgcaatcttaggaatggacgaactttccgaagacgagaaactggttgtagaccgcgcaagaaaggtacagagatttttatctcagccattcttcgtagccgaacagtttacaggaaaaccaggacagtatgtatctttaagcgatacgatccagggattcaaagaaatcttagaaggaaaacacgatgagattccagaaggaatgttcttgaatgcaggaaccatcgaagaagttgtagaacgttttgcagcaagaaataagtaggtgatcctatggctgaaaacacaatgaaattagaagtcattacaccagaacgctcattttatacaggagatgtcacattcgttgagctaaacacaaccgaaggagaagttggaatctacgcaagacacatcccgatgaccatgatcatcgcaccaggtgtcttaacgatcacagaagaagacggaaccaagaagaaagcggcattattaaaaggattcgtggaagttacagaaacaaccatgagtatcttagcagaagtcgcagaatggccggaagatatcgatatcgaacgcgcaaagaaagcggaagagagagctagaaagaggatcgaaagcaagagtgcggatattgatattgcgagagcggagttggcacttaagagagcgttagttcgtaagggattgaaagcataaaatttatttgaatatgtgtaaaaaagattctaggcagattgtattgcttagaatctttttattttgtagaaaaaatcaaattgtttttataaatagctaacataacatatacaataaaaaaataatataatattatatttgtacttgtataaatggtaagtttcatataaaatataaagtaaattaagattgaaggagaaaggtgagtcaatgaaaaaattaacaaaaaaacaagtagaaataatgaaaatattttgggcgagtgagcatccattagcagcatcagatattttgaaattggatgaaagtatgaatattaatacgatacgtgcatctattcagagtttactaaaagcggattatattgaagttgcgggtattgaacatagaggaaatgtattggcacgtacttacacttctaagattaagatagaagagtatattatttctaattttgcaggaattaataataaaatttctaaaaaatctttggttgctcaatttataaaaaatgaagaggatgaagaggttataaatgaactggaacaagaattgaagtatagaaaagaaatcttagcgaaaaagagggataattagatatgacatttccaacatacggatcagtatttgcatgtatattattgagtagtgtttttatgattgtggtatgtttgctgggaaatagaataaattttattttaaaaaatagtgctaatttgttggtatttttcatgatcatggttatgttaagaatgttttttccatgtaattttgtattcaccaaaaacatttattctacacgtgcgttgactgtaatatgtgatattttaatgaaacatatttggaaggattatagcgtttcagatgtaattatagtagtatggatattaattagttttatgtatatatgcaagcttatatatacacagattcaattcaatcgatttttatcaatactagtaccagataattcaaataagatagagaaggcatataaatcagtacaaaataataaaaactataaatttgaaatatataaaatacagggaattaagagtccatgtattacaggattgattcatcctaagattctactgccggaaatggattttaccgaaaaagaattacaatatatttttaaacacgaactgcagcattttaatcatcatgatctgtggttaaatatgttgtgtgaaattattatgtgtttttattggtggaatcctttcgcatattttttaaaagagaaatttaaagatatgttggagttcgcaaacgataaaaaaataacggaatcaatgaatgaaatggaaatttatgagtatttagaatgtatgcttaaaattataaagaataataagatgcataagaagataccagtcctttgttttattggatgcggaagatctacagttcaacaaagatttgacttaattataagaggacaggagaaaaaatataaacacagaggatatattttgtacattatggttttttgtttcagttatattttaagttttgtttttgcattcgagccagattataataatccagatcatatgccagatgaagttatatacaatttagaaaataaagatacattttttataaaaaacaataaaggatataaaatatattataaaggaagatttgtaggaaagtgtaaatcattagaaacatttcaaggatatcgtgtatataaaaacgacaaggaggcaaaagaaaatgaagaggttaaataagataattgtatgtttaggtggggtattagtattttcgatgggacttaatttctctgttcaaacaatttatgcacaagaaaatgtagcaattgtagatgaagggcaaaatggagatatcgaggaatataaaaatgtttatgtttggaaatataaagtagtaaatggaaatttatataaaagaaaatataatatagtaactggaaaatgggtaggaaaatggataccagtataaaatgatatagtatttttttaacaacatattataaaaatattgac

SEQ ID NO: 605 - DNA, 1009 bp, Unknown
  gut microbiota DNA sequence
tgtctcagaataatacggatgtgattctttttcttttcttcttagttcctgctcttttaacttccaggacagatacttctcgcatcctgtctgacaagcaaccctctttgatctgtgtgatctatctttacaatttaggcacggacaatctctatatgccatttatgtatcaactccttcgacttattcttcaactaatatttcaactaatctaataattagttcaactttcgcagcggacatttgttgcatactgtttctatcagctcatcatagtcttttatttcgcttggatacttgcaatagttatcacagatgttgctttttatttcatcaaaaaattctgttattgtctttggttcctctttcacgacacctgtaagattctctgttattgtcataactcatccctctctttcgctgcggcacagagtgacatcactgccactcctgcaactgctccgataaataatccgctcaaaaatccaatgatcatattcttaatacccctctatccattattcttcctcgctttcaaattcttcaatctctcgccatgcaaccacttcggttaagtttgcttcgcctgctgtaataaattttctcctactatttttactactctggtaaaagccaaaccctaaatcttcgcaatactgcatatttaatcttgttggagaatttttaattttaaataaaatcacatcaaaccatacccctttaagatagttgccatttggcaaatcatctggatgttcttttacattgtgccatctatatttttctttgtatttcctcaactctttcagctcttccaaccagtctgcaagttgataatattcttccgcacaatctaagtattttctgccctcgcaacttggaaataattcaacgctttttgttgccatttcttctgctttttttcttgtgtgtttgatagtttcttctaaattcatattctcttctccttaatctcttagttgatgtattaattgatatattagttgtt

SEQ ID NO: 606 - DNA, 1896 bp, Unknown
  gut microbiota DNA sequence
tcaaacattaacggagcttttttattatttaaatctgctcagacacacttcggtgtactatctgcaaaacaatttttttctctcgttttgcacttcaaaaggaggttttactatgaaagcaagaagttttaaaaaattctttgtgagtattgcactcagtgctgttctcacgttatcgtccgcttcctctgtattcgcagccacagcacagctggcacccgctgaacaatctgtggaacaggctcaaagtgacgattctgacacccctgccattgaatcatccgatgcacagaatgcctgcgcttctcttaccgcccagccagggatcagacagacagcagcttccgagaattctgtaactattcagtggaaccctgttaccaatgcttccaaatatgctgtcaatatcagccctttaagttcctcttcctatcgttttctcggctatattggcaatacccgcaacaaagctaagatcaataagctaaaagcaggaactgcttacgttattaaaatcacagcactgaattcatccggcattgcgatttcttcccgtactgtgggatgtaccacgctttattcaaaggtaaagattaaatcttcctatgcatcaaccggcagatataccttcaatatgcagactgtaaacccttcaaactccattacaggttataaggttgtataccagagttctgcagcccacaaacttataactaaatattttaataccagatattcctttaccattccaatatccggcaatacattttatcaggtgaagatttacccttacctggttctgggaaataaacggtatgtaagttcaacctctacggacagatatatttccaatgtcatcactcttcagaaagcaggcaacacaaacagctccatgagcgtaaaatggaacagaactgccggtgcagacaattacagtatttacataaaatatccgggaagcagttctttcaaaaaagtaaaaacaacaacttccaatttctttacactcaccggaatgaaaaagaataccaagtacggcattaaggtaattgccaataaaaaaatgaaaaacaaagtatggcattctgattccaaagcctataatatgtccttagtctgaccatagttatccatagcaattgcataaatccggctacgttatcaatgacgtagccaaaattttatattgactttcccatatctaagtgatacactgattataattgagacaaggggtgcttgtgtaaacaggctgagagtaagctgtatcgctttaacccattacctgatttggataatgccaacgtagggaaagttatagttcttccacactgcaatatgcttgttggcatattgcagttttccttttactctgaacggacatatcatatatctcccccttgttttaattgcggacaaatagtcaggcaaatgatttcatacgcctgaaaggcaataaaatattgccacgacagaccgggggcaccactctctgtcacaccagtagtttacttaaaaacttacgaatatgcgcaggtgcaagtccctgctgtatgcaggaggcgcagttcatttaatattgctgtttatctattactatgtgcagcaattaagagcccacagtgcagggcaaggaggaaaaaaatgacacagtatacaacgcagatggacgcggcacgtcagggaatcatcacaccacagatggaaatcgtagcagaaaaagaacactttgacgtggaagaattaagagaactgattgcaaaaggacaggtaattattccctgcaacaaaaatcacaagagcatcagtccgagcggtgtcggtgcaaagctgaccaccaagatcaatgtaaatttaggtgtttccagagactggaaagacgttgatatggaatac

SEQ ID NO: 607 - DNA, 429 bp, Unknown
  gut microbiota DNA sequence
tgagtggcggacgggtgagtaacgcgtgggtaacctgccctgtacagggggataacagtcagaaatgactgctaataccgcataagaccacagcaccgcatggtgcaggggtaaaaactccggtggtacaggatggacccgcgtctgattagctggttggtgaggtaacggctcaccaaggcgacgatcagtagccggcttgagagagtgaacggccacattgggactgagacacggcccaaactcctacgggaggcagcagtggggaatattgcacaatgggggaaaccctgatgcagcgacgccgcgtgagtgaagaagtatctcggtatgtaaagctctatcagcagggaagaaaatgacggtacctgactaagaagccccggctaactacgtgccagcagccgcggtaatacgtagggggcaagc

SEQ ID NO: 608 - DNA, 250 bp, Unknown
  gut microbiota DNA sequence
tacagataaaacttggttctcgttttacgatctctgatgttatatgatgtaaatgatcatgacggatattggttagtctatgatttaatattaataaaagtttttcctttttgatcacattcttcgttttacagtattcctttccttgtttattgttctcgtatgaacgagagatgctacgctgtaatctgcgtttttgtttctctagtttcttaacttttttcgttttattgatgttcttatatttatt

SEQ ID NO: 609 - DNA, 16193 bp, Unknown
  gut microbiota DNA sequence
cagccgttccacaaccactttacattttttcttgcaaaaagcaattccgtatgcaagaatatcatttcgtccttcatttcttaaccgttcatcatacctgcgttccctaatctgccgcattgcattttcgcaagctttagaaagtccctgaaatgtttgggcatattttagttctattatgattcctgcatctggatcctctgtctcgatcagaatgtctaccagtccatctccagattctatgtttgattgaatcagccattcagattcacaccgtaataatcctaaaacaattccatgataaaaaatttctttttcttcttttctggatttcgtatcaaagatgctgatcgtatttacaagaatcttcgttaagtctttttcaactgtatcggcatcaccttctttgattgcttttaaaagctggtttattggttctctgttatgcaaaacgctgtccttaaaccattcttgaatctgtaaaatataaacttctcggatttctttattcggaatcaccagacgatatactcctcgttctgattttccttgctgtgttaaatatcctgttgtaaataaaatactccaaagattatcaatactgttatcaatctcatcataagtcaattccattcgaattgatttttctatcatatcacccgcaatcaatcgttcaatttcatttctggttgtcttatcagctttatcaataaatctttttacaagatcatttccacttgtgttgatccagtaggattgaggctctgcattcggatcttccagaaggcagtctacatgattgacaacatcccatggacagtatacatcggtatctccaaaatgataaccatcataccattctttcgtttcttctatatgatctttcaaatgataatcagctaatagcctttgaacttcttcatcagtaaatccaaattgctcatcaaagcgtgaatctgtaatagatacgactttaaaattattaagtcctgtaaaaatactttcttttgaaacacgaagacagcctgttaatactgcaaattgcaaagaatcatttgtcttaagtgcctctccaaacattcctcggatcaatgttgtcatttctttgtaatatccgttctgaaatgccttatctaaaggtacatcatactcatcaattaaaaggatggttttcttcccataatgcttatatagcaattctgataatatctttagggatgagatcaatacttcttcattcatcgaatacattccatcactcaaagaaatcattgcatgatatatttttttatcatcttctgtcagtcgatcactatctgataaaaaatgaaaacgattagcttcccttccaactagctgcatcaatcgatattttgcattttcgaacgtaaggccttcgactccttttaaagaaagaaatatgactggaaattttcccatgtattcttcttttagctgctgattatctgaaatataaagtccatcaaataatgtttgatcggtcccaatctcaaagaaatacttcagcatactcatattcaatgtttttccgaaacggcgtggtcttgtaaatagattcacttctccccatcgttcaagaagttgttcgatcagctttgttttatctacataatagaaattttcttttcgaattttttcaaaattatcaattcctatgggcagtttcagcttcctatccatttctgtacacgctcctttccattgcctgttatgttgattttatcatttgcatttataaatagcaagaaatcgattataataggaactatcaagggacgatggttccagttgtagtataaagacaaagataacagatacaaggaggaagacatgaatgtaagttcaacgtttaaattaaacaatggaaatgaaataccagtgatggcactcggaagttgggacagccgcggggacgaagcatatcaggcatgtcttgatgcattatcatcaggctatcgtcatatagacacagcagcctattacgagaatgaagcgctggttggagcagctgtcagagattgcgagatcccaagagaggaaatctttgtgacaagtaaaatgtggtacgaagatatggtagaaggaaaacaagaagctgcatttgaaaagacattaaaagagcttggacttgaatatgtggatatgtatttattacactggccgatcaatgatgtcaaaggttcctggaaagttcttgagaaatattatgaacaaggactgatcaagaatataggagtcagcaattttcgtccaaaacatttaaaacaattagaagtaacagctaacattgcaccagcggttgatcagattgaaatctgcccattccttgtgcaggaagagaccgtaaattattgccaggaacatgatattgttgtagaagcatggggacctctaggcaaaggaaaacagctttcagaaccagaaatcgtagctattgctaaaaaatacaataaaacacctgcacagatcatcttacgctggcatttgcagagagggatcgtaagccttccaaaatctgttcacaaagaacggatcatacagaatgcggatatctttgattttgaattatcaaaggaagacatgcagatcatgatgtcgatggacttgagagaatcaacaggcaggggatatcctgaacaatacgagtattgatttatgatgcaaatataaacaaaataagaacgagaaaatcaagttatatggagattttctcgttcttatttatttttataattatctaaacctgaattcttccagcaatttcattcccaacagcataccgttttgatccaacgccgatgatcatataatcgctgcttttacaaacaacttgcagtttacttccctgttcaatcttcagttcgcggagcttttcaacagtttcaggtaagcctaatgcccacttgacagtgcaagtcgctccctgcatgacttttgttaatggttgcatgataatccctccttcgaacttatatgatgtatttctttcttatattttattagtcaaaagtaaggttagtcaatcgcaacatataaaaactgaaaactttctcaataaaagtaaattgaatataaaattattcaggaatgatctcaccgcagattagctgaatgctttccgtgaccattccaagataattatcgtcgatcaaggcaatgatcgtatcgccaacatgaatttcagtgcttcctcgagcaatgatctcttcatcgccacgatttaaagtaacgatcaagcaatgttctggccatggaatatcttttacaagctgtttggctgcaatggaaccagtgccaacggcaaaaccacgaagaaccttatgatcagcatcttcgctttctttaaagccatttttagcaagaattcgtcctagcagactttcgtaaattggttcactctttaacagatgtgcaacaagatagctgatgatacaaacaactgccagtgaaaggaagtgttcaaatgtaccagtcatctcagcaatcagcaggatacctgtgatcggtgcacgtacgatcgctgtaaagaatccagccatggagatcgtaataaagttcactaagtaataagaaggaattccacttgcctgaatcaccagtgttccatagatcgccccaaggtatgcaccgagaatcaacagtggaaagaagattccaccaggagccccggaaccaaaacagaaggcggagaagaaaaacttagcaactaataataataacattgtagagacaagtaaagtatgtcctgtgatcagagagatcatagcatgtccacctgctaagatagaaggcagcgtgtaacaaacgatcccagatactacaaaaggaaatacgatacggtattttgctgggatttttttcattgctccaaataaatcctgtcctttcaacatgataaagttataaaaagcaccacaaagtccaagcaggattccaagaagtattaacatccaataatgtacaagaggaagagcagcctttaaatgaaaatcaaaaactggagataatccaaagacattttttgaaataaaatcggaagttacacatccagagatgatgcagactaacatagagctgttaaagttcttctgtaattcttccagtgaaaacatcacacctgcaagcggtgcattaaaggcagcggcaagaccggcacctgcaccacaagtcatcatatagcgttctttggtttgagatttttttgtaatcttagcaataccctttgcaaccatggcaccaagctgtacggaagggccttcgcgtcccagagataaacctccaagaatacataaagttccaccaatgatcttagaacaaagaacacggtgccagttctgatttaaataacctttcagctctccttgaacctgtgggataccacttccagaagccatgccttcccaagacatgagccatccaacgatcagtcccataacgatcaaaacgataaaccagacagctatccagaaaggccttgttttagtaaatgcaatgatcgtaaataatagtttttcagcgttatttaaaagcaggcggtaaatgacagaaatgcatccggcaaagattccgacaagcagtccgtcaaatacaagtgagacagaaaatccgtggggattttccagtaagcttttcatttgcttcaaaataataccctccttttcttttcatattcatatcgaattttattttactacaaattatgatataatgggaaaagattttaaaaaggaggtcgaaaaatgccgccaattacgaatgactgggcagattatttaaaagaagaatacaaaaagccatattataggaaattataccaaaaagttatggatgaatatcacactaagctgatctttccaccagctgacgatatctttaatgcatttcattttactccagtaaaggatgtaaaagttgtgatcttagggcaggatccatatcatggagatggacaggcacatggattgtcattttctgtaaaacctggagtagaagcgcccccatcattggttaatatttataaagaattgaacgaagatcttggatgctatattccgaataatggatatctaaagaaatgggcagaccagggtgttatgatgttaaacacagtattgactgtacaggcacatcgtgcgaattctcacagaggtattggatgggaggagtttactgatgcggcgatcagagtgttgaatcaacaggaccgtccgatcgtatttatgctttggggacgtccagcacagagtaagaaagcattacttgataatccgaatcatttgatattagaagcaccgcacccaagcccgttatcagcatatagaggatttttcggatgccatcattttagtcaggcaaatgaatttttgaaagaacatggactagcgccaattgattggcagatagagaatatttaatggagaacaagggaaacaatgagtaagataatattttttgacatcgatggaacattatatgattctagaatcggaattccagaatcaacagttaatgcattgaatcggttgatcgcaaatgagcacaagatcgttatgtgcacgggaagaagcaagggaatgattccagaagaatatttccatatgggatttgatggagtgatcttaggggcaggaacttatgtagagtatgaaggcaagatcctgcatcaggaactgatgacaccagaagaagtacagacagtgatcgactggggaaagaaacagaagatcggaatcatcttagaaggagaaaaatatggatattatgatctggagaacacagatgattattatattgcgatgaagaataaaacagaagcagactgtaaaacaacattatatccattaaatgaagcagtggatgttccaaaatggacataccatcatatggagctttcaaagaaaccagagatcgaagagatccttggacacaaatacaaaggaacatatcatgagcctgtaaattcagtagaatttgtaccattaggtgttaataaggcgaagggaatagaagtgatccttgatcatacaggaatttcaagagaagattcttatgcatttggtgacagtgccaatgatatcgatatgatcaaatatgtaaaatatggtgttgcaatgggtaattctgtaccagaattattagaaatcgcaccatatcagacagcaagagttgatgaagatggaattgaaaaaggcttgaagaaatttggtctgatctaacatacaaaggagagaaaatcatgaaaaagatcatcaagaaaattactgcaatggcggtcatgtcattgtttgcagcgacacaacttcagacaccacaggtgaatgttcaggcagcagatggtgttgcaacagcagaaaaaacaacggcaaaacagccaaagatctatggaagatcaggaatcgttattgatgcgaaatcaggaaagattttgtatgcaaagaaggtagatgaccgtcattatccagcaagtatcacaaagatcttaacaacattggttgcgattgagaataacaaagatttatatgatgaagttacattttcaagttatgcagttaacagcattgagccaggaagtacacatatcggaattaaggcaggagagaagattccattgatcgatgtactgaatgcgatcatgttagaatctgcgaatgaggcatgtaacggagcagcagaacatacagcaggaactacaaagaaattcgtagaactgatgaataaaaaagtaaaagaacttggatgtacaggttctcattttgtaacaaccaacggattgcatgatgatgatcattatgtaacagcaagagatatggcaaagatttcaaaagcagcacttgaaaatgaaacattccgttatgttgcatgcaaacctaattattatattgcaccaacgaacaaagataaacatggaaaagagctttggaatcatcataagatggtgaaacgaacaatgtttaactatgatggtgttgaaggtggtaaaacaggatatacaacaaaagcaggagggactcttgtaacatttgctaagagaggagatcaagaactgatcgcagtagatctttgtgcacatggatatgagttatatgaagatacgatcaagatgttaaattatggatttaacaattataagacaatcgcaccatttaagacaatgaatacagtactgaaagatgatacatatggtttcttaaaaacaggaaatgaattatctccatataagattccattaaaacatttaaatgacgtgacagtgatgttagaaaaaaaacaatctgcttccaaacttacatataaatgtaaagataataaatatatcataagttatgatggaaaacagattggttctgtgaaacttcattaattattagtacagattaattagttgtacgtaaaatgatcagattaagggcttctggtacgatagagatatcgactgggagtccttcttctaatatttcaccatcataatcgatggcgatcccggcagtttgttctgttggaagaacagataattccttcgtctggaaatattcgatagaaggatgctttggatgttctccttggaataatttaaagatcaaatctggtgcttctgtaagaagtgccattttcttgatgatcataacatctaaatatccgtcagaaacagatgcaagaggggccgcgtctgcaaaacctccgacactctttgagtttgcaaccaagaacaacatgatatcttcagttccggaatattccttactgttaaatgttaaagtcatattttgtgaaagctgttttggaaattcttttacaccttccagataataggccatcttaccaagaacggctttcttatcttttggaactttgtaagcgatatctgttaacatacctgcagccagaacattgatgaagtattcgttattgacacgtccaacatcaaccttctttgtctggaagtctttgatcatctgacagaaaccatccgcagtctgaggaagtttcatatatgtagcaaaatcattgactgttccagcggaaatgattgccataggaatattactttcacttaagatcagaccgttcgtaacttcatttaatgtaccgtcaccaccaacagatacaataaaatcataatctcctggttttaattcggcagcacgattcttcgcatcatccttgccttttgtgtaaaaaacatcaacatgggaacaaatttgatcaaggatcaatgttgccatgatctctcgtaacatagaatcaatattttgtttaccggatgatgggttgataataaataaacctttcattgagattcctccttataaacataaagtgccggaaacgaggcataagtctccggcacatgaagtgttcccgaggtgattcgaacacccggcctaccgcttaggaggcggtcgctctatccagctgagctacggaaacatacatataatttatcgaaatctattttacagattcttaacgaaaatgtcaattgaaaatagaaaagaaatactagtaaggctaagacgggttgactttttaccattttttctttaaagttattgtaataataaagaagaggaagaaaagaagaacgatgttataatatagaaagaataaaggagaagaattatgatgggaaaagtttttgtatttttagcagatggatttgaagaaatcgaaggtttaactgtagttgatatgctgcgacgtgcggagattccaacagttacagtctctatcggaagttccagaaatatcattggtgcacatcgtattgaagttgaagcagatatcatgtttcatgaagtattagaagcggagggagcaatgtatgtacttccaggaggaatgccaggaacgcttcatctaaaagatcatgaaggacttggaaaattacttcagaaggcgtataagaacgagaagtatcttgcagccatctgtgcagcaccaacagtatttgaaaaatacggatttctagaaggaagaaaggcaacttcatatccagcgatgaaagaagaattaaaatccgcagattaccagacagataaagttgtagtagatggaaaaatcattacaagtcgtggaatgggaacagcgattgattttgcagccaaattagtagaaatcatcaaaggaacaaaagagaaggacgaattactgaaaagtattgtatacggagaataatcatttatggacaaatcagagaaaatcagctggtttgagcagtttaagatcgcctgcttaaaaccaagccagtacaaaagacttcttaaccttgcaaaagggaaagttattttatttcttgcagcgatcacattgatcacaacgattctcggatatggaatggatgttgcaggatttacagtcagtgttggtggatggaagaattttattttaaacagactgcctgcatttgaattaaaagatggaacattatctgttgatcaggagatggattttgagatcggcggtgtacattttgtggcagatacatccaaggataaagtatcaactgaagatttaagcaataagtatcagatggaactggtatttgctaagaatgagatggtggtaaagaatacagctgttggaaacatgatgaatactttttcatttaagaatatgaagaatgttgaattcaataatcaggcaatgctatctatggtgccgatgatccgtatttttattgtgatcatgttctttacacaatggatcgcaaatattatttcttatttaacagtctgtatttttattacaatgctcacatattttaatcagagaacaagaatggaccgtaagaatcgagaagatgtatcctttggaaagatctttaagctgtctatttatgccagagttatatttgagttggtggaaacgattggtgttactgccggttctgcgatatttacaggaatggcgtggatgtttatttcatattttggaagttatcaacttttactcgcaggatttatgcgtccggaagaccgtcagaaaccagacgaaatgctgtaaaacaatcggaattgatctaaaaatgtatacaaagagaaaggcctcggacatttgtccgaggcttctctaatgtcatatgtagtttgggtattgtgctgggtcttacttttaagtttcaaaactagtcattatgattcgtctcattctagtcgccattgtcagtctcattctagtcaacatagcaagtctgtgttcaagtcaatgatgtgtccgttactcttgtctgcaagatgccaaaaacttgtcaaaaactagtacgcggttatgtataaagtcttaagaaagaatttcgtatatcgatggagaagacccaaggaattaccattgatatacaaaaaaaggcgctccaatcctatgatcggaacgcctttgttcttgaacaattttaattatacacatactatagaaaatgtcaataaaatcatttgtacatttttaaaaacattaaagataaataataaaaagagcagatagggaaatctgctctttttgaggggagtataaataaattaataaggggttataatcgaaaataaacatatcctcgataagttcatgatatatgattggttgaaaaaaatcaagtgatttttttaaaaaaagtaaaataaaagtaaaataattttttttttgtatatatgaaagagatttcgcacaaaataatgctgtattaaaaagaaaggagaatgaacatggcaaagaattgttcgaattcaagtaacaaaaatcagtcttccaatacaagcaacagcggaggatctaacagatcaaagaaccagaataaaaacaaaagtcagaatagttcaacaaacagcaacaaaaatgcaaatgatgagtactaattagaagagaggaatccttgtgaaatcggcataaggattcctcttttctatagaaaatacttgttagttccaagagtctgtgatgtgcatatgctaacaaaaagaggacttttatggaatttgaaaatatatcattaaaagaagggatcaagctttcaaaagataaaaagcattatattttgatggatgtcagagaggaagaacggtacaaagaagggcatttagaaaatgcgatcagctgtccctatggaatcttaaaagagtgttatgaacagatggatgggaaaaagatcattgtttattgtgatttcggcggacagagtatgatggcagccagacacttgaggaaagatggatttgaagtttataatatcatcggtggtgtctattattatatgaaagaaaaagaacaaaataagtcggcggctcagcatattacaaaagttgacagttgacgaaaaataaggaaaacggtagaataggaacagaataaaaatacaaaggagaattgagtgaagacagttgaactgattgcaccatgccattttgggctggaagcagtattaaaaagagaaatcctggacttaggatatgaaattgttaaagtagaagacgggcgaataacatttcgtacagatttagatgggattgcccgtgcgaatatatttttaagaacagcagaaagaatcttattaaaaataggttcttttaaagcatatacatttgatgatctgtttgaaggaacaaagaaacttccgtgggaagattatattccagagaatggacgcttctgggtaaagaaggcatcaacagcgaagagtaaattgtttagcgcaccggatatccagtcaattgtcaagaaggctatggttgatcgtatgaagtctaaatacaaagtatcatggtttaatgaagatggagatgattatccggtccgcgtatttattttaaaggatcaggtgacgattagtttagatacaacaggtataccgcttcataagagaggataccgtaagttggtcagtgaagcaccaatccgtgagacactggcagcagctcttcttatgctcacaccatggcataaggatcgaatcttagtcgatccattctgcggaagtggaacatttttgattgaagcggcaatgatggggatgaatatggcaccaggaatgaaccgttcttttgaatctgaacattggagcaatttcctgccaaagaaagcatggtatgataccattgatgaggcaaatgatctggtcaatcatgatatagagatggatcttcagggatatgacaaagatccaagaatgttaaagatcgcaagacagaatgctcaggatgcagaagttgatcacttgattcattttcagcaaagagaggtcaaagatttacgacatccaaagccatatggatttatcattgctaaccctccatatggagaacgactggaagatcaggagactctcccacagctatatacagagatgaaagaagcatttgaccgcttggatacatggtctaagtatgtcatcacttcttatgaggatacagaaaaatatcttggaaaaccaacaaagaaacgtaaagtttacaatggaatgatccgaggagagttttaccagtaccttggaccgaaaccgccaagaaggagaaaataatgaaacagagattaatctttgccacgggcaatgaacataagatgaaagagatcagagagattcttgatgaatccaaatacgagatcatttctatgaaagaagcaggagtagacattgacatcgtagaagatggaaaaacatttgaagaaaatgcgttgatcaaagcaaaagcggtgatggaagtcacaggacagttaacacttgcagatgattcaggattagaaattgatgcactaaatggagaacctggaatctattcttccagatatcttggagaagatacttcttatgtgaagaaaaacagtgtgatccttgaaagattaaaagatgtaccagaagagaagagaagtgcaagattcgtttgtgcggtcgcagctgcatttccagatggacaaacgaaggtgattcgtggtactatggaagggattataggatatgagatcaaaggagagaatggatttggatatgatccgatcttctatttaccacaatatgggaagtatagtgctgaactgagcagtgatgagaagaatgcgatcagtcacagaggcgaagcactgagacgtatacgagaagttttgtaaataaaacaaggagaaagtttatgaggatattggtgatcagtgattcccatggacgcaatgatgatatcgagggagttttaaaacaggtaggcgacatcgatatgatgatccattgcggagatgtggaacgtggagattcatacatacgagaaatagcggactgcccagtagttatggtcgcaggaaacaatgattactacttagatctgccaagcgaagaagaagtgagaattggcgattataaagtattagtgactcatggacatggctattatgtaaactcaggtgtggattatttaagagaacatgctttggaatatggatatgatgttgtaatgtatggacatactcatgtgccatatattgagattggggatgatgtaacgattttgaatccaggaagtatttcctatcctcgtcaggcaggaaggaaaccaactttcctgatcatggagatcgacgaagaaggacaggcacattatgcccatggatattacaaagaacagtttgacgaattaatgctataatatgaatgatggaagtatcgtaggtggtatttccatcttttttctgcgataggtttgatttgataagataagaaagggatgacaatgaagaaaaaagatatcattgaaggaaagatcataaagacagaattcccaaataagggaacatttatctgcgaagatcagaaagttacagtcaaaggtgtcattgatgggcagatgatcaaagggcagattaccaaaaagagaaaaagtggctgtgtggtaagattgttagatgtattagagaaatctccattagaagatgcaaaaccagtctgtccacactttggaatatgcggtggatgtttttatcagacggtatcttatgaaaaccagttaaagatcaaagagggaatggtacgtgatctgttaaaagatcatgtcaatgatgatatatgggaagaaatcaaaggaagtcccaaagtgcatgggtatcgcaataaaatggaattctcttttggggatgaggtaaaagacggtccattagcattgggaatgcacaaaaagaacacattccatgatattgtaaacatcacagactgccagattgtagacaatgattacaatctgatcgtaaaatgtgcattaaatatcgcacaacagatggagctgccattctatcataagatgcgtcatgaaggatatttcagacatttagttgtaagaagagcagaaagttctggagatattttggtaaatattgtaacgacatcgcaggtagaagcagatcttaccaaacttagagatgcattattagaattaccattgagtggaaagatcattgggattcttcatacaacaaacgacagctttgcagatgtggtacaggcagacaaaatagatattttatatggacaggattatttctatgaggaaattttaggattaaaattcaagatttcaccattttcattcttccagacaaacacattaggggcagaggtactttataagactgccagagattttgttggggagacaaaagataaagtgatctttgatctgtatagtggaactggaacgatcgcgcagatgttagcaccagttgctaagaaagttgttggagtcgagatcgttgaggaagcggtagaggcagcgaaagtcaactcagaattaaatggattggataattgtgaatttattgcaggagatgtattaaaggttgtggatgaattagaagataagccagactttatcgtacttgaccctcctagagatggaatccatccaaaagcgattcagaagattattgatttcggggttgaacagatggtatatatcagttgcaaaccgacaagtcttgcgagagatctggaagtgtttgaggcagcaggatataaagttaagcgagctacagcggtagatcagttcccgaatacggttcatatcgagagtatcgtattgctacaaaaggacaatatctaaaaatccttgagtttaagcggtttgtgaagcattttagttttaagaaaataagtgaaacttacagtcaaaaagagcttttagaagaaattatagttgttgtagctcttgatatcgttgagagggacacaagaaatcctagtttgataaatgaaagtaaattatcggacagatgatagatatatgaaatgaatttgccataggtaaatcttcctttgaatgtatttctgggtcttagggtataccctaacaagttaaaaattgataaaaaaagaagcagatcttagaggactgcttctttttttatcaattttttcgtaagtgtccgtacacttactgtgcttgctcatatactaatcgctcatatactaatcgtgtaagaacaactttaagcataatatttatattattataccatagtttggaaaaataaaaaattatatttcatcaacgtttcataaaaggtgtgtagaatgttattgaaagtagctataaaatactattgtgtaaaaaataaaggaggaataatttatgaagaaaatagtatcaagaggagcatgcctattacttgcattaggtttgagcttaaacgcagttgggtgtcaaaaaagtaatgaaaacaataaaattaaggaaggacaatccataagttctgaagaggcaggcatgtcaattaatgcaaatggcaaaaatgaaacttttaagccatcagattatacattggaggcaaagaaagaatatgtttatgaatatttagggcttaaatttaaactctcagacaaatttagaaattatatagctgataaaaagatagcgatgttagataatcaaagtcctatagataaagaactaaagtatgctattttgacatttgaaaaaatgacagaagaacaaaagaatgcagttatagaaaagatgggcgatggatataaaaattggaaaaatgagcttgaaagaattgggactattggtatattcgaaaaaaatacatcaaaagaaaaaatatctaaaattacaaaatgtgatactcatactaaaataggagtttcaagtgatggaaaatacgattgctatttaagcacaaatagcggagctgaaagtaatcttctggatgaa

SEQ ID NO: 610 - DNA, 403 bp, Unknown
  gut microbiota DNA sequence
atcgcatcctggagctgtagcaggttccaagggttgggctgttcgcccattaaagcggtacgcgagctgggttcagaacgtcgtgagacagttcggtccctatccggcgcaggcggaggaaatttgataggagctgtccttagtacgagaggaccgggatggacggaccgctggtgtatctgttgtactgccaagtgcatagcagagtagccaagtctggaagggataaacgctgaaggcatctaagcgtgaagcccccctaaagataagatttcccataccgaaaggtagtaagaccccttgaagacgacgaggtagatagggcagaggtggaagtacggtaacgtatggagctgactgttactaatcggtcgaggctttaaccaaagaaggctgaagtgta

SEQ ID NO: 611 - DNA, 58733 bp, Unknown
  gut microbiota DNA sequence
aaagcatactcgttgaagtaggaatgaaacataaaggtttataactttttataagttttcagtaacggtagcgtgaatatgtgcaaggcacttgaagaattagaggaaagaggtcgccaggaaggacgattagaaggcagattgcaaggacaaatagaaaataagcttaagttaatcgtgaaaaaaatccataaaaataaatcttttgaccaaattgtagatgaattggaagaagatgcggatgttgtacagcctttgtatgattttgtattgaagcatatagattggggcgaggatgaaatggttcagaagtaccttgagaatattgaataacttattatatatgaaatatggagaaggaagtcctttatgcaacttctttctccatattttgtttcttaataaaactcttttaaattcctaactgtttccttcgtatattcacataaatattttgaaacaccctcagaatctccacattctgcaatcgctgccgctgcacatgtattacatacatgtcttaatttacattgattacattccatgcttgttttgatctcttctgtttctttcacgatcttattccacaatgtcataaaatcatccgttgtatcaaaagcatcataacttggctgatctaacacgatacatgaacgtatcatgccttgccaattaacaacaaacgaactctgcccagcccggcatgtcatatgcccaggacaggcatctccttcttctgtatgttctgccagataaatggtctgcttcgcatattgctcaaaaagttcatcccccatttcacggtgtaagatttcaactcttgcctttgcagcatcctctgggtttaatctctcctgaaaattaaaaggagttgtccgctcacgcacggatggatacatataagtgtcgatccgaactgggatatcatacttttctccgatatctatgatctccatcctgtcatgaaaattcttcttcacaagacttccattgatcttgacatcaatcttatatttttttaataattcgatccctctgatcgttttgtcaaatccatccttcatatggcatagattctcgtatgtctcattctttgatccatataaagttatatttatccttcttggcttattcttcgcaaaaaattccgcccattcctcattgatcaacgtcccattggtattaagcgtgagaatcatacccatatcttttaatgcacagtataattctttaaattgatggaataataaaggctctccacccgttaacaacaagaacaatgtccctgcatctttcatttgctttgcaagggaaatccattcatccaaacttcgcaatcttccttgggactgcatttcttgtttggataaatggacgtagcacatgtcacagtttagattgcagagaggcaataactccagtactccataaagcggaatacagttccttgctgcctttgcgaaaagttggcgttcgaaggtagtgttagtgtcaaataggtccatgatcactctccctgtaataaaaaagaaccggtaggtcggttcttttttgtattttttatgatttcgctgttgcccattctttcatatttaaattagttgtacaatgcgtattatctcctttaggacctctccatacaatgacattttgtggtctatcagaccctttcattatataatatccatctaaaaacttatccgttgaattagcctcatgtgtagtaccacaagcatgataaccaccaagtttttcatctcctggatggtattctccccatccttcccatcttccttttttctgcaatcctggttctccatttgtttctaaccacactgttccagaatatccaccaccagcatcacatctaaacatatacaccgttccgctatctccgcaagccgccacatactcattcggtgtaaattcttctatataagcacttggtctttcatatcttcttttcataatcttttcccctttccttctatacaaattctattttcatcttatattgcacattctgcaacatcttttctcatgactatattatactagaatcttccatttaatgcaataaaccatctgtaaaaggcatctttttttcgtaatctgctatttcaatatacagttattgatcttctaacagctcttcaaggcttaaaaaaatatcgaaattcgaaaatcacgctaaaaacaatcatttttctctacaaatgattgcaaaattcagaatttaagattataatgggattaaattctgggggttaagaatgatgatttattgacatataatattaaaaggggaaagttgttatgaagaaaatgtatgaaaagccaatggcttttgaagaagcatttgtggcagatgaatatgtagcagcatgttattttttagcttgtaagcgtggaactgactgatgggatggaaacgttgctcattgggattatcacgccgaatacggaagaaacgtatctcattctccattaggaactgcaaatacatgcggagataaaactgccaatcgtgtaatcactgataatggtggtgtttttgaaaaggttcaagaacataacggtgaacaaggatggctcgatggtacttattgtggttatgacgataatgataatagtaacacactatctgctggagatactgtttattggtctacatttagtgaaaataaagatagaagatggaaccactacggaacccttgagcaagcggatgctaatcatccaaatcattcataatttaagaattctaatagaggctatgatttttacatatattgtaatttcatagtctctattttattgtagaagaattagatttagatgctgactttgcaaaacctctttatgattttgttctaaaacacattgatttatctgaaacggatataattcaaaaataccttgaaatgtaatacaccccttatctttcttccaatttctttatacaataaagttataaagaaaaattatcaaccaacaccgtttaacatacaccctctatatactgatttgaatagacttcagttttatgagacaaaaataagataagaacaaatatttataaaaaaacgatggtaacgatcagcagattttatgtgcgttttttacaaattcgcagcgccctgtggttgaatgtctgaccgcagctgcgagcattttggcacgcagccagggagttttcaaaggaacaggcgcggataagcgatttgtaaaaaacgctcataaaatctgcgtgttgccatcggttttttataaatatttgttcttatcttatttttgtctcattgactaaacactattttaaacgttccgcaattgccttaataaactcttcactattcacagcattcacattctcaagagttgtaataagtgccaagtcttttgtcattgtaccactctcgatcgtgtctaatgtagctttctcaagtttatcagcaaatgccattaattctttattgccatctaattctccacgttttcttaacgctcctgtccatgcgaagattgttgctacagagtttgtagatgtctcttcacctttcagatgtttgtaataatgacgctgtactgttccatgagctgcttcgtattcatagtatccgtgtggtgatactaatacagaggtcatcattgctaatgatccgaatgcagatgagatcatatcactcataacatctccgtcatagttcttacatgcccagataaatccaccttctgatttcataacacgggctactgcatcgtcgatcagtgtgtagaaatattcgattcctgctgcatcaaatttctctttgtattctgcatcaaagatttcctggaagatatctttgaatgtgtgatcgtatttcttagagatcgtgtcttttgttgcaaaccacagatcctgttttgtgtctaatgcatatgtaaaacagcttcttgcaaagcttgcaatagatgcatcaatgttatgcattccctggatcactcctggtccgtcaaaatcatgaattgtttctctgatttctgttccgtcttctcctgtaaatactaattctgcttttcctgctcctggaactttgatctccacacctttgtatacatcaccataggcatgtcttgcgatcgtgatctgtttcttccatttgctgacggttggttcgattcctttgactgtgatcggtgcacggaatactgttccatctaagatcgcacggattgttccatttggactcttccacatctcttttaaatcatattcatccatacgcgctgcatttggagtgatcgttgcacatttgactgcaactccatatttctttgttgcttctgcggaatcaaatgtaacctgatcgtttgtctcgtttctgtgttctaacccaaggtcataatattctgtttttaaatcaataaatggtaataacaattcatctttgatcatcttccaaagaattcttgtcatctcatctccgtccatctctactaatggagtggtcatctgaattttgctcatggtcattcctcctgcgttgctgtttattgttttattcactgttttcagcttattgtgctttattatacagaaaaaactgatatttgtaaataaatgtattaagaataatacacgttatttgaaagttgaaaaacaaagctattccgatctccccgatatttcgcaatcgaatattcaatcgctgtatgactttcatcatatcctgtggaatgaaaataaaataaaggatctccatttttgacatctaacagatccgcacatgtttcatctgcaaggatcacatccaactttctctgtatggatgtgatatctcttccttccttatgaaatgtctgatataaactctccttttcaaaatcaacttctgacaaatgttcaaacagtctgcatggcacatacgttgtaaccagaacattaggctgatcatcaacgtatctcaatctgaccagtttataaactttttctgtttctttgagattcaatttctggcagacttcttcttctgccttttcttgtttgaatgtcagaacttttgtcgatggagtcagtcctttttcttttacttctttatcaaatgtctgaatcacctgtgcaaattcctgccggatcgttggatcacatacgatcgtccctcgttttttacgtttttctaaatatccctcatctactaaaatctgtacagccttacggatcgtcggacgactgactttgtagatctcagctaattcgtattcatttggtatgatgcttccttgctggtaaactccacttaagatcttatctaataaatctttttttatatctaaataaaatgctcccattttatactctctttcttttttctttcactttatcggattttttattttatgtcaatttattttcttttattttatttacataatattgacataatgattacataatgttatattttaattaacatgaaacaaacatatcagcaaaaacaggaggtttttatgaaatcatatacattagatgatcttgcaagaatgatcgatcacacaaatttacatacggatgcttctcctaaagacatggaggtcttatgtaatgaggcgaaagaacatcattttgccatggtagcgatcaatcaggtgcagtctggattatgtgcaaagttactggaaggaacggatattcatacaggagctgctatctctttcccattaggtcagacaacgatcgcttctaaagtctttgatacaaaagatgctattgcaaatggtgcaaatgagattgattatgttgtaaatcagacagaaatcaaagcttctaactgggattatatcaaggatgagatgtcacagatcgttgctgcctgccatgaaaaagatgttacttgtaaagtcatttttgaaaactgttatcttaatgatgaggagaagatcaagctttgtgaaatcgccaaagaggtgaaacctgattttatcaaaacatccactggtttcggtactggcggtgctacttttgatgatgtgaaattaatgaaagagcatgttggagatgcggtaaaggtaaaagctgctggcggaatccgtgatgccaagacatttatgaaaatggtagaatgcggtgcccaacgtatcggaacaagtgctggtatctcgatcatcaaggaattcgaagctatgatgaaagaacaaggcgtttccacacttgagatctagggcaggaggtattttatgaatcagtttaactgggatcaggcttttactttggattttgatctaaataacggactttccaagcacgcagatactacaaagcgttatctttcccagatgaaaaatatgtatcaggatcaagaagctgttgaagaaattcttaaacacgaagaccctttgatctatgagttttatgaacttggatgcccagagcgtgctggtgatcttgcattcggcacaacgatgatccatcctggaaagattggaaatgaatattatatgacgaaaggacattttcatcagatcgtagacactgccgaagtttattatacattaaaaggcgaagggtatatgatgcttgaaaaccttgacggtgattggcgggttgaacggatggagaaagggaaagcattgtatgttccccgcggatatgctcaccgcaccattaatactggagatgaagtcctgactgctttttatgtatttgatgcagatgcaggacatgattatggaacgatcgaaaccaaaggataccgccatattgtttgtgagatcaatggcgaagtaactgtacttgacaatccaagatggtaatgtgatttaaaaagagagaaaatccagacatttagaatttgtatcttctaaatgtctggattttctttattaaaaggtattaacagctatttttgcacatgcagtaactgatgtgctttatgacttcccggtgatccaaagtattcatcatacagatgtttgatatctggattctcgtgtgaaaatctcaaatgggctgtcttatccaggaagtacaggttggatccacggtcagatgccagttcttttccttcatggatcggctgtccgcctccacctacacatccgcctggacaggccatgacttctacaaaatgatagtgtacttctctcttctggatcgcttccatcagatttcttgtattctgaagtccactcacaactgcgatatctatcgtattgccagcaatctcaaattgggcttctgtccatccgtttttgttcactccacgaatctgtttaaatgcatctacttctggattctttcctgtgatcaggtaatatgcagaacgcagtgccgcttccataactccgccagttgctccaaagatcactcctgctccggttccctcagtaaatggagtatcaaaggctgcatcttttaatgtctttggatcaatatggtcagcacggatcagacggtccaattctcttgttgttaacacacagtcaactccatgtcctgcaaactcaccatggaataatggtttctctctttcatctttcttcgcaacacatggcataatggataatgcaaaaatgcggtctgggtcgatgttcatcttctttgcaaatgcagtcttcatcactgccccaaacatctcctgtggagatttggcagaagataatctgtttaccatctgtggatactgagatttaatgaaacgtacccatcctggacaacaggatgtaaacattggatacatatcaagatctccatttgtaaatctctcgacaaattccgttccttcttccatgatcgtaagatctgctgaaaatgttgtatcgaatacataatctacaccgatccttcgaagtgcatctacgatcttctctaccgttgcttcttctcttgataatccaagactttctccccatgcagcgcgaactgctggtgcgatctgtgctaccacgatcgtatctttatcttctaatgcgcgatataatttgtctgtatcatctcgttcacgtaatgctcctgttggacaatgtgtgatacactgtccacataatgcacaatctgctgttttgatatctctgttttctgaaactccaactgttgttcttgctccagttccagatacatcccagatatgcattccctgaatcttgtcgcatacttgtatacaacgcatacatttgacacatttgcttgcatcacgtaccaatggatatcttgtatcccattcttcaatacagatctccttcttataagggctgtctacaatattcagatcattagcaaccgtctgaagtgtacaatttccgcttcttacacaagttgcacattgtgcatcgtgctgggaaaggatcatctctaccgtatgttttcggtttctgcgtactttcggactgttggtatagatcgtcattccttcttctaccacgttattacaggatgttaccagatgatcctgtccttcaatttctacaacgcagactctgcacgctccaatttcattgatatcttttaaataacaaagctttggaatcggtatatgaatggaggctgctgcttccatgatcgttgttccagaaggtacagcgatcgtgtggttatctattgtaatatttaccattttgtatccctacctcctttgaaaataccataaccaaagtggtcacagcgaagacatcttcctgcctcctggcatgcttctttctctgtcatacagttttcgactccttcaaagtctttaactctctctccagcttctctctctgtaagattaactcttccacatgctggtttatcttctaacttaggttctggaatttcaacatctgctgtgatttcatgatgatatcccagatattcatcgatattggctgcgataactttacctgctgcgatcgctgaaataactgtggatggacctgtcgcacagtctccacctgcaaatactcctggcatctcttcgaatccaccaaatttctctacgttgatctttcctctctgtacgggaactcctgcttcttcgaagtgctgatattcgatatcctgaccgatcgctacgatcagtgtctgacatgggataaatacgtcatcttcccctgttggctttacagatgctcttccacctttgatattactgatcatctgtggtgttacccatatacctttgacattgccttcttcgtctttttcgattcttgaaggtgccatcaatgtcttgatctcaacaccttctgcttctgctcctgaaatctcatctggaagtgctgtcatatcggcaactcttcttcgatatacgatgctgactttcttcgcacctaatcttacagatgtacgaactgcatccatggaaacatttccaccaccgatcacggcaacttcttttccttccaggctttcctgtgttccgtatccgacatttcttaagaactgtaccgctgaaataacgcctttggcatcttcgccttctaatcctaacttcttatctgtgcttgcaccgatcgtgatcagtacagcatcgtatttttcttttaaatccacaatggaataatctttgccgatagcttttccacaatctactttgactcctgtgtctaagattgcctgaatatcatcatctaagcgttcttttggcagcctgtagtttggaattccataacgtaacattcctccaagttttggaagcatctcatatacggttacctgatgccccatcaactgtaagaaatatgctgcacttaatccacctggtccaccacctacaacggcaatattcttccctgtagattctgcacattctggcggtgcaacgtatcctgctgcatctgctgccatacgttttaatccacggatattcaccgcatcatcgatcatatttctacggcataatgcttcacatggatgctcgcagataaatccacatgttgttggaaatggattatcttttctgatcagacggatcgcatcctcatatcttccttcacgcaccaacgcaatatatcccggaatatccactctcgcaggacatctggatacacatggcactggctgctttaacgtacttaagcatcgatgatacatgatatgttctacataatcatctttaaatccaatggctcctttgtataccatattggctgcctcatagccgatcgcacaatctgcagattccataatggattttgctgtttcatgtatctctgttaaagttcggatcgttgctttgccatctaaaacatcagtgatcagattctttaactgtccaagtcctacacgacatggaacacactttccacagctctgtgcatgacagatctccaaaaatgctctggacatatcaaccggacataaccctggcgggcttgactcgattcttcgttccaaatccttataaagaccttccacaaccagctgtgcctggttcggagaccttaattccaaacgactcatgactcatcctccttaattcctctatatcagtatattgactctcattatacgcacatttttcgacaaattcaagcgttttttgtgcaatttgtacgttaattttgtaacaattcggttcatttttgtgtataatcacgttaattttgtaacaattttaagttgcagttggccaactatagattttgaatatatgataaaaaataaataaacgatcgggagagcagctagagaattttactcacgttttttacagatcgctgatccgccggatttccttgcgaactcgccttcaaaggtatttaaatcagtactctttgaggctcaaacaacgcaccaatccggctgcgaatccgtaaaaaacatggcaaaattctaatgctgctctcccgatcgtttatttattttttatcatatatcagaagtctatcgtgtggacaattacaaacttggaaaatttaagtggatgtttatttctatcacttatatgcacgcctattcacaaaatcagaatctaatatgatacaatgattcctccatcgcatgcgtacaaactgctgactcctttagtatctacaatatcaacgtcttctgcgtgtaagtgcttcttgatcaattctttcacataaacagctctctcgtagcaattgcagtgtgaaatgacgaattgtcttcttgtgagatctcttccttcgcttcccatgtgttctaccatcttcgcgagtgctttcttcattcctcttgcctgggctgctttctggatcacgccgtctcttgtaccgatcatgactggtttgatatttaatgcaccggcgatcgttgcagatagtcttgataatcttccgttctttcttagtacttctagtgtctccaaaacaaaatatgttctaagacttgttgtatactcttcaatcttatcaaccacttcttcgaatggcattccctgacttgcatattcgttgagcttacgtgcgatcagaacctgagtcgtagcggctcctctggaattcactacatgaatattctttgttccgttctcttcttcatatagattctttcctaaaactgcactgttgtatgatccacttaattctgcagataatgttaccacatatatatcatctgccttggaatatgcttccatataactctctggtgcagggcatgctgacttcacagactctttacttgctgcaacctttgctaagaaatctgcctgatcaaatgtttcatcatctatgatttcttctccatccactaataatgtcaggggtactaaagtataacatcctttttttaaatcttcttctgtcaaatccgtacagctgtcacaaacaatatgaaaactcatattcgtatctcctttttacaactttcttatctggtattcattactacttattctaacatatatctacgcaaaaagaaacatgcaaacaaagtttcttttaagttcccgaagtttgtgaaaaattttacaggtactttgttaaaaatctttctttcacttcctgatcccacgcttcttccaaagtcttatccagtacaaatgtctttctggacactcctgatgtacactttaatccctgtcggtcgtataaaatgttgataaataatcctgctatttcatcttctcggactgcaagattatatttggcaagaaactctggagaaagatctggttttaacatcatcacaaattgaaaagacagcggtgtcttcttcccttttacgagagaaaatattttttctttctcttcttcccacgttacatatggatattgtttcatctctttccattcttctgtatcataaaattcttttaagatctttccatcaaattcatacgaaatgttcatggacagttttccttcgctcatcaagaaatcatcaaaaagatttcctcctaaaaaacctgccataaacttcttaatattttcaatttcgatcataaccataggcatattctcctgactaaaaaatggaaccctgcctactcacagggttccattttattgtatctttctttggttcttttttcaaccggttttactgtccaaaactataatactggctgttagaactttcattattataattattgttgtaactattgctgttattactattactattgctattgctgctgttactgcttgtgcttggtgcatctgatttctttccaagagtaactgtcagtgtcttcttctcataagtacccatctgattctgacgttttacaacaactttaactttcttgcctgctttcaggtttgaaatcttttcttttaatccatccattgtagaaacgttgcttccattaaaggatactatcacatctcctgcactgatgcctgctttctgggctggggaactcttgatcacctgctgtacataaacaccagatggcatatcaaactggcttgccatagaactgtcgatcgtctgacctgatacacctaaatatgcctgttcactctcacttgttgcctcattcttgatcagtttattgatgatcggtcttgctgtattgattggaatcgcatatcccattccttctacatcttctgaagaatatttaactgtattaataccaattaattcacctttgctatttaataaagcaccaccactatttccagggttgatcgctgcatctgtctggatcagtgtcattgtcttgtctgtcaactgtacctgacgatttaatgcactgatataaccacctgtgacagactgtccatatcctaatgcattaccaattgcgatcgctctttctcctgtctgtaattttgaggaatctcctaatgtgatcactgcgatcttctttaaggtagaagatttcatgttctttgtatctacttctacaaccgctaagtccgcatcgctgtcagtaccacgaatggttgcacttgcactctttccatccacaaatcctacggataaagatttggcatctgctacgacatggttatttgtaacgattaaaatcttaccatctttcttgccaatgatgatacctgaaccaacaccttcggattcactgctttgtgtctgtccaaaccaactctggcttgttgtctcgaactttcctgtgatcgatacgatcgatggcataacattttttgatacacctgagaggtcattactgctggtacttgaactgctgcttgttgtcttcgttgttgcaagctgtgttgcaccatttccaatgcctgctctgctaaatccatatgtgactccctgcatcacaagccctgcgatcaatccaaaagctactgcagatgctgctaattttgcaacatattttcctctgccgccatttttgtttttcttaggattggaatggtcgttcgcttcctccgctctccactgatcggaagtcttccactgtccatcctgatttgtattatattcactcatgattaattctcctttcgatcctgatcttttgtttcgacctttatcttttatgagataaatatatcttataaatgtgtaaaaactgtgattaatatgttactaaaaaatgatttcctcttttttctcatttttcgtgaaaatgatgagagtgtcaataagtacaaaatacaaaaataagaaaaagttaagtcatttgtcattgtatgatctctttttatcccttataatagaaggaagtgaaaaaggagtatttatcatatgatcaaacaaaaccaaacttacttaaacagactgcatgtcgtgatggatgctgtctgcatttattttgcaggatttgcagcatggtatataagatttaaatgcacgatctttggattctggctgaatcaggagattttcgatctcaaccgctattatccagagttttatcaatatcagaaaccgctgatcagctctttgatcctgttattgttattgtattcgttctttggtctttatacaccaaagcgttaccagcgtggttccaaggaacttgtgaatctggtcaaagcgaatctgatcggacttggactttctgcatttgtgatcactgtatggcagattcagaactttcctcgttctttatatctgttattttatttatttaactttatttttggtcttttatccagatatatcatacgcaggattttgaaaacgaatcgtaagaaaggacgcaatatcaaacatacggtatttatcggtttcagtacttcagcagctgcatatatcgaccgcatcaaatcaaatcctcaatggggcttaaaagttcatgggatttttgatgatcttgtcagtgataattttgaatatcgtggaatcaagaagatcggtacactttcagatcttgccgcttatcttgagaagacatctcttgatgaagttgcgatcactctgaatctgaatgaataccataaactggaacagatcgttgcaatctgtgagaagtctggtgtgcatacaaagtttgttccagattactataactttatttccaccaacccatacactgaagatctggacggactcccagttatcaatatccgtaacgtaccattaacaaatacgatgaataaactgatcaaacgtctgattgatattatcggttctatcattgcgctgatcttattctcaccgatcatgcttatcgttgcgatccttgtgaagaagagttctcctggaccgatcatttttgcccaagaacgtatcggtcttgggaataaaccttttaagatgtacaaattccgttccatgggtgtacaggaccctaagaaagaggccaaagaatggacaaccaagaacgatgtccgtgttacacctgttggacgtgtgatccgtaagacaagccttgatgaacttcctcaattctggaatgtattaaaaggcgatatgagtctgatcgggccacgtccagaacgacctttgtttgtcgagaaatttaaagaagagattcctcgttatatgatcaagcatcaagttcgtccaggtattactggatgggctcaggtcaatggattccgtggtgatacttccatccgaagcagaatcgagcatgacctgtattatattgagaattggtctttgggacttgatatcaagatattatttcttacattctttaagggatttgtcaataaaaatgcatattaaacagcaagaaaaggatggagtttttcatccttttttctgtacaaacttaactatttaaggaaatctggagggatacattatgacagcacagcatacaaaacatgccaaacacacaaagcgaaaacgaagaagaagatctccacttcggatcttgatcattctcattcttgtgatcgctgtattagtcggacttacgctttccacagttcacaaaaaacttgggaaaatatcaacaaaaagtcttgatcacagccagcttgtcactgtaaacaaagacagcaatatgactgactataccaactatgcttttttcggaattgattctcagactggaagtatgtcagatcgtggaaaccgttctgattctatcatagttgtcagcatcaacaattcaaccaaagatgtcaaactgttatcgatctatcgtgatacatatgtaagtattaatggaaaatacagtaagatcaacgctgcttattcttggggtggtccagagcttgcgatcagcactatcaatcgtaatcttgatctgaatattgaaaaatacgcaactgtaaactttaagattcttgctgatatcgttgatgctgttggcggaatcgaagtaaaagtcgataaaagcatcttaaagaatttaaatgcttatatcggtgacatgaatcgtatcaacggtggacattctccaaaactttcttctgccggtacttatactctggatggaaatcaagccgttgcttattccagaatccgttataccgctggcggtgaccttgccagagccggaagacaacgagaagtccttcagaagatttttgacaaagccaagaaaaatcctttgaagatgatgtctgttatggatgagatacttcctcaggtaaagacaaatatgagtcaggatgaattgtttgatatgttcttatctgttttcaagtatgacatcaaagatcagcagggattcccttgggaccagaaagagctccgttattatggtacttattatggattccctacaacattgaaagagaatgcgatccgcgcacataaatacctctttggtacatcggattatcaagtcagtgatgagcttagccgtatcaatcagaagatcatttatcgtgctggatattaatcctgaatatcaactcaaaatgcaaaaagaagctttcgatctatggattcactcatagatcaaaagcttctttttattttatattcttcaagatccctaacaatgtttcgccaaccattccctggccttctttgcaataaaagaaatcccttgcctgccttctaacctctttaaaatgatcgtcgccttgtaccagacgttcgaattcttccatcaaggcttcaaatgtctctgccttatatcccggagccgccttctcataatcgcaatacataccacgatcatgctccagataatcctgataatcaaaattataaaagactaccggccggtccagtaatagataatctatatatgtgcttgaataatctgtaaccagaatatccgtatccattaataattcctgaatatccatggatctctctgtgatatctgttatattagaatacatggagaaatctactttctcatctttatgataaaaatggcgccggatcacgaacaaaatatcattttggatacaccaatcattgagcactttaaaatcaaaatgttcttccaaaggaaattccactttaccttctttcctgtgtgtcggcgtatataagatgactttctttccttttgccgcttttgacaactgatgagaagcatgaaattttccactttgatcatagaatatatcattccttggctgtcccaatgttatgatatgtctctttgatcttcgaaatgcactttcatagatcggtgcataaaaatcacttgttgctactacatactcttttcctaatgggatttcctgaatcattcttcggattttttgacccttgctatcccaattcttgaccttatcatcatcatagccaactttctttaatggaaccccatgccaaagatttaagaatactgctcgtcccataaatgtatgatttacatcactgatcccattgcagactaccacatatttggcccgaagctgcattaaaatccctttgaaactgtcaaacatataagcttcatatccaagctccctgacttttctgcagactgattcattcttcgtgatccatatcggacggatctctttatgctcttgtgcttctaaaaacagatattttggattgtctgcaaactgttctccaagccatgctccaaagatatatatctttctgcttcttggaaataaacacgacagaaacatgatcacatattttcctgcaagtcctaatgcttttttcataaatattcctatccccaaagccactgcatcagctttcggatatttccttcctttaatacgtgatgatttttataaaaactcaatcgtttgatctttcctttataatacaattctccataactctcaagaagttcataaacatccagattatcgatctcttccccatatgtctcaacaaatccctgcatctgctccatagattcaatcatcatacgacgatagctgttctttccttctttgagacgatgatacaaaaagacgggattctttgcatctttcgcaccaacagaattattgccatgctgacggtaatacatcgttggctcatttacaaaaccaatcttgccaaacactttcgcgatcaatgccgcccaataatcatgcatgatgatcttagacatcggtaacggccgtaaaaaatattgttgcagacaacgattgatcatcatcgtacaccctgtcacagaattttgtaccatcaattgattcaatacaattctctttggaatattcgcatactgaaagaatgactctgcaaccatctctaagttatgatctgcaactgacagatctgaatgaaccaagatcggtgttttctctccatatcttgcctctaacgcttccatcttctgtaatgtcagataaatcttatctggtttccacacatcatcctgatcacaaaacataaaatacggtccgtaagaattttgaatcagtgaaataaaattgtctttggcacttccctgtggcgggtcattcttaatgatcgtcacttgttccggatattgtttactgaattcttcaagaatgctgatcgtaccatccgtagaaccatcatcacccacgaccagctgccagttttcataggtctgagctgcaattgattctaactgcgcttttaaataatcctctccattcaatgtcgctaacagaatcgttaccatattgttttcaaacctcctgactgtgttattgttcggcagatctctatctgcttaccttctttatcacgtcaatgaccttctgtgaagcatgtccatcatctatgccattgaatttatcatgataattcttatatttttctttccaactatcttcattatattctttaatatctttgatcaactgatctgtatctcttgaaatcggtcctggaatatcattgacaaagtcaaaataaaatcctctcagattctccttgtagtcttccagatcatatgcaaagaataacatcggcctgttaagaatactataatcaaacattacagaagaatagtccgtgatcaacatatctgacacaaggtataaccatgcaatatcttttgtctcgtcgaatgtataaacgaatcctttatatggtgtccaatcaatcttatctgatacaagataatgatattttacaatgaatatatattcatctgataattcctcctttgctttatcaaaatctagttttgaagcaaatttgtactttcctttctcgctatattcattatctctccaagttggagcatataatatgatcttcttatccaatggaagtccaagtttttctttgtattctctgatcttagcaggagaattatcattgatcaaaatatcattccttggatatccgatctgtaagattggacgatctttaaatgcaaaacatgatctgaaaatatctgtagaaaacttattctgtgatacaagataatcccaatccttacatgttactctaaactgttcatgataattctcaatatccgtacttccacccatatccattcggtccatatcaagcgcaagcttcttaagcggtgttccgtgccatgtctgaatgtatgtgatatgcttcttcttacgcacatataatggctgacgactatcaaatacccagattcctgctctcattaaataccaaaaatatgggaaataattattccgtatcttcttgcatttacctggaacttctatacttgtatcaaagaaaaaccagatacattcatattcttgatcaaggccttctcttaccatctcttcatagatatatcttggatttcctgtatagttacgtccattgctgctctgaaatataatcatctttttatttactggaatcagatatgttaatactttatatatctgaatcgtaatattcttaatcagttgcttcatacgtgcactcctatttacttacttcaaagaatgaatctctgcgattcttcttatcaaacatcatattgtactgaatcatacgatacttctgtattataccataatatggtgatcctttatcattaatctgataaaattttccattctttccccaatatccctgcgatgtgatcgttggaacttcttttcggacctcatttaaaaatctctgatatcctgtcatctttactccagctgtcttggtcaggatactttggatatagttcatgcttgtcttctctatatgctgttctttaatgtcataattggcccagatcacgaatggtacctgataacgcttcatcatctgttcgctgctccaagtctgatattgaccgtttgtgatcttattcataaattcatctgtcaatcttggctgatgatctcctaaaaataaaatgatcgttggctctttacatttttcaaaataacttgtcagctgttttaaactgtcatctgaatatttgatcagatttagatatctgttggcctcagcatcatatttgctgctttcaatcttgatcggctgtttaaagttggctgcatccttatcataaggactgtgattctggatcgtcatattatacatataaaatggctgatctgtcttcttacgattcttttcatattcagaaataatgcgatctacatttgcctcatcagaaatatactctctaaccctttttacattcttaggaaagtcaaatttatcaataaaatccgtaaatccaaaatctttatatacagctggtcgattataattatacggattgaacggatgcatcgctttatttccagaatatccttctgcctttagattactaactagtgaaggcatctgcccatgaatataaagctgaaatgctgtcgttccagctgataaaaacccaagagtatttcctgtcaacaattcaaattctgtattcgctgtctgaccacctacaatcgatgcatacgtatatcctgtcacacaattcttcttcaaactatggaaatagggcatataatcttcattcgtcttaaaatctcccagcaccttaatatctgcgaatgtttcattgacaactgttatgatattcggatattgctttgctgtactttgctgttcattcgctgatttcttttcatattcctgaaagatctgatcaaccttcgctgttgtatatccttctggcttcttcacgaccgcatatccaacacttcttgcaaatgtcagcacgcctccatatttttgataactttccattggacggaacatacgaatattgatctggtgctcttccataaaatcagacagtatgatctgatttgtgaacaatccgcatcctaatgcaacaacaataaatcctgcaatgtgaaatactcttttttctgtaacctttacttcatgaagtcttaaaaatgtaaagaaaaatgccatacataccaagatcacactatattgttcaaacgtcaatttgaatgtataattacccatcacgctagtagccgtctgtactgttaaaatatctggtgccatcatcggaatcccgcgaaattcatatacaacacatacaactaccgcaaagataaacaatacaaatggtacgatcactgatccaactctgatgctgttcgtcaaaaatatgatcagcagatccaccaaaatgatcattgcaagacttagaacaatccaaagtggctctttctgatagaactgtgtcggcggaaatgcacactctgcttcattgatcaaaaattctgacaagatccatcccataactggtgcgatcactccaagaatgatcacaaaagccctgtcaaccttctgactcaaacgaatgtcgcaaactgttacaaataccatccaaaaacatgccaaaaatacaaatcccatacgtttcaggtaaaaatcagtctgcacatgatacattggcttatttgataaaaagaatccaagcaatgcaaacatgaccagtaattttaaaactgcggtaactttatatctctttttttcacttttaaaaatattgctaatttctataaaatgcatcaaaaactaatcctttcatctatagcattatcttaaattctttttgtttgataacgcagaaaagaagaattccgtctctagccgttcataacctctattgttaacgaaattcctcttatatcttaattcataactcttgctatttattcgctgttgttccgtttaatccaagatcctgtttgatctttgttgtagaaattccttctgttcttggaagatatacgacttcacagtaatcttttaagaaatcaaacttacctttccagtcatctcccataacaaatgtatctacatgatattctttcacatcggaaatcttctgatcccaattttcttctggaatcacaagatccacataacgaactgcttctaccagtttttttctttcttcataactgaaataacattttttctgtttttcattccagttaaactcatctgttgatacaactacaattaaataatcacctaattcttttgctctgcgcaataaattgatatgtcccgcatgcagtaaatcaaatgttccatatgtgattacttttctcatatcacacctccgtgtcttctatcttactttgttttctcttcgtatactttacttacttcttcaatcgatccatgagaaatgatctttcctttttcaagtaggattgccttattacataatctctttacctgatctaaagaatgagatacaaataatactgtaactcctttgtcaaacatactcatgatctttgcttcacttttctttcggaatttcgcatctccgacagataatacttcatccaggatcaagatatctggttccactaatgttgcaacagagaatccaagtcttgatttcatacctgaagaatagttcttaactgggacatctataaatttgcccagttctgagaactctatgatctcatctaacttctcatctaagaacttctttgagaatccaagaactgctccataaagataaatattctcacgtcctgtatactgttgatcaaatccagcacctaattcaagcaatggagcgatcttccccttggctgtcacagttccttccgttgcttttaatacccctgcaataacctttaacagcgtactctttccagctccattcaatccaaggattccaagtcgatcccctttgttaagggtaaaattaatatcttttaatgcccagaattcattatatgaaatctgatgtttcaataacttgatcacataatctttcagatcatcaaccttttcctgacttaagttaaacttcattccaacatgttcaactttcaatacttctttctttgccatgataccctcctaaatatgcagaatgaattcatcttgcttcttatagaagaaaatcaatcctacaataacacttacgattgcaaacacgatggatgcagctaaaaacttcatattcatcggcataccaaaaacagcctgtctaaaattatggatcagaagatataatggattacattttaagatccatccaaaacctgattttaataacttctctggtttatagaaaattgctgatgcatacataatgatcattaatcctacagaccataaatattctaagtctctaaagaatactgccatcgtagataggatcattccaactccaaaagctgtgatcagtaataagatcaatggaatgatcgcctgtgccagataaatagttggatataccttcaaaacaatagatactactaccaacacgatcagagagatagcaaaaataatataattaaacaatacactggataatggataaatatattttggcacatatactttcttgatcattcctgcattcgtcctgatcgctttcatcgcaccatttgtcgcagatgaaaagaaactatacatcaaacgtccacataagatatacactggaaaatgtggatccttgtttccaaacaatgtaccaaatactacacttagtacgatcattgtcattaacggttctaacagtgtccataaaatacctaaatatgatcttctgtattttaacttaacacctttctttacaagttcccataaaaggaatctgtactttttaaaattttcaatataagatttcactgtacttctccattttgatatttttaatttacaccttgctattatactattccttaacagattattcaactatctaaaatcttccgatcaaaaatttagcttttgtattaacaaatgttattattgagtattcaatgatcagcacaaggatcattgccccaaggcagtcaatataatatctccatgccatgatccctggcattcctgatatgatcttccatcctgcagttgcagtagaaataatataaaacggtctttgtgtacacattaatatcaaagaattctttccaaaataattcagtatcgtaaatgaaacatgatcttcaagaaattcaaagacaaatagtgctccaaaagatccaatgattcctgtaacaaaaaatagtggtgggtgaatacctaaagacatattatttaaatctacaccattattttgctgtgataaaaagatatttccaattgtaaataccagtccgatcataaatcggatttctctggatgttactttactgaataacatacatccaatatgtcctatctccaagaaccataatgcgatcaatgctttactgatcggtaagatcaaaaatgatattctttcaaatgttaatggatccactgaaacgatcaagtgtctaataaaataagactcccaaattccaaaaacaggtatcacgatcaacatcacgatcctcatccatttcggaagatatttgataagacagaaaaacaggatttccgcaataaataacaccggcaaaaaccatagtgcaaatgttcctcttaatgtgatcgttgccaaaatataagatttgatcgccggaatatcaattctgtgtttcatgatcatcgttgcaaatcgaaatccaatcgacaaaacactaaataagacatatggaagcatcaatgacttcaataattttactgcatacccctttaatgtctgtgtccgataagaatctgcataccggatcagatatccggcggcaacaaagaaaattgccatcttgaatgatgccgcccatgtatcaactggattaccaagcttcgtaatatgtccccatgttaccatcaagattcctaagcctttgcacaaatctatatgttttattctcctctttttgtccattttaatatcctttgcttatgatatattcatacgtacgtttactgttatcattatcacgatattcaaaataataatcttttaattttgtatattcttctttttctttaaatccattgtgaatatactcttcaattccatcaatcaatttctcatattctgtataacgttctccaaatagttcatgctccatatccagataacttccatgcgcctgcatatacatatcataatcaaactgatagaataatacgggtttatcaagataacatacatcccagcatacactagaataatctgtgatcagcatagaacatttcttcatgatctcatttaatggctctgttccaaatgggatcaactcaatattatctccactgacattaaactcacttaaataatctttaaactttggatgaatgtaaaagatcagttttacatcattttcttttaagattcttgcaagtttctgactctgtaacagtttcatgtagtttttataataatcacttgccttaaactcttctgcgctcttttcttccagccatgatctccatgtcggcattgcaagaataatcttttcctctggttttgaagtatcttccagaacatcccatctcgtaaatccaagaatcggtgcatctccatcttcatatccaaaattctctacaatgatcttatgctcaaatcttgatgtcgttgtaaaatgagtcataggacttgaacctttcattccaaaaatcggatgtacacgttttaatgctgtcaccccatgctgtaaaaacaaaatattatgttttgaaatacgatttgagatcacatttggttttgctcgccatgtatataaatgtttctttgaatcagaagctatatataaattggcaacaagtgaatataaaatatgtcgaaaactcataaatggtatcacatgttttccatattgcttcatcttatcataatcagcagaatctgtatcaagaatataataaatatactgattcttctcttttggaagctgctccatacaatatttaaagaaataatagccattatcctgcgccatagagcagaatttctcaaatactaaccatactcgtttctttttccaatacggtaataacaaggtatacacaccaaaagctgctaattccttgatctttacatcaaatccatcatattttgatcttgtacgataagtaaatgccattttgcatgtgatcgtcgaataagggaaaataatgtgttcttggtcaacatcacattggtaattcatcagtaataattttaatctctgccatctgctccaatatgcacttactcttacttcttctccattcttctctgttacagcaaatacatcccaaaacagttcttccagtgataataccgacatatcaatctgagcatcaatgatataatgatcacctgatctcattactttatattcaaatggataatcaattgtctccactttacttcgatatgataatatgacatttttgattccagcttctttgtttttatatttcattttcacatgaacttttgaacccttgatcttgaatttcagtacttgtccacgcatattacgaacggataactgtgcctgatctcccataaatacagaaaatcttccatctacttcattcatataaggaatcacacttgtatccgcaggttcgaatgtattctgataagtaatatcatgtttcttgattcctgtcatatatacagaagatttatctaattcatccatcacttctttgcgttttgcatattctttacgatctacaaagaaatatggcagtttgttaccattttcatcttctaattcgatcatcaactgatatcgtccattcatatccgcaatttcaagcgaaagaaattcatcaaaatattccttgatacaatgatctttccattctttttctgttagatcccttgtataaatgatctgacttttcttatttacaagtaacagcttctttggctgacctttcttgccttcctcaaacttaatctccaaatggtcttccattactcgcatggatgcattgatcatttttttcttattgaaagaaaatgtctctcctgcttctccatgatagtattctgtctcaaactttgaatatactggaagatctgcaaagcatctcttgatttccctcttatgaagttcttttctgaccttggcactctttctctttaacacttcttctgcataggttcttggaagtgttcgtgtaataaaaatataatcaaaatcatcaagataattatcatgtagatgactgcttaattctggattgaagaaacgtttttcaaagatcactacatcttcatctttcttagcgatctgcgcgatcgtatcgatcgtctgtgctgtttttacatttggatagtgcaaaactcttcgtttcttttctttgttaaaactgtaatcgatcgttggcatatcgcacatatttccatgaaatacaagttccgccatattctttgcagcatcaatagaatcatactgaatatatttttctgtatattccttatcattttcataagaatcttctcggaatgtctcgttgaccagacaatctcttaatgcttccttgtcatagatctttctaaatggcaattctttgatatcaaaatacattcctctatcatgcatatattcttcatagtcatacatatacaaaataattggttttcttgtaatcgagtaatcaaaaaatacacttgagtaatccgtgatcagtgcatcaacactatttaaaaattcatacttgtcaacaccacttggaaatggataaatatgttcataattatccaactttacaaacttctgcacaattggatgaaagtttacatataacttctgatcatcctttaaattctcatctagataatgtaacagctgattgatctctctgctatattcagacgtgttcacatcatgattgctctgtccacgccatgtcggcatatatgccatcgttgtataatcttcatttccaagcttctttgtcacctgatcagctttctcatgatccataaaaatactatttcttggatatccattcatcacaacagttcctgtatacaaagcttccagattataatcttccatgatcacttttcttgtaaattcatttgggaacatgatgtagttggcatgtaagaagttatgttgcacattatacatggattcaattccaaaacgcattcgttttcctaatgtctttaacggtgttccatgccatgtctgtaggtacacctgttcatctcttcgaatgaaatacgccggaaaagaactgttattgatcagatacttagatgttgcaagtacttttacatatttaaaatctgcaatatctacaagttctactttcaatccgatagaatcaataaatttctgatctcgtttcttatcattcgtcgcaaaatagatcttgaaatcttttgattccggcattttcaaaaactcctgcaagatcgccaaggatgaatctgacacatccttgccgtgaaatgactcaaagagtgcttgtttttcattgatcttgccatgtttataataccaggcatagataaatttcatctttggagtttttggaaataatctttttacaaatcgaataatttttcttattttatccatgtttccttcttaaacctttcaatgaccttcttaaagattgttctgccttatggcattgtttattttttattttccctgcatcatattaaatactttttcagatgaattttcacattcatatggaatatatgtttcatggaatgcatcgactctctgttttgaattctcaatcgtttcatccagatgctcaatcgcatctaacacctcatcagacgtatatagtaatggtcctggtgcttctttttcgatatcaatattaaatccacgaagcttatctctatattcatccagatcatatgtaaagaataacattggtctgtcgagaactgcataatcaaacattacagaagaataatctgtgatcagaatgtctgtaatgatatataaatcttcaatagattcataatccgtaagatcatacacaaatccatctgctggaactcctttccaaccttttgctgaaaagtgatgcagtcttaagatcaatacatattcatctgaaaatttttccttcatcttctcaagatctagcattaattcaaacttatcacgcactctccatgttggtgcatacatgatgactttcttatcttttggaagtcctaatttttcttttaatctgcccatttcttcttcgttattagaagaatacaaaatatctgttcttggatatccagtatccatgatcgtattttcaaatttaaatgcagatggtgcaagatccgcaacaaacttactttgcacgatcagataatcccaacgtttacactttctaatatacttcttttctgatttctttgtagggaaatcgcctggtacatccaatccaattgtctttaatggtgttccatgcatcgtctgtacttcaatctgcccttttctcttctcataagaatcagcaaaatttacattattcacaaagtattttgctcttgccatataatataaatacttccaagatagtcttctgactctaacaccatttcccgtgatcggaatgcattcatcttttaatgaccagatacacgtataatctggatgattcttatcaatatattcatataaatatctagggttacagctaaatttacttccccacatagattcaaatacgatccattttttctttaatggaagaagtcttaataacggatataagaatctgttgacaaaagctcttttcttcgcacttcttgtcaggaattccttgactctcagcgtagtaaaatacagaaaatcatcttctggatcaataataaatcgatatcttctttctttcgtgtagtattttttatcaaaaactttatgttccccaccaagtgcacataccttctgctgttcattattttcatataaaataaacacctgacgacgtcttgcataaagattcttgatgattttttcgtcctttaaacttaaagaaatgactactttctcctcttctccatgttgattcacggatcctgttccaagaataatcttttcttcttctaatggatcttctacatacaatgttgctctctgccagttaccgatatttttgttgatgatctcaaatgaaaactgttcctcattctgttttacatctcgtatcacaggtactgcctttcgatttaacaagtaacatctatgatttcctgatgtttcttctactaactgattcttctggttttctacaaagattctctttttcttttctttgtatacaggaataaataaattaccttttttaactgcaatatatcgtttattttctggaatatctgaaatatccacagaaacatcttcctgtgttatagctgcttttaagatttccgcattatgtgcatctttcgcttcatataatgcatcaactttctcagaaagttttaatcttaactgatcaccgtccaatttcatatcatttaattcgatattgttttgtgaaatttttactttaaaatcatatctgtaagacttgctaagttcgatcagcatatgatctttaaaatatgttttcttgtccaatttattgccaagagattttaagattcctcttaaaatagtttctttcttccatctgtctctctcataagttaataatatatggtattctccatcaagctttaattctctgatcttggctgcatccagtatgatccggtatccacaacctttataatttgctaaatggatttgttttgtctcgttatcaatttttaagccaaatttcttctgtgcatattgtgacttaatactttgtatttccagtggaatcttctctcctgtacttaagcataccaaatgtgctgataatttttgtacatttacatttggcacagataatcctcgtaagaatacatatccttcgatcacacattgctctttctgccatgccacatcataaatcaattgagtaagtctccactgatctaatgcctctgtcatatctgccttatcaccagttacgatcgctttcgggaattttccaatatatttgttgccctttttcacgatctttaaattcttataattatcaacttcatattgacgcagttttactaatcgtttttcatccagattcatcaaagccacatatttttcacgatataaaactggtaacttatcgatcgtttctaaaggaattgtttcttctatataatctttaatgatcttcatcatctcgagtgttctgttatctgaaagataaatacagttgttcacatagatcatcagatcaatatataaccatttataatattttgcatcccataattcttgttctttgacattctcctcaaagaatttatctaccatacgtaaaacagtaatacgatctctcatattcgtaaagtcatctgctctctgcgtaatagacttattagctccatcacgaattctccaacgataacagacatcctgcaccattgtcacattattagcaagataatgcataggaatcgttactggaatatcttcatagagaattctctctggaaattcaaaatgattacgatcccaaaactctttcaaaattaatttattccatgaggttgtatcataaatcagatccgtattgtctgtaatatgtgttttatcaatatattttctaaatgcaatttcatgcagattcgatacatggtctttctttgagttaaatctcgcaacacttccaactaccatctcgctatgatttttctctgctgcaagatacattttctcgtatgcatcatctgggacaatatcatctgaatcaagaaaaataatgtattttccttttgcatacttcactcctgtatttctcgcatttccaagtccaccatttacctgtcttacatactcaaaatgatcatatcgactagcaaatttcttggcaatgtctgtacttccatctaaagaaccatcatcaaccatgatgacctgcagatcctctaatgtctgatctacaactgattgcagacattcttccaaatattcttctacgttataaattggtatgataacacttacttttatctctctcatcacttactcctatctctctgggaatttcaattcaatatctcctggaatattataatacatcttataacgccatacccatgctggattatatacatctaaaccataacagtatgtatctccaagcggtatttcctttaattcaatcttcttctctccttgttttatctgtgtttgtatatattgaagtctgtcattcacttgtccatgaacaaaataatatacaccaatatttccgatcatcacaaagaaaatacacatcatgatccctgtgtttaaatatcctttgcttatctttaaaaatccacttcgtatactatacgataacaatactccaagatataaaacgaaaaagatatatgttacataaaaacaacgaattgcaatcggacttgcaacgatcaatggtcccattaaaatcagttgtgaccataaaatgatctgaacgatcaccttatccttaaaatctgtaataaaccatgcactaaaagctgccaatgctaaacaatacgtcgttactattacagcctgcgctgcattgccccatgccaaataatctttccatgtaccaagattcataaaattaaatatataaaatgctaaaaaaacactgaacagaaccaagaataatccttgtcctttcttctttctcttttggagtaatatcaaaatcaatccacatgtcactatatttaataaatgatttggcatgatccaatagttaatgatcgtgtctgcgtatacctttaatgcagaggcaaaccattcaaagcttaattcaaacgctgcaatctcttttcctgttccttgtgatgtatgtgccgcagccatacgatatgcgctattcgagaacatccaaaatgcaccaataccaaccatgatcaaatgaagtaacattcctttatgcagcttcttatattgtacaccataaataattaaaaaagcgatacttagtacaattagatataccgttgaattttcaagaaccaagcttccaagaaatgcattgatcattgaaatccctgttttcaacttcgacactttcttttctttgaaaatagatatatgatatagcaaaaatccaagaatcatcgttgcgctaacacagaaatttgaaaatcctgatacccatccatacgtctgactcattaagcttgttggaatattgactacaaaaaaaacacaaattaaaaatgataatatcttatattctgtcaattgatatatcaagtataacattgcagtcattatcccagaaatagccatacctctcaatacgatcggcaatcttgttaaaacaatgaccaaaatatctccaaagtaacgtccattatatccttcaaaccacgtttttaatctcatgatccctacttcacttccccatcgccaatcatccagtgcttccggcacccataactgccaaatggaaaataatacaaaaaatatgatcaatatccaaaatattgatgatttcttttcctttttcaatgtactgttactccttcttttgttactaatcttttgacccaatctataaacttctcatatcgaattaacttcttaaaccattctaatacaatcgatgtcaccaatgaaattgccataagtactatataatctaaccatgcataataaaatgaatatgtaaattcatggaaaaatacgtctctgtaaaatgaatgaatcaagaaaatattcatagaatgttttccaaggaagcctaatccttttacgatccattttccatttaatatataaatatatgaaattacgatcatatacattgctgcaaagccatcccaaaaatctagatatttccatccaatccatgcattttgtcggcattttatgataactgccaaacctatcaatgatactatcagagacaacagttttcctgccacattctgttccataaatttttcttttattctcgcaagcaagtcatgttgtgcaaaatacattcccagtgtgtatgctaatagatatcggaacaaatctgttgattgtccaaatccacaagctcttggaacgataatagatgcaacaaccacgacccattgatatttttccataattgaatgtacaaatggaaaaatcatgatcaaaacgattgcaagactcatataccaccatgtcagacaaaataacggtgttcccagtaattttgctaatcctaatgcatcaatgatcatatagaccacactacgaaaatcatgtccataaacttctataaaacgtccagttggaatcgcaagaatctctgtcacaacaaaaatgatcaaaaatcctgtcattaatgtgaccattcgtttctttatataattactcatcgttgttttctttttctgactctcataagaaacccacattccgtatccagtcataaaaacaaacatggctacgcatatctttgaaaaactagcaagatattgtatcgtatgagaagaaaatggtgcaaacgaaattgggtaatacccccatcccttcgtcgtcgcaagtttctcatacggaaccgtagcccaacgctgtgcattcaaaaagcaatgatgaaacaacaggataatgatcgcaatccctttcatctgcattgtatgttcctttgtaaacttcattcaatcttactcctcttaattttactgacctgtattatatcacaatgtaatacttttgtaaaaacttttactttatatacaccgcaaaaccttgtatttttttgccaaccggtctataattatcctgtttgagctaatttaaaaaacaaaaaggggatgtgatcaatgaaagttcaacgcaaatatttacaactggcatgcctgaatctgtttcttgtcatgtctgttatcttatgtcctcaccagacatatgccaaaggtaaaaaatttaaaatctattttaccaatgcagaaaaatctatcaagttacctttaaaatccagccagacactatctgttcgatactctaagaagaaaaaagcttcctacaaaatcaaatgggaatcttctaatcctagagttgtaaaagtatcaaaaaaaggtatcctgacaccaaagaaaaccggtaagtcagtgatccgtcatgtggtcagaacaaaatctggtaaggtcattgcaaaaaaatctattaaagtaaaagtaacacctgaaattgccatcaaagcaatttcctgtgaagaagatgctgcttctgaaacactgatcaaatatccgaacaaatatcgttggaatgtttctctcaagcctgcgaatgcatctcttgcttccgttacttttcgaagcagtgataaatccattgccacgattagtaaatctggtgttatcacacctttaaaagaaggcaacataacaataactgcaaaatataaaaaagttatcttgaaacgacgttttcatgtaacaattccattaaagaaattaacaacaagtcatcaaaagatcagtatgccttacggaactttcaggactttatctgtgaatttcaaaccatggaatgcatctgacaaaaaacttacctggagcacaaacaatgataccgttgccgttgtcgatgagaatggtcatgtaactacccgtggagttggtgttgctgtgatcaccgcaacttctataaaaaatccaagcagaaagtgcaatatcacgatcaatgtcactgctgaaaatggtttattatctactgaagatttggatgattttgacttaaaagatggggaccgtctgatgatcattgcccatccagatgatgacctcttatggggtggtggaaatatgattcaggaaattaaagaattaaaagaaactggaaataactattttgttgtttgcctaaccaatggctcttatgatagtcgagctagggattttgactctgcgatgaatgatatcggggcaaaacatgtgattctccgctatcctgacctctatcgcagacatcaggttgcatggaatccttatactaactatatcacacaggatatccggcgtgtcatgaattatcgtaactggagcaagatcgtaacacacaatcctgatggcgaatacggacatcagcatcataaaaaaacagatgaattagtcactgctgtaagtcatgaaaatgctgagcattacgataaattatattactttgaaaaattctacacacaggatgctattccagaaggtcttgcaaaactcccttctgatgttgctcagaagaagcatgctctgatctttaaaaactattttgaccgtggtgcgattcgaatgtatgaatattttaatgattatgaaaattgggtaaaagctacggattggcaataatacaatatggtataaaaaatgcagctgtatttcaaattatacacctgcatttttctttctaaatttttattgatatacacgaaataccagatctgctttcccaatcttcttgttactcctatacatacatccatttgggtatgcatcataatttccagtccagtataccggaagtttgtatttttgatcttttttctgatttacaatctctattgcatatgtcccagaattcttaactttgtttaacttccactcatattgattttgcgcataagataattgatcttgtcgtgcgctttccattacttttcctgtttcatcaagcagacgcacagtaaaatcattctcattatttaataaattgaatgtaatattctgaaacctgatttttgtaagaaaactttgttttattgcttcattcttcttcaatgacagattcaacgtctgactttgtgcaaactgactagctgcataagattgatctaacgcctctggattttgttttaaataattatgcattggctgcaaacatacaatcaatccgattccgaccaaacataacataacattccctattgaaatcttttgtttttgttctttcttttcttcttcacaaagattttcaattcctgttaccatcataaacatcattacacccataaagcatatgctatactttggatttgcttcccagaatacatggaagatcattcctccaagtaatgtaagcatcacaacataattccatgggtttctttttctgagcattccaattgctgccactaatgcaaagcaccagaccgctatccgcatcagatagctgtacattaagatccatccattgtgctttccatttaagaactcgtttgctgttccataatctgttgaaacataagacatttttgtaaaatcatcatctcctgtcagccagacttctcttaacttcactccagataactgtaaagttccctttatcccaagctctttataattatgaattgttttttcaattgtcttttcttttttttgtttttgcgttgaaagttgtgaagtaaaccacacatcaccactatcatatcgcccaactccatgagaagacatcattaaccaatgtgttgctggaaattcttgtgtgttttgttttggtatcatattctgaaatttgtactgatatccaagaacagaaactgtaattcctgctaccattccaagaatcagacacatatgtcttactttaaacttatactgcttccaaaagataaacaacgtgatccccactgcaatacagagaatcaaattggtgatcctgatcttaattcctatataaattacaattcctaaaaaagcactgtacaaaatgcccttccaattgtctttttctttatgtattagcacaaacaacaacagcaacaccatgatcataccaaatgatatcgtgtgtgtataataataagcaatccagaaatacgtccacggattcagtaaaaacaacaacatccatatgttagccagttttatatttttaactatgcgtattgcaatatatccacataaaattccaatatcaattactaataaattcaaaaaatttcccgcaagaaccagacttccgacagaaataccgcaagacaccaacaatttataatagcaatataagattagtaaatatccataattattcggataatgtgcaaaatacccaccaaaacgctgtaacgaaatcataggattttgaatcattcggattgcttcatcatgcaaatataacaaatcattcactggctgtatcttaaatagatagattgtcatcaattgcaatgcaaaaatcatcacaaagatgataaaaaataacgatttttttgcaaaaacagcttctaatttctttctgtatcttacgataaaacatcctatgataaaaaataacaacgcccccagccacctaaccggctgagaaacgtcattcatcttttcttgtgtatattgaaatgggaagcttacgatcaaatatgccacgatcagaataaacaatctgatcgaatatttgtatataaaatcttttatcttcatctccattctcctagtcatttaatacctgttcaataataaatttaggtctggcctttgtctccaaatatatttttccaatatattgtccaaccatcccaatcgcgatcagctgtaaaccacctaaaaaccatatcgacataacaaggctagtccaaccgcttaccgtgttgtttgtaaaatgccgtactagacaataaatgattgccaaaacactaattatacagattaaaattccaacattaaaaatcattttgattggttttacactcaacgatgtaattccttcaaatgcaaaagaaagcatttttttcaatgggtatttgctttctcctgcaaatctctcagctctctcatacgtgacaatatcactctgataaccaaccatcggcaccatccctctaagaaagatattaacttcgtcaaattctaataatccttttaatgcccgcttactcatcagtctgtaatctgcgtgattgtaaacaagctctccgcccattttattgatcagtttataaaatgcttctgccgtaaaacgtttaaaaaatgtatctgtatctctggcacttcgaacaccatatacgatatcgcacccttcataatatttttcaatcatctgatcaactgcattgatatcgtcctgaagatccgcatccattgatattacaatatctgctttctctgatgccattgtcaaaccagccagtaatgcattttgatgcccacgatttctggataatttcactcctgaaaatatagaatccattttatgaaattcatcgatcatattccacgtatgatcttttgacccatcatccacaaaaacaattctgctttctttcgctattttaccatcatggatcaacatttcacatttttcctttaatcgtttggatgtttcagctaatacttgttcctcattatagcaaggcactacaatatataatatattcttctcttttcttgatctttcttgcatatttaattatctttctcattatctattttgtttgtgatcaactgtaatttaaattcgaaatcttgcctatttttttgtacaatcgtacttaaaatcaatccagaaaagaatgcctgcaacgctgcaagtgctataaatccacttacgatcaaagttggaaaattcggtaccagacctgtatgaagatatgtcataaatacgggtataaataatcctgccgcaatgatcataagcaagaatgccatacttccaaaaaactgaaatggtctataacctttaaacagttttatgatcgtaaataataccttcataccatctgtataagtatttaatttagattcgcttccatctggtctatctcgatattcgatgatcacattatcaaccagcatatttttatctactgcatgaatgctcatttcagtttcgatttcaaatcccctggataacactggaaatgttttaacaaactgatagctaaaagctctatatccagtcataatatcccggatattacttttaaaaagatgattaattgcagctctcaccatgctatttccaagattatgaaaaggtcttttattttcctcaaaataggtagatgataatctgtcccctacaaccatatccaccttgtattctaaaactttttctgccatttctcgtccaaattgggcaggatatgtatcatctccatcaatcatgatataacattgcgcatcaatttctcgaaacatccttcggatcacatttccttttccctgttgatattcatttcttacaatagctcctgcttcttttgcgatctctactgtacgatctgtggaattattgttatatacatagattgttgcctctggaagttctttcttccaatcctccactacttttttaattgtcttttcttcattgtaacacggaatcaatactgcaattttttccattacgcattctcctttgttaaaattcattatattctttatatattatttcatttacaaatgcaacatataaaatcgtactcgctgtaatcggaagcatatatcgcatatcgccatttacaggtgatgccagacatataaggaatgatgtcactactggcaaaaatgcaatccaatatctgatcgtctttttaaaagaacataccatgctaagcaatccaatcaaaatccataaatatatcatcggttttgtaaataatgtcaatggagttttctgatatattgtatctaaaaccccatgatatatatctctgatatattttgttttttctgaataatatattttatattctttttgatatatatccatactttctggctgtacataatatccatatggatatcttatttctgtcatataaccccaatatccatatgtcccatttaacgttgcctgaatataagccgtcggatgcttcttaagcatttcaaaccatatgttaaaataatcttttaaatattcgtctttctgtttgtaagtattctttactgggtcagaaagatctggatcataattctttccaatcgtatcgtaatctaatacttttcgaatcactttttcctcttccgtcgaaacatcatttctataatattttacatatctcgctgtctgttgaaaagggatggagagcatctcctgctttccgccaggcttcacacctgccatgggaagaattgctttttgataaacctcccaaaacgccaccattattataaataaaactatcaattgtcttcgatatttttttacacctacaatacaaaacggcatcgtaaaaattaatatataaaacccgttgtgtctgaccaaacataataataaagagactattaaaaacaaaatactcttaacttttgaatcaaatatcttctctggttctaatactatatcaaatataaataacacaaataaaacaaatattggataaaataatgtgtcttttactgctgtccttgcatatgccgaccagataggaaacaatccataaaatgccaatcctgtaaagcgaatccaatactttgtattcttcttatgcatccaataaaaacatattgcgaaaacaccacttgtaaataacaatgtaaataacagatacactgcgattcctacattttgacatccaatgtttcttccaaattttacaaacatcccttcaaacaatgtcgtcaatacaggatgatgattcgtcagatttccactgaaaaactgctcatactgtcgtataatatcataagttaaacaacccggaaaatacaaaatataatttggaagccataaaacaatcagaatgctccaaggaactgctataggatgatgatcaaatattttttctcctatcccactgtttgcttgagtctttaaccttataaaagacttccccgcttttgaatataatacattcatgatcatatgtacgatcattgtaagaatcatcgtcatgatcaatgcactgatcatatgttttttatcgcatatgatcagtgaccagttatctctctgatcataacttatagatataaccatgcatattgaaaataaaaatgatataatccatgaaatgattcgattattctgatgcattgactgcctttcctcgtttctcttctttttcttttcccttaaataatcccatcaactgataaaatgccaggccaaatacaaatgcctttaaattgtaagcggctggaaaatatgcttctactccgcatgcgataaatccaatttctaaaagcaccatagccccaaaatatccctttttataaagtacccatacagctataagcataaaagcacaaaaaagtccaaacacaattggcccatattccaacaatgttcttacaattcctaattctgttacgtatccatcattggcctgtgtataaattccatatccacaaacctttccaccaatgttacttccaaacagaggaattccagcttcaagaaagcagtttcgtgcaactgtcaatcgtcctgtgatcaattgatctaatctcataaatgttggatctgtcaattgagaataaagtccataatatatagataagaaaatccctacaagatttcctatctctaataagatcagtgaaatcttaaactcataaatttttcttgcatatcttaaaataaaataggcaatgatcgctgctgatccacaataaaatgctgttcttgattttgatagttgataaaactcatagttgaaatagaacatgatcgcaaatgcccaccatttcattttcttataataagcatataaaaaactaacaatcaaaaccatgatcataagatgaatcgtgttcgcatgccatgtgcaaaacttatatcgtacttctatcattcctcgcccataatcttttactgttgttaatttatctggtgcattcacaaagaaccatgtaaacccatagcttaacccaacaaatccacatgcaaatactgctttcatcactttcttaagatctacgtctttcattgccaaaatgatcagataatttgcggggtaatcaattcctccagaacttttccaacacaaatacatcaaaacagctcctactgctccaatgatcacttctttccattgatattttgttaatattattttgaccacaaaacagattaatccaatataaaataatctttgcactggcatttgtcttgtcggatctttctctacataccaatagtatgctatataaaaaaagtagtatgtaatataaagtattgttcctaataaaaagaacaactctccaatccattgtctcttattttcaatcttcatcttattgctcctgtttatttttcaaaaaagccatcgtatattctacgacagcttttgtctaatgctatgataatgaaataattaatcttctgttctatatccatccggattcatagactgccatttccaggaatctgcacacatttctttgattcctttttctgcagcccatcctaattcttcttttgcttttgtcgcatcacaatagcacgttgcaatgtctccagctcttcgtggtttgatctcgtatggaagtgtctttccacaagcctcttcatatgcatgtaagacatctaatacgctgtatccgattcctgttccaaggttgtagatacgtacttctggtttttcttcaaatttctttaatgctttcacatgtcctttggcaaggtctacgacatggatataatcacggacacctgttccatctggtgtatcataatcatcaccaaagactcctaatttctcaagtttaccaactgctacctgtgcaatatatggcactaagttatttggaattccctttggatcttctccgatcaatccgctttcatgtgctccgatagggttaaagtaacgaagtaatacaacgttccattctggatctgcgacatggaaatctgttaagatctgctctaacattccctttgtctgtccatatggatttgtgatctgtccttttgggcattcctctgtaattggaatgaaagctggatctccatagactgttgctgaagaactaaagataatattcttcactccatgatttctcatcacatcacataagatcagtgtccctgtgatattgttatgataatattctaatggtttctgtacagattctccaactgcttttaatcctgcaaagttgatcacagaatcaatatcttctgcatcaaagatcttctctaatgcttcgcggtctaaaacgtctgcctcataaaattttactgttttccctgtaatctgctctactctctttaaagcttcttcactggaattatataaattgtctactacgacaacttcatatcctgcatttaaaagttccacacatgtatggctgccgatatatccagcaccacctgctactaaaatagccatgatctctcctccattattgtatatattatttatttacactattttttatcataccacatttcacgatatcattaaaggttttcttgtaaagcaattatttggtactcgtctatctctgaatctttcgtccttcaatataataacgtttctcacaagcatgtcccatagaaaatgtctttcttggcagtgttccgtctgtcatcacgcttggaaacagctgatctttctccattgctggaagtttaattcctatcgtctgcccttcttttgacagttcttttaagacatcttctccgtggatataatcaatacatcctgaattgtctttgagatatttatctaaaaatgtctgtactttatctactgctaattgatgtttatgtaaattcagatgaagaacttcttccttctttccataataacagcgaattgtttgtccttcttcaccgcagcattctgtttttaatgcatgtattaattcttctggatctgttccagtaatgactctgtgaattggttcaaactgttgggaatcatcatgtagattctcaagttctaccaatgcatatctcgctggatggtccttgatatgttcccattgatgatttttctttaacttctcgtagcaggcttttgctgttgcaagagaatggtttccatctccaactgcatagaccattggatcatcacttaaatctttatatttttctgtcatttgttcttcatatgattgtagtttttctaaaaattgttctttgacctctccgtctaccagccatcctgcgatatgtccaccttcctgcatcagatcaaattcatatagtttctcaagatttgccttctgctctgtcacgatttctaatacttcatttttccaatcatcgcatagcaagatcacgtgtggcaattcaatcggtgcctgataacgaatcttcattcttggtggtattcgctccatgaccgttttctctgtagaacggatctttgcttcatgttctggtgtgtaactatattgttccagatcaatcgcacctacgatccctcttcgaatttttccattctgcaaggttctttccacataaaccaaagaattttcataagttttcaacagatgatcatctgcataattcttcattgtggattgaatctttcggatcttttcatcttcttcctcacttccaagatatgcttctggaagcattagatgtaacgttgatggtgtatttcctacatactcttttacttcatcccagtattctggctgagatgaaaactggtcacaagcgatcacggcccatttcttcatagaatctacctgtggcattaaaatatttgctggtaaaaatgtttcgctcatgtttcttgttcctcttttcttatatgacataaatctttataactctttttcacacatatctaacgccgctgcaataaccgcatccatatcataatatttatattctccgagtcttcctccaaagatgatattttcttctttctcggctaatttcttatactcttcatataattttccattcttttcatcattgactggataatatggctcgtctcctaatttccactcggagctgtattcacgactgatgactgtctttggaaggtcatttccttcttcgtcttttccgaattcaaaccatttgtgttcaatgatccttgtccatggtgtctcggcatctgtgtaattcacagctgcatttccctggaagtttggctggtctaatacttctgtctcaaatcttacggaacgatattctaattctcctaatttgtaatcaaagtatgcgtcgatcggacctgtgtagattactttctctgctagtgcatccagttcttctttatgttcaaagtagtctgtatttaaacgaacttctacatctcctagcatatttgcgatcatctttgtatatccgcccactggaattccctgatatagtgcattgaaatagttgttatcaaatgttaaacgtactggtaatctcttaatgataaaggatggaagctctgtacatggtcttccccactgtttttctgtgtatcctttgatcagtttctcgtaaatatctgttccaaccaagctgatcgcctgttcttccagattctttggctctgtgattcctgcttctttcttctgctgttcaatcttatctgcagcttcctgcggtgtgatcacaccccacatcttgttgaatgtgtacatattaaatggcagggaatataattctcctttgtagtttgcaactggtgaatttgtgaatcgattaaactctgcaaactttgtaatgtaattccatacttttttattgtttgtatggaagatatgtgctccatatttatgtacatggatcttctcaatatcttctgtgtatacatttcctgcaatgtttggtcgtttgtcgatgactaagaccttctttccttttgctgttgcctgctgtgcaaagacggctccgtataagccggaacctacgattagataatcatattgtttcatttttgttttgtcctttcttgtaaacttcttatctatattatcaaggtatcttccaatatccattttaaaaataatatttctctggataattataatcgttgtaacgtgtgttcacaataatatatggtacatcaacaccacgaagcactttattctgcgatgcaatcctttggtattcttcttgtgtaatatgattatatatcattggatattgcgttgccgtattctggttcttccatggcatacactgcataactcttggaagattctgaaacgtacaatccttgatattaatctctgaaacacctcctcgcaccaagattgctctgatcttacgatccctgttataggaagtatattttcctttactgttttttccaatattcataaatctcgtattggtcaaagacactctttgccagttcatcatctcaatcccaccgctgacacagttttttatcatgcaatcagagattgagatatctgtgtgatatttttctacagaatactgatgtgtacctattgctttttcgagatttgaaaatatacagtttgtaatctgcacattctgatttggcgtacagtcatactgactccagccatgagtaaaccctcttgttttcttatctggagtatctagattgattgcctcggatgtatgacgtttacttgctttatatcctgtaaaggtacaacgattgacatttacattctgtgatgcatccatctcgataaaatgtccatatttcatatttttaaatgtgattccctcaatcgtaacatttctgttatgacacataacaagtgcaatacaattctgaccagtttttccctgataatcctgatcgatcactgcctttcctgttgaatatatcttaacatcatgaaccccattatattgtccatgcacaccctttttcttcgctttcgatggttccaacaattcaaaaataccaccacttggtttcattttctttgctttggttttcatgatctttttaatcgttacaccatctttgagttcgatcgtaacattggatggaatatataaaacatttggtatcttataagtccccttttttatgactaattttcctccaccctttttttcgagcagttctaaataagagcggatcgcaaaatactgttttgttgtagaattgtagtatccttttgcttttttgtactttcctttatatggtgatgactttggcgtgatcgtgtatgtcttctttgctgcagcttgtgcttttgtgtttgatgttaacatcatcgctgaaaataccgtgatggctgtaattgcaaacactaattttctttttttcaaatttattttctccttagtttatttatactctttttcaaatccgattttgcactattaattgatttctgtgttgccgcattgctgtataatattttctttgacttctttaattgcttctgcacatacctccacttcttcttgttatacttttctgcttttaactttgatgccttgtgaatcgttttataaagatccttagttttcaagcgtaagtcaccagaaagagattttaattgtctgttttgttctatttcaacagatatgattttggctagcgtttttgctccctcctgtgtaaaatgcatattatcttttatatacattcccttagctttctttttcccaatcaggttaaaataatctgctgttttttgtcctaaatctatgactggaattttatattcttttcctacttccatcattgccattctatattctggaacgtaaggcatgtatttttctgtcgtatttaccggtggtggcgtgatcagtactggattggcttttttacattgtattttctgaatatcattgatcaaataagttttatactctgacacggtagaacctgtccaccattgtgtatatacttcattatgacctaactggataaaaacataatcatctttttttaattttttctgaatcgactcaaacagtccgtatttgtcgaaaatcttgacacttgctccagccttagcccagttttcaatggatattttcggtgtgttatatcttacaacatctacataatctgatgcaccttttacatgtaacattttcatttttgatggatattgaaaatattgatacaacctttgtccccatccattttgctgtttatttcctacataggaatgggcgattgaatctcccataacgtagatcgttggtttactttttgcatataaatctgtttgagaaataaaactgattgtgaaaaacagacttatgatgagaaatattcgtttttttgttgtttttttgatcatatttaatagtctccgttttttagttttcaaccatacatcgctttttacaaccactctacttgacagttatgttttttcgtttttctatcataacttataccaattccaagaatttttttcactgtaactttcttttcagctaatttcccttgaaaacgtaatttataattcttactttttatctgttctatggcttcttctggagtatgatctactttcaattctaaaatcattcctggatcacactctcttttgggataaaaaataaagtctacgaatccttttcctgctttatcttctctttctacacgatatatgtctcttgctgacagatatatcaaattaacgattgctgataattctgtttcattattgtaagatagaatcggagtttctgtattatgagcatattctaaaatttcttccatgactttcgtatttcccgctaatgttgcttttaacatacggtcagattcctttgcaagctgatatacataacccagtctttcttctttctgaatcatatcatcaaatttattcatcagctctttattcggaatttttacttccccattctcgtaacttaagaatccatatacgatcattgcagaaaatatctcattcttagtcgttaaattcatcgaaactgctgcatattcctgaatccttgctgttactgcctctcccgatatcattaatgcaagatcactttgaacatcatctatattttgtctaatataataaaaaatctcatcatatggtcctgaacttgtccagtaacttccaatattattatttgtcaatgccaaaactacagatcttggattatacattctctctcctgattttgtcgtataaccatcgtaccattctttcaaatcttctcttgaaatatgaatctctcgtgtattcctcgtatatttctcatacaactgatctacttctgaatctgtaaatccaaaatattcattatatttcgcctcagatgccattgtatattcccaaaacatatttaattccgatccactggaatacttagcaattggaagaattcctgtcatataagtcaattgtacgtatggacgatccttcaaaaggttacttaaaaatagcacatactgctttttattttcttctgtaacaaaatccttatgaaaaataaaatcccattcatccagtacaaaaacaaatctttgctggtcacattcttcgaatatcgtctctaatgcatctgctgccgaatcatcttcgtaaatttcgatttgtggatattcctttcttaaatctctgatcagatttgtttcaatcctgtctatatagtctgtatatgaatcgcaatctcttggcatcttgctgaaatctattgatattacgttatattgattcctgtatttattatataaattactctttgatatttttaatgatttaaaaattgaatctgaatcctgtttttttcctaaaaaagcggtaatcatattggccatgactgtctttccaaaacgtcttggacgtgtaatgcatatatgggtattacctgcatctaaaaatggaaataattctgatagcatttgtgatttatctacaaagtatggctgttctatctgtcctttgtataagacatatgaagttgaactgtttagatatctgcccatgattttacctcccatttatgcaaaaattaaatctttttgttctttcagcatatctataagcaaatctctgttatagatataacaataattattttcacgaatttttcaaaatcgaacattcctattggaatttggatactgttcatgtttcttaatgtctgtaaaatttaaattattatgtttttcaatatttagaaaaatacacagaggtccttttcttgaaacttttttatattttccacctattttcattgaaatttaatacacaaatgtcaaataattgttttttattatacattatttgttattctaagtccatttttgtttgtgattgtttgtgatctctcaaacaccatggcgagcaaaccaataaaaagccatacccgtttttgatatgactttctaactaatttcacgctatacactaaatcattatttaatttatttggaattttttgaataattcagtcttaatgttacagtctattttatagactgatttcttaatgtctatgggaccttaattattttgtagattagtaaattaaatgtatattttgtttataattttcggttgattttgattaatgtatcaatttattttattatctgatttcgtaaggtctatgtgaactctctgtcttaagctcatccttaccttcccaatacatataaatttctatatctccctcattttcttctttgaatccacattttttccaaaatttagctaccattttatttttagcacataatctgactctcaagttatgtctttttataaattgttctattataaattgttctattataaattttccttttccctgccctctatatctttttaacacttcaaattcatctatccacacactattactttcttcaacatcttcagacattctgataattgcaacaatatcattttcttcctcaacgtagcacaatacatcattgtcatccaaatatcttaattcactttcaaataaaccttcttgtcgtttctcttctatctcttttttatcgtcaattcttcgtaatttcattatctttctttcttggcttaatatttctattagctttatattttatgttcttcaaatacatttcttcccttgttgtattttcatcatataattttattaaagtctcagtccccttaaatttaatgatcatatcatactgttctctgattattacttttttcattgaatttcatgcttaatacaatgccattctaattttaaatatttttgagaattttttgtcaacgaattaatatcattttgaaatttattcgggcagaattcttctctcattgaaatattgtttttaatttcatctaataaatataatacttctttctcatatgtttagcaaaattagatagtaatcttaattttgctaaacatatattcagatctctatagtctttttctggaattacaatctttttatctaaaactagtttgttcgcacattcttgtgctatagcaatatattctgctaatatattccttacttcgttaatccaatcaattcttttgttcgttatatattgaatgttatctcgtgtatcttcattccttgacattaggtcaagatttcttccctccatacaatatcacctactctaaaatattttcttccaattcatgaaagaattttttattaagcataggtatcgcaccatattttcctgaaacatatcctttttctaaattttcagtcttgcgcacatttttaatttcaacaagagaatacaaatccgttgcacgttccccatttaattgtgtaaaccatacttgatcccttctaaataaatctgtatctaacaaacttgtgtcatgtgttgaaaaaattaattgtgcaaatttatctttctgataatgttggaacaattgtacaatttgaaaaattactgattcatgcaaacttgtttctaattcatcacaaataagtattttacccttattcaagatatcaataattggacaaatcatttgaaataagcgctttactccggttgattcttcggtcattaaatcgacttcaaattgatcatatatcacctttgcttctattctgttaccctcttgactgcctaacagacttttcaatggatctggtaattgtatttcctgtggtaaatctgctaactttactttctcaagtttgacttttacatccctaactccggttcctaatgcctgtaaaatattcacaaatgtctttctaatcatatcgtttttctgcattaactcaatcgaatattctgcccagttattaatctctggattaaacactactatatctgtattaaaaaacataaaagcttcttcaatttcttttatattgctataattagcggcacaagataaaaacaacctattatctttcaatatgctacggcttacatcaaacgctcctttgtatctatctcccggtttaatctctaatctattacgctcaaaaattttcacctgtcttccctttggaaaataatataaatattcatcttgtaccagattttgtttgacagagaatccatatgcatatctgatatcattccgtacaaactgaatattatattcactcggagtctcttctccgctcaatttatgacgtgactgaaatactccttgcccaggctgatgattaatgctattgctaaccaaatcacgcataaataatagcgcacttataaaattactttttccggatccgtttgcgccatatataactgctgaacgcaaaactctaaaattagcaaatccttttaaaagctcttcagatgtattatcacttcctgcaatcatagaaaatttcacttcttctttgatagatctatgatttgaacatctaaactctaataacaccttcgacacctctttcgcttgatatatattcatattaaccccctggcaatgttttgtcaatcatttttgctatttcttcgcaaatttagtatataaaacattatttttctattttttatgtgatcatatgaataatacttcatttaaattcgtaaagaaatgtaaacatcctttgtgcttttaattcatttctattatttagtcaacgaaataaactaattaaagaaattacagcacttatcaatgctataatacatgctgaatatccatatattttattgctatctgtttctttgctaaaacctttcccagaaagtacaattaagcttcctaccatacttattaatattcctaaataacgtaccccatctgctctccgtattaatatataaattcccattacccacactgctgatcctattatctttatgataccagcaataaaagaaacccatgtcatatcatataaactcttattataacgaaatcttttattgattacccacggaaacactagtgcgttaactgcaaataataatggttctattaccccatcttttattccttcggtcttttcattttgttttttgagggactttttttctttattcttatccattttcttttgtcgtttcaaaaatatatctatacaatataatgcaatttcatatttcggtttactttcaacaacaaatattactattataacataaatccatacaagcaaaattgcgaaaccgaacagctgtacgacactaattttatatgcagataatttactaattgctgaaatacataatgctaatactgacattaccaatggaatagttcctaaccatggaatccatccctctctttttgctttctttcttaacaaatctatttttaattgatctatttcttcttccgatttatcttgcaaatattcttttacatttcttatctctttgcattttttcataaactgtttaacatcaattttttcttccattcatttcccctctttttacaaataagatgtgaatagtaatcacactatccacatccttatcctcttttattacttccaaagcttctctgtataaactccattctgaattaattcagaaaaagccttttgaacaatttctttatcttctttatatgtaactccaaaccaacgatcctgtgtctctaacacttttacattggctcttttctcttttaacagtttgtccacaatattcggcaacaaatattcaccctttaaatctccttctttcacattggcaaggaaatctttaaaatcttctgctaaataatctataaattctggatatcctgcccacatgttcatagatactttatcttccggactaatccattcttgtactttaggatcgtcgcatttgatttctccgtcttctcccatttctattcctgttgtttcatgtacttgacttaataagccattctcgtcaaccacactcacacctctagtcacggtaccattatcacttaatgtattctttaagataaatccacccatacccattgtaaactctctgcctaaatcttctccatttactaagaaatcatgcagtttcacaaatgcttctttgccataataatcatctgcattaataattacaaatggttctttcacaacatccttacaacatagtactgcctgtcctgttccccatggctttgttcttccttctggtaatttaaatccttctggaagatcatcaagttcctgaaatacatattcaacgtcaatttgtttttttattctgcttccgataacttcctcaaactcttcaaaaatatctttacgaataataaaaactactttattaaatcctgcttctttggcatcgtaaatagagtaatccataatgatttccccatttggtcccatctttgctaactgtttaattccctctccgaatctagaacctatacctgccgccataatgattaatgttgtatccataacatcctctttcttgtatttctttcgtaataataactctataattctttctcacacatatcaagtgctgctgcaattactgcatccatatcataatatttatattcaccaagtcttccgccgaaaataatattttcctctttttcagctaatttcttatattcttcatataattttccatttttctcatcattcactggataatatggttcatctcctaatttccactcagaactatattctcggctgataactgtctttggaagatcctttccttcttcatcttttccaaattcaaaccatttatgctcaatgattctcgtccatggtgtttcgacatccgtgtagtttacagctgcatttccctgaaagtttggcaggtctaaaacttctgtttcaaatcttacggatcggtattctaatgctcctaatttataatcaaaatatgcatcgattggtccggtataaatgactttctctgccaatgcatccagttcttctttgttctcaaagtaatctgtgttcaaacgtacttctacatctcctaacatattggctaccatctttgtatatccgccaatcggaattccctgatataaagcattgaaataattattatcaaatgttaggcgtactggaagtcttttgatgataaaggaaggaagttctgtacatggtcttccccattgtttttctgtatatcctttgatcagtttttcataaatatctgttccgaccagactgattgcctgttcttctaagttctttggctctgtgattcctgcttcttttttctgctgtttgatcttatctgccgcttcctgtggtgtgatcactccccacatcttattgaatgtatacatattaaacggaagagaatataattctcccttatagtttgcaactggtgaatttgtaaaacgattaaattctgcaaactttgtgatataattccatacttttttattgtttgtatggaagatatgtgctccatatttatgtacatggattttctccatatcttctgtgtatacatttccggcaatattagggcgtttatcaattactaagactttctttccctttgctactgcctgttgggcaaaaacggctccgtagagtccagaacctacgattagataatcatactgtttcatttgttactttcctttctttttgagaaaactcttcttaagtatcccatcaactacataattttgtacaaatgtctctttcgtcagcaataaaattatgccataaatcccaaagaagctgatacctgctactactaattttaaaaataccatatcaacaactccactgcactttatagatataatacttgccaaaaccaacgctaccagtactttccagtattgaacctgttttgatatcttaaaaaacaaatctttcaaatacataatctgtacaatcaacacaacaaattccgcaaccaacgtacccagtgatgctcctgctgctcccatcttaggaataaaaataatatttaaaatcaaatctgccactgcgcctgcaacgacagagtaaaccaactgtttttctttattcaatggtgttaatacctgaattcccaataaatttgataatccaatcaaaacaattgttggtgcaataatctgcatcgccaatgttgctccaataaactcttttcctgaaagaaatactaagcaacctcttgcataaaaaattgtgaataacattaatggcaaagcaataacaataacaaaattatatgctttccttatcaatgtctggaattctttttttcttccttccataatataataggatagtctaggcaataaaaccgcccctagggatgttaccagacttgttaaaatagtctttaccttcactgctgctgcatacaatccaacatctacatctgttttcataaaaccaagcatgacattatccagattggtataaatatttactgcaacaacttgggcaaataatattaaaatcggctttaaatgctgtttaatatcataattcccaactggttttaacgatacatattttctaagattaataaaattcaacacattagaacctacagatgccaaaatggaagttactccataaaatacataatcatctggactatgtatgaacatgaacatcaaaataacacctacaaattttagaaatatcgaacgttttgctatgtaaccgtattgctctaatccttgatatagccaattaacccctaatggatctagtaaaattgatactcctaccacaagaaataaagttcgatcagattgaaatcttggaacgaataaaattgctaatatatatacgatagatacaagtaacatcataaatagatgaataattaacatttcttgtgttgtcttatttaatttttcctgatcatctcgaactttcgctgtcgttcgaatcccatatgttggaattcccaaagctgctaccatagtaaaataacttactacagatattgcaaatgaaacctttcctgttcctgatgcgcctaaaactcttgatacataagggaatgtgatcaatggaaaaataaaatttgatgccgttaatatgaagttcattataaaattgaattttactgatttgattttcatcatttactccattgctt

SEQ ID NO: 612 - DNA, 54761 bp, Unknown
  gut microbiota DNA sequence
aaaaattcattagaattttcaaggttgtcttattgttcagttgtcaaagatcttttttgtgatccgcttcgtataagaagctttattattatatcactttgttcttagcttgtcaagaacttttttgatttattttgttgacccgttcttcataagaaccgcagtaacttttatatcatatcattttcatttcattctgtcaagagtttttttgatttattttattcaattgttgtgatcgttctccgtccaacaattcaaataaataaatactcttttcatcatctttctaaatgatatttgttgctctgctataagcagtgcaatttctataagatatcacacttttacatccatgtcaatatcttttgtcaaaaaattaaatcctcctatttggaagatttaataagcgcagaaggagggatttgaaccctcgcaccgcgtaaacggtctatacccttagcaggggcacctcttcagccacttgagtacttctgcaaatgcctaaatatcaatatatttaattgcatccgtcattcacatgacgcttgaatatcttaccaaagtaatttccttttgtcaataggttttgattgattattttaattttttgaaattttctactgcagtctcataaagattattcccctgattgtcaattactacaataactggaaagttttcaactcttaattttcgaattgcttctgttcccagatcatcataagcgattacttccgcctccttaatacactttgaaagaagtgctcctgctcctccaactgcggcaaaatatactgcaccattctgttttattgattcaatgacttctgaagatcgttttccttttccgatcataccttttaatccttgatcaagcatcgttggggtatatttatccattctactgcttgttgtcggtcctgctgatccaatgacctgtctttctcttgctggtgttggcccgagataataaataaactgcccttttacatctactggtaattctttcccatctaacagcgtttcatacattcttttatgtgccgcatctctagctgtatagatcgttcctgtcaaatatacataatctccagatttaagctctgccaactcttctgtatttgctggaacatttaaatgtttctccataatcttctactccttgtatttaaaaaatactatattctaaaaatttcgtctgaacgatagataatatctaactctttataacactctatgtgcatgacgatttacgtgacagcagatatttactgctaatggcattcccgcaatgtgtgtagggtatgtctcaatattaagtcctaacgcagttgttgaacctccaagccctcctggaccaatacctaactgattgatttcttctaacaattctttctctaatttcgcaatatgtggcttctcagatggtgtatctaagtttctcgtcaatgccttcttagctagaaatgctgctttttcaaaacttccacccaatccaacacctacaaccattggtgggcaggcattaggtcctgcatctttgactgcctgaattactgatttctttatcccctcttctccatctgctggttttaacataaatatacgactcatattttcacttccaaatccttttggagctactagaatttcaagattttcccctgggacaatatctatatgcatgatcgcaggtgtattatcttttgtattctcacggatcaacggatcctttacaacagatttcctaagatatccttctgtatacccctgacgcaccccttcgttaactgcatcatgtaaatccataccctcaatatgaacatcctgtccgatatttaaaaatacgattgccattcctgtatcctgacagattggaatctgatctgctgctgcaatttccatattttcctgcaattgatttaaaatctgttttcctaatgggctcttttcactttctgttgcattcttaaaacggcatttcatatcttctgtcagagataaatttgcctcgatgcacatctcttttatattcttgatgatctcatctgtatgaatcgttctcatgttttcctccaaaaatattttattgtcactgccaaaatatcataaattttcctgcaaataaagctgcatcagattttgaccttggtatcattgttttattatataacgaaatcaggacatagacaattcatctacgccctgatttttatttttattcttctgttgtatttttttccatttcgtcttcaagcttctcttcacggacttttgcgatgctggctacttcaacattttcaccaacattcataacttttactccagaagtatttcttccaagaatagaaatagaatctaccgctgtacgtatgataattccctctgttgtgatcatcataatctcattatcgtcattcacagccttcacacctacaacatcacctgtcttttctgtgatcttgtagcacttaattcctttaccaccacgatgctgtgttgtaaactcagaagtcagtgtacgtttacccataccatttgcagatacgatcagtaacgcttctccctgactgtcaagctgcattccaataacttcgtcatcacctgtcagattgattccacgaacccccatagaagttcgtccaatacatctgacgtcactctcatggaaacggatacactgtccattcttcgttacaaggaatacatcctcatcatcttccgtatatttaacttcgatcagctggtcatcatcttttaatgtgattgctgctaatcctgtcttacggatatttgcatattccatgatagatgatttcttaacaacaccatatttcgttgccattaacagatattttccttcttcgtaatctacaagtggaatcactgctgtaatcttctctcctggctgtaactgaagcagattaacgattgcacttcctcgtgctgttcttccactctcaggaatctcatatgctttcagacgatatacacgtcctgtatttgtaaagaacatgatatagtgatgtgtcgttgtcataaacagttcttcgatgtaatcctcatcgatcgtctgcattcccttgatacctttaccaccacgattctgacttttgaaattatcaacagtcattctcttgatatatccaagttttgtcattgtgatcacagtattttctctagggatcagatcttccatggaaatatcatcaacatcaaatccaatctgtgttcttctttcatcgccatatttgtcacggatcagtgcaatttcatctttgataactccaagtaatttcttttcatctgcaagaattgccttcaattcaccgatacgctccatcaattctttgtattctttttcaagtttggcacgttccaaaccattcagtgctctcagacgcatatcaacgattgcctgtgcctgtgcatctgaaagtccaaagcgttccatcaattcaagcttggctgcctgaatgttctcggctccacgaatgatcttgatcacttcatcgatgttatcctgtgcgatcagtaatccttctaagatatgcgcgcgttcttccgctttatttaattcatagcgtgttcttcttgtcacaacatctttctggtgtgtcagatagtaatctagcatctcatgtagattcattgtctttggctgtccatcaacaagtgccagcatgatcacaccaaatgtatcctgaagctgtgtatgtttatataactggttcaggattacgttcgcattcgcatcacgacgaagttcgatgcagatacgcataccacttctgtcagattcatcacgaagctctgtaattccttccactttcttttctcttaccaaagctgcgatcttctcgatcagtcttgctttgtttaccatgtatggaagctctgttacgataatacgctgctttccatttgccattgcctcaatatctgtaacagcacgtactttaatctttccacggcctgtacggtaagcctgatcaattccagaacgtccaaggatcgtcgctcctgtaggaaaatccggtcctttaatgatctctaataattcttcaatcgttgtctcacgatcttcctcaacctgattatcaatgatcttaataactgcattaataacctctctaaggttatgaggcggaatgttcgtagccataccaaccgcgattccctgtgtaccattcactaataagtttggaaaacgagaaggtaagacagctggttctttctctgtctcatcaaagtttggtctgaaatcaactgtattcttgttaatatcagccagaagctccatagaaatcttgcttaatcttgcttctgtataacgcatggcagctgcaccatcaccatcaacagaaccaaagtttccatgtccatctaccaatggatatctcgtggaccattcttgtgccatattaactaacgcaccatagatagagctgtcaccatgtggatgatatttacccattgtatcaccgacgatacgagcgcatttacgatgtggtttatcaggtccgttatttaattctatcatcgcataaagaattcttctctgtaccggcttcaaaccgtcacgcacatctggaagagctctggaagcgataacgctcatggcataatcaatatatgaattctccattgtttttttgaggtcaatgtcatgaactttatcaaaaattgtattctcgtccatttgtttctcccttcctaaatatcaagattctgtacatattttgcgtttgcttcaataaattctcgtcttggttctacctgatcacccatcagtgttgtaaatgtcagatcgatctctgaagctgaatcttcatcgaggtttactcttaataaaattctcttctcagggtccatggttgtatcccataactgttctgcatccatctctccaagacctttgtaacgctggatcttgttattgttatctcgtccgatttcctgaagaatgttgtttaattcctcatcactgtaagcataccagaacttcttattcttctctacacggtaaagaggaggctgggcaagatatacataccctttcttgatcaattccggcataaagcggtatatgaacgtcagaagcagtgttgcgatatgtgcaccatcaacatcggcatctgtcatgatgatgatcttatggtatcttaatttctcgatatcaaaatcttcatgaattcctgtaccaaatgctgtgatcattgcctgaatctctttattgacaagtactttatcaagccttgccttctcaacatttaagattttaccacgaagaggcaggattgcctgagttgcacgggaacgagccgtctttgcagaaccacccgcagaatctccctcgacgatatagatctcacagttttccggattcttatctgaacaatcggcaagttttccaggaagactcataccatcaagtgctgtctttcttcttgtaagatctcgcgcttttctcgcagcatctcttgctctctgtgcaagtacagccttctcacagattatcttcgcaacctgaggattttgttctaagaaatatttcaactgctcagataaaatactgttaactgcacccctcgcttcactatttcctaatttctgttttgtctgaccttcaaactgaggttccccgatcttaatactgataacagaagtcaatccttcacgaatatcttcaccacttaaattatcttctttttcttttagaaggttattctttctcgcataatcattaaacgttgatgtcaatgccatcttaaatccagataaatgtgtaccaccttccggtgtaatgatattatttacaaaacttaaggatgtctcattgtaagaatcgttatgctggaatgcaacttcaacatacacaccatctttttcaccctcacaatagatcacatctggataaagtgcttctttccccttgttcaggtaagtcacaaattctttaataccaccttcatagtggaacgtttcagaaacctgttcttccccacgatcatctgttaagacgatttttaaattctttgttaggaaagctgtctcccttaaccttctcttcagcgtattataatcaaaatcaatcgtctcaaaaatcgttgcatctggataaaatgtaactgttgttccagttttatctgtatctccaagaactttcagcggataacatacttttcctctctcataacgctgtttgtgaatatgtccttccttgcagactgtaacttccaaccagtcagataaagcattaaccacagaagatcctacaccatgaagacctccggatactttatatcctccaccgccaaatttacctcctgcatgaaggatcgtaaatacaacttcaacgctggatacaccttttttcttattgatcccaaccggaattccacgcccattatcctcaaccgttacagagccgtctttgttcaatgttacgatgatcgtatcacagaatccagccagagattcatctacggcattatctacaatttcgtataccagatgatgaagtcctttttctgatgtactaccaatgtacattccgggtcttttacgtacagcttccaacccttccagaatctggatctgatcagctccatattctccatttttttgtgtacccatagtttcctcctaattttcctttacaatttttcctgcttttatctgaaacatccgttggatcggcaggtgtttactaataaattcatccagacctgtacaggtaatgatcgtctgcgtatccttgatactctctagtaaatacgtcttacgattactgtcaagttcagataaaacatcatcaagcagcaggatcggtgactctttcatcacttctctcatcaactggatctgtgccagcttcaaagagagcgctgctgtccgctgctgcccttgggaaccatatttgcggatatcaatcccattcacaataaaactgatatcatccctgtgcggtcccactgtcgttgtagagtattttaaatctttttgtctcttctttgcaagttccgttaaataactatcataccctacatcgcggtcatattccagtaaaattttttctttcccgccagttaatttattgtgaatcttttgacaaacttcacccaaatgtttgataaatttttcacgatatttaataacctctgagccatattttacgagctgaatatcccatgcttctaatgtttctatcagattattctgaaaacgtatctgttttaacagattatttctctgaactagtattttattataatttgttaattgatacagatataatctttccatttgggataattcaatatcgagaaattttcttctttcacttggaccactctttacaatctttaaatcttcgggcgaaaataaaattaccggaatctgtcccaacagatcactggatcttcgaatcggaattctgtcaattgccacaccttttgctttattttttttaagatgcatatctaactgatgatcaattccctgtttttcgaaatgaattcttatgtgagcttcattctcttcaaactttatcaactcccggtccttatttccacggtgtgattttgttgtcgcacttaaataaattgattccagaatattggtctttccctgggcattatctccatacaataaattcgttccactcgcaaaattcatggaaagttcgtcataatttcgataattttttaattccaaagatttaataatcatactactccaaactatttgacgatatgaatctcctgaccatcaaaagatacaacttcgccaccatataatttttttcctcttcttgtttcaacttctccattcacaagaacttcaccatcctgaatgacaatttttgccacaactccagaatctacaagtccagctgcttttaatgcctgtccaagtttaataaattcatctttaagtttaatttccatctcaaaagtcctttcttaatgattaaaattaaccggaagaatcagataattgtatgttcctgcatcatctttgatataacaaggtgctttcggatttaccagataaatattgatttcttcatcatcgattactcgaagaacatccatcaaaaactttggattaaagccaattaatagatctcttccttctttttggatcagaatttcttcttccatagatccaaagaaagaattaatatttaattttaatgaatggtcagcaatatcgataataattggttttttatcagattcacgaatcaaaagactcgctctgtcgatacaatttaaaaattcttttttgttaattgtaatctttgtttcataatcactagataacatctggcttatcttataatattccccttccagcaatcttgaaacaactcttgtattatcaaattcaaataaaatatgttttgaagttacataaattgaaacattttcatccatttctccagaaatgatcttcacaatttcttgtaaagttttcccaggaacgacaactttaaacggatcataatgatcttttaattcaatatgtctgatggaaattcgatgtccatctaaagatacaacacttaattggtcatcttttacttcaaataattcacccgtcattaatttcgtattttcattatccgaaatcgaaaaaattgtttgacgaatcacttcttttaaagaaaactgggataaagtgatactttgatttttttcaatctctggtaaagaaggaaattcttcaccttcttgtcccataatctgaaaacatgctttttcacaagtgatcgttgctttgtactgatcatctgtttctattgttatgtcattatccggtaattttctaacgatttcagaaaaaagttttgcttcaattgcaattttaccaggctgatgaatctgtccatcaatggtagtttcaattccaagttccatatcattcgctgttaatttaatatttcctgtactagcttcaattaaaatacattttaagatgggaagcgtagtgttgtttgatactgctttggaaacaatagaaacagcatgcactaaatcagattttgtacatatgattttcataaatgtgtataactcctttcggtgtcagattgttgttaaataaataaataaaagtcgtagtaatagtcgtagtagctgtggatttggggataaccttaaaaaaccgctaagtataaagggttataagggttgataaaatgtttaaaacttgatgaaaatcagaggataatcatagatttatcaacatcaccaaaatcagcaaaaatactaatacacaggatatccacaggttatccacggaaaatgtggataactatcgaaaaaatgtggaaaaaataaaaattaatccatttttttggtaataacatcaataaccttgcttaattcagggtctttgtctaagtctttttcaattttttcaatgccatgaatgacagtagaatgatcacgttttccaatgatctcaccaatcttaacaagagactgatccgtcattttcttgcataaatacatacaaatctggcgtggataggcgatatcatgacttctttttttggaaatgatatcacttgtctgaatattaaaatgttctgcaactgtttgcatgatcaattcaggtgtaatagcttgttttgtcttgttgtcgatcagatcctgaagggcgatttttgataattcaaggtcaatcggtttcttatttaatttagaataaactttgatcttgtttaaggcaccttccagatcacggatattagacttaatatgggtagcaatatagtcaaaaatctcatcatcaatataaatattgtctaattccgcacgttttctaaggatcgcaacctttgtttcatagtttggaggctgaatatcaactggtagtccccagctgaaacggcttcgaagtctctcttctaaaacatccagttcttttggaggtttatcagaagaaagaatgatctgttttttagagttataaagtgcattaaaagtatggaaaaattcctgctgagtactttctttaccaataacaaactgaatatcatcgaccaataaaacatcgatattgcggtatttgctgcgcaattcttcttgttttttatgttgaattgaattgatgacttcgtttgtaaagtcttcacttgttacatacaaaacatttaaagaactgttgtgttcaataatataatgtgcaatggagtgcattaaatgagtttttccaagaccagcacctccatataaaaacagcggattataggcttccgctggagcttccgcaacagcaatacttgcggcatgtgccatgcggttattgtcgccgattacgaatgtatcaaaagtatagcggggatttaagttattattatcatgttcaggtgcagcagcaggagtttcttgtggttcttctccttctttttcaagttcgaactcgatatcgtatttctttcctgtcagatcagaaatagcaagggaaatataaaaatcgtacatttttttcttgataaactgaataccccgctcatcgtattttgcatccagagacagaatgatcttatttgactggacatctttgatatgtaatggcttaatccaggcattgatcgcagcactggagacgtcatgctcttgctcaagcttgactaatacatcatcccaaattttttcaatttcgtttttcatggataacataaatccctttctaaatcatatttttataaatgtgcataatacggcactatgcatatagtgtataacaaaaaatttcttttttcaatcgaaaaataaaagttgcccacatattgtggataagttgttccacattatacacatgtcaaaaaacgagaaaaaacaaaggaatttgacaaatactgtgtttataattcacattttatcaccaagttatacacaagttatctacaaattgtggataacttgtgcgtaaaacacaatatatatgaaattctataagaaagtgaaaaaagcttagaatttacttgactttttggcgtttctctgtctataataggagtgatgtttttacgaatatattattcagatatataatcataaaattttgttaaggaggtgttttagcatgaaaatgacatttcagccaaagaaaagacagagatctaaggttcatggatttagaaaaagaatgagcactgcaaacggaagaaaagttctgaagagcagaagagcaaaaggaagaaatagattatcagcttaggtcgcagagatgtgaccttttcttttctctattaataaggaagagaaccatgaagaattatcattcattaagaaataacagagaattccagatggtatataatgaaggaaactccaaagccaacaggtacttggtcctttattataggaagaatgatctagaatataaccgtctgggaatatcagtaagtaaaaaagtaggaaatagtgtagtcagacacagaactacacgcttaattcgtgaaagctatcgtttgaatcaggataatttgaaaacaggatatgatatggtagtaattgcaagacaaactgcaaaaggacagaattaccatacaattgaaagtgcatttctacatttgatagatttgcatcatctgaagaagagttgattacaattgaagaagattttaatatccattatcaggttttacagaaaatatttatcgagattaaagggaagaggaacatgtatatatgttccgacttgttcggaatatgccatagaagcattggagaaacacggggttgtcaaaggaagtcttttggcaatttttagaatattaagatgtaatccattttcaaaaggcggatatgaccctgttccggaagtaaggaaaggaaaaaggtgcaaaaaatgatgttattggcacaagcccagcagagcacgggtaacggaggaatcttagctccgtttgtaattatttttggttggatcattcgagcaatctatgatggattagctgcaatgggaatctataatgtcggtttatgtattattttatttacattggtttctaaattgatcttattacctgttactatgaaacagcagagatctatgaagatcaatcagcatatgcagccagagattaataagattacaaaaaaatatcgtaataaaagagaccaggcatctatgatgaaacagcaggaagagatgcagaaggtttatgcaaaatatggttcaagtccaacaggtggatgtttaccaacattaattcagtttccgatcatcatggcactgtattatgtaattcgtggagttaatacttatattcctcagattgcaagagatgtacaatttaaaccaaacttatttttaggtatggatttaaattcagcaccaggattcagattaacaccattattgatcattccagtattatcttttatcttccagttcttaagtgcaaagacatctatgtctacaacacaaatggatgacagcacaccaggagcaggaatgacaaaaagtatgatgtacacaatgcctttaatgtcatttgtaatgtgtatttcattaccgatcggtattggtctttactggtcagcaagtgcattattccagtatatccagcaggtcgcttttaattatcattatgatcatgctgatatggataagattattgaaaagagccgtgagaaggctgcaaagaagaaaaagaaaaaaggaccttctctatatgaaaagatgttaggaatgcaagcagaacagcagggacagcaaggagcagattctaatatcaagaagagtgcaaacctgaaatcaacacagaatattgaatattcaggaaattctaaaggaggaattgcttcaaaagcaaatgcactcaataaaaacaagggaggtaaataaggatgtcagcaaagagatttactggtaaaactgaatctgatgcagttatgaatgctgcaatggagttaggaattccaagtacagacctcaagtacacagtgatcgattcaggtagtaatggatttttagggttatttaagaaacctgtgatcattgaaattaaagaagaagaaaaagagacagaagttatgaagtctcagacaatagaaaaggaacaaccaaagaaaaaagctgagaaaaagccatcaaagaaggtcgatgagaaatcaaatcgtcagcctaagaagagtccaaaggtgaaagatgaagttcctgtaaaggaaccaagaaaaaataagacaccagaaaacattgatcagatcgtcaaagatacagagaagtatttagatgaagtattaagagcaatgggacttgatccaaagttgaatctttactacaaccgcagagataacgtattaaacatcaatgtatctggagagaagatgggtgcattgatcggtaagcatggacagacactggatgccctgcagtatcttataagtctttatgtgaataaagaaagcgattcttttgtaaagattaagcttgatacagaaaattatagagaaagaagacagcagactttagagaaattagctggaagcattgcttataaagtaaagaagaataagaaacctatttacttagaaccaatgaatccaaatgagcgtagaatcatccattctgcattgcagagagatccagaagtgatcacaaagagcgaaggtaaggatccttatcgtaaagttgttgttatgcttaaaaaataagatatagggctgccttaatttaggcagcccttttttgaggtatattatatgaaatcaaatacgattgcagcaattgccactccaatgactaacagtgggattggaattatcaggatcagtggagatgaggcacttgatattattgaaaaagtatttaaaccgaagaaaaaagataagaagatcaaagatgtaaagacatatacggcacattatggacatgtctatgatgaaagcacattgctagatgaatgtattgtattagttatgaaaggacctcattcttatacagcagaagatgttgttgagattaactgccacggtggtgtggttgttatgaagaaggttttggaagcagtatttaaggcaggagcaacgccagctgagccgggagaatttacaaagagagcatttttgaatggaaggatcgatctttctgaggctgaagcagttatggatctaattcagtcaaagaatgaatttgcaatgagtacatctttaaagcagttagagggtgcgttaggaaagaagatcacagagattcgaaaacagattattcacagtgtggcgtttattgaatctgcattagatgatccggaacattacagtgtggacggattttcagatgaattgaaagatcaagtcgaagtgatcataaatcagttaaatgagtttttggagaatgctgataatggaagaattctgaaagagggaattcagacagttatcgttgggaaaccgaatgctggaaaatcatctgtgttaaatgtattacttggagaagaacgagcaatcgtcacagatattgcaggaacaacaagagatacgttagaagaatctattcagattaaagggattccgttgaatatcattgacacagcaggaatcagagatacgaatgatctcattgagaagatcggtgtggataaagcaaaagatttgttgacaaaagcggatcttgtattatatgttgtggatacttcagatccattaacaaaagatgatgaagagattatggagctgattgaagataagcagacgatcgtattattaaacaaagcagatcttgatcaggtggtgaaggtatcggatcttaaagaaaaaggatttgagcagattgtgcagatttcagccaaagagcagactggaattgaagaattgtatcagctgatccaggatattttctttgaaggacatgtatcctttaatgatgagatttatttgacgaacatgagacataaaacagaagtaagtgaagctttaaagagtcttgctatggtgttgcagagtattgaagatggaatgccggaagacttcttctccattgatcttttggatgcatatgagcatttaggatttatcacaggagaatctgtgggagaagatctggtaaatgagatttttgcagaattttgtatgggtaaataaagatgaataatttagaagaaaaatatgatattattgttgtaggtgcaggtcatgccggatgcgaagctgcacttgcagcagccagaatgggatttgaaacgatttgttttacagtaagcatggatagtgttgcattgatgccatgtaatcctaatattggaggaagttccaaaggacatctggtaaaagaaattgatgcattgggcggtgagatgggtaaaaatattgataagacttatctacagtctaagatgttgaataaatcgaaagggccggcagtgcattctttaagagcacaggcagataagaagatgtattctatttccatgactcaggtgatgggaaatacaccaaatcttacacttcgtcagggtgaagttacagagattcttgttgaagatgggaagatcaaaggtgttaagacatattcaggagctgtttactatgcaaaagctgttgtcttaacgacaggaacatatttaaaggcgcgctgtatttatggagaagtcagcaatcatacaggaccaaatggacttcaggcagcaaattacctgacagattccctgaagagtcatggaatctccatgagacgatttaagacagggacaccagccagaattgataagaatacgattgatttttctaagatggcagaacagtttggagacgagagaattgttccattcagttttacaaataaggaagaagatattaagagagatcagatttcctgttggttaacttatacgacggaagaaacacatgagatcattaaagaaaatattcacagatcaccgttattttctggtgcaattgaaggaacaggacctagatactgcccatcgattgaagataagatcgtgaaattcccagataagaatagacatcaggtatttattgagccagagggcgagtacacgaatgagatgtatgttggtggtatgtcaagctcgttgccggaagatgtacagtataagatgtatcacagtgtgccaggattagagaatgctaagattgtgagaaatgcttatgcaattgaatatgattgtattgatgcgacacagctaaaagcttcattggaatttaaagagattgacgggctattttctggtgggcagtttaatggaagttcaggatatgaagaggcagcagcacaaggtctgatggcaggtatcaatgctgcacgcaaactgcaagaaaaagatccaattattttagatcgttcacaggcttatattggagttttgatcgacgatctggtaacaaaagaaacacaggaaccatatcgtatgatgacatcaagagcagaatatcgattgttgcttcgtcaggataatgccgatcttcgtctgaccaagatcggatatgaagcaggactgatcagtcaggaaagatatgataaattattagtaaaagaacagcagatcgaagatgagatgaaacgactagaggatattaatgtgggtgcttctaaaaatgtgcagtcattacttgaagagcttggaagtacaacattaaaatcatctgctaaaatgacagaactgatccgtcgaccggagcttacttatatggatttggcaccgatcgatccagagagaccagagtatgatctggatgttcaggaacaggtaaatattaatattaaatatgaaggatatatcaaacgccagctgtcacaggtaaaacagtttaagaagatggaaaagaagagaattccggaagatattgattacgaagatgttggaagcttacgaattgaagcgaaacaaaagttatcaaagatccgcccatcttccatcggacaagcatctagaatttcaggagtatcaccagcggatatttctgtattactgatttatctggaacagatgcaccacaggagataatagatggagagattaagagaaaaagcagctgcatttggaattaaattgagcgatcatcagttagagcagtttgaaacatactatgagatgcttgttgagaagaataaagtgatgaatctgacagcaatcacagagaagaatgaagtgatcgataaacactttgctgatagtcttgcattgatcaagagtggagtttctttaactggtcaaaaaattcttgatattggaacaggtgcgggatttccaggaattccattaaagatcgcatttccagaattagagatcgtgttactagattctttaaataagcgtattaaattcttaaatgaagtgatagaagcacttggacttgaaaagattacagcaattcatggaagagcggaagattttgcaaaacaaaaggaatatagagaacaatttgattatgttgtttcaagggctgttgccaatctgacagttttatcagaatattgtcttccttatgtaaaagaggatggatattttctgccatataaatcaggagatattaaagaggaagcagcaaattcaaagaaagcagtgaaaattttaggcggcagcattgaggatattatttcttttgagattccggatacggatatggcgagaacgatcttaaagattcataagacaaaagcaacaccaaaacgttttccgagaaaagcaggattgccgacaaaagaaccgatttgctagaagtttatactttcatttcttttccttatcgtttatgataaaaagaaagtgggaaaattatggaaaaaaacaaagataaaagtcacctgatcgatcagttatatgactatttggaagaacagattcaggaattgaaaactgatcgaaatcaactgaatcataagatgcaggatatgattcaggagaagaatgaaaaagaaggtgcgatcaataatcagcagaagatctatcagatccgaaaggtattttctccgcttccactggagattgaggaggagaagcagcctgtttctgaggatatgattcagattgagaaagagattcatgaatttcagatgatcctgcgtgaaaaagaagaaaagataacaaaattacatgattaccagaagggactggaagagacttgcctttttgcagaagaatttgtggaaagggaagatcagaaaatattgtttgttccagcatttgaacagttgatgggatatgttaagaaactttatccaacacagcgtatcaattatcaggattcatcagagagctcaaaagtatgcatgacattttcatttttaaaaggttttcaggcagtgttggagagtcttttaaatgagataggtgtttttgttcttaattttgaaatgaatattgataagtataaaatattaattaatattgaagcgaaaccaaaagttataaaaaatgcaaaagatttctatgagaagcgttctgttttagaaaataaactaacaaaagaattttctattgaacgatggaaaacaaatgcagtggtgatccagactatgatagagatgtagaaagggaagattatgagaaataaagttattgatctactagatcaaacaattgaagaattagataaagaaaaaattgatgggattcttgaaataccaccaaaagatgatatgggagattttgcatttccatgttttcagttagcaaaagtatttcgtaaagctccgaatatgatcgcaacagagattgcagaaaagattcctgcaagtgaagatgtatcaaaagtagaagcaatgggaccatatgtaaacttcttcttgaataaagagaattatgtaaaagaagtactggcaaaggtaaacggtacttatggtgcacaggaaattggaaaaggaaaaacagtatgtatcgattattcttctccaaacattgcaaaaaacttccacgttggacatttaagaacaacgattattggaaactctttatatcatatttttaataagcttggatataaggtagaaagaattaatcacttaggtgattggggaacacagtttggtaaactgatcgttgcatataaaaaatggggcagtaaagaagctgtagaagaaaaaggtattccagagttattaagaatctacgtaaaattccatgaggaagcagagaaagatgatacattaaatgatcaggcacgtgaatggtttgcgaagatggaacaaggagatgaagaagctttatctatctgggaatggtttaaagatatcagtatggtagaatataagagaatttataagatgctgaatatggattttgatcattatacaggagaaagtttctatcgtgataagacagcagcagttgtagaagaattaaaagaaaagaatctgctaaaagaaagtgaaggagcaatgatcgttgatcttgatgaatatgatatggctccttgtctggttatgaagaaagacggaagcagtatttatgcaactcgtgatcttgctgctattttctatcgtaagaacgaatataactttgataaatgtatttatgttacaggattagagcagaaattacattttgctcaagtatttaaagttgtggagttaatgggatatgaatgggctaaagaaaacttaattcatgtaccttatggattagtaagcttagaaggtggaaaactttctacaagaagtggtaacatcgtatatgcagaagatatcttaaaagaatcagtatctaagatcagagaaattattgcagagaagaatccagatctgaaggataaagaggatgttgcacagaaagttggaatcggagcaattatctttaatgacctatataatcagagaattaaagatgtaacatttacatgggagaagatacacagctttgatggggaaacaggtccttatgttcagtacacatatgcacgtgcggcaagtgtattaagaaaaacaggaatcacagaagttggagagatcgatccatctttagtaacagatgaaacatctgttgcattattaaaagagattgaaagattccctgaagtgatcaaggtggcagcagatagattagaaccatctgtgatctcaagatatgtaatgggagtagctcaaagttttaaccgtttctatcatgaaaaccagtgtaatgtggaagatcagaagttaaaagaagcgagagttaagattgtgatcttagcaaaacaagtaattaaagatggtttggatctattaggaattcagtgccctgaacaaatgtaataaaatcaaatttgagtaaataaatagcagatgataagattttaaaaaatatgtggaattatggagtgttcttatttgtgaagacactccatttttcttcttgaaaaatagtagtatgcattgattatttaataaatgtttcacgtgaaacattcaatataaaaacgaaaagaatcttaatagttataaaagcgaaattgcacaaaaattaataaatgtttcacgtgaaacatgtagcaatgaaaaataattagtgttataatattgttcaaaaggagaaaaaaatgggaagaattattgcaattgccaaccagaaaggtggagttgggaagacaacgacagcggtaaatctttcggcagcattagctgcaagaggaaaaaagactttactcgttgatatggacccacaggggaataccaccagtggcttgggattagaaaaaaacgagctggataagacaacttatgaggtgattacaggagaagagaagatacagaattgtatcgttaaagacttgtttgataatttatccttacttccagcaaatcgaaatctggccggagccgagatcgaattgatgaccgttgataagatgcagttcatcatgaaacataatcttgagaaagtaaagaaacaatatgatttcataattattgactgtccgccagcattgggaatgctaacagtcaatgcgatgacagcagcgaatacagtgatcgttccaattcaatgtgaattttatgcattagatggattgactcagttgatttatacgattgaattgattcagaagagtttgaatccagatcttacaatagagggtgttgtatttacaatgtatgatgccagaacaaatctgtcattacaggttgttgagaatgtaaaatcatatttgaatcagaatatttacaaaacgatcatcccaagaaatgtacgtctggcagaagcaccaagtcatggacttccaatcaatttgtatgaccctcgttcttcaggagcagaaagttacgaccttctggcagaagaagttatcgaaaatggaggtgaaaattaatgtcagcaaaaaaaatgggacttggaagaggtttaaatacgctgattccaaaagcaccaatcgttgacgaagaagacattgagcaggtaaagaaaaaagtttcgagatcgtcgaaaacaaagaaaaaagaagaaacgaaaaaggaacttactttgccaatcgataagattgagccaaatccagatcaaccaagaaatcagtttgatgaggatacgttgcaggaacttgcagattctattaaacagtatggaatgttacagccaatcctcgttactccaaaggatgatttctatgagatcattgcaggggagagaagatggagagctgcaaaacaggcaggattgaatgaagttccagttatgatcagaaaatacaatgaaaatgaaattgtagaaattgcactgattgaaaacattcaaagagataacttaaatccaatcgaagaagcaatggcttataagcgattgatggaagagtttgaattaaaacaggatgaagttgcgacgaaagtaagtaagagtcgtgcatcaattaccaactcattaagacttttaaaactagatccaagagtacagaagatgctagaggaagagatgatcagcacaggacatgcaagagctttattagcaatctcaaataaggataaacaatatgaaattgctcagaaagtttttgatgaaaaattaagtgttagagacattgaaaagctggtaaaagatctgaagaaaatcaaaaaaaataaaaaagaagaaaaagatgttcatgatttcctttacactgaattagaagaatctatgaaacagattttaggaagtaaagtcagtatcaaaaataagaagaataataaaggaaaaatagaaattgagtattattcacgcgatgagttagaacgtatcgtggatatgatcagatcaatttaggaggaacataagatgacagatttttttaacagtgtaggcatggaatatgtagtgattggtcttgcagcagcattacttttagcactgattcttgtgatcgttgctttagtaaaagttgggaaattaaaaaaacgatatgaaaagtttttatctgggaaagatggaaaatcgttagaggaaagtatcgttaaaagatttgataaattaaatgagatcattgtggaacaagactttcttgaacaggaaatacagagaattgacgaagagcataagagttgtttttctaagatggaagtctataaatataatgcattttctgatatgggtggagaaacaagctttgtaatcgcattacttgaccataataataatggaacacttttaaatggaatgagcagtcagaatgcaacttatgtctatgcaaaagaaattagaaatggtgcttcaaaagtagcattatcaaatgaggaaaaattgacattagaaaaatgtatcaataaataattggaggaaaaaatgttagatattaaatttttaagagaaaatccagatgtagtaaaacagaacatccaaaacaaattccaggatcgtaaattaccgttagttgatgaggtcattgaactggataaagaaaaccgtgagatcaaacaggaagttcaggcacttcgtgcggatcgtaataaattatccaaacagatcggtgcactgatgggacagggtaaaaaagaagaagcagaagaagtaaaaaaacaggttacagcatctgctgatcgtattgaagaattaagtgaaagagaaaaagttgttgaagaaaagatcaaagagatcatgatgacaattccaaatatcattgatccatctgtaccaatcggaaaagatgacagtgaaaacgtagaacttgaaagatttggtgagccagttgttcctgattttgaagttccatatcatacagaaatcatggaaagttttgatggaatcgatcttgacagtgcaagaaaagttgcaggtaatggattctattatctgatgggagatatcgcaagattacattctgcagtcattgcttatgcaagagacttcatgatcgatcgtggatttacttactgtgtaccacctttcatgatcagaagcaatgttgtaacaggtgttatgagtttcgatgaaatggatgcgatgatgtataagatcgaaggcgaagacttatatctgatcggtacaagtgaacattctatgatcggtaaatttattgatacaacaacagaagaagcagaattaccaaaaacactaacaagctattctccatgtttcagaaaagaaaaaggagcacatggtattgaagaacgtggtgtttacagaattcatcagtttgagaaacaggaaatgatcgttgtatgtaaaccagaagaaagcaaggattggtatgaaaaattatggaagaacacagttgatttattccgttctatggatatcccagttcgtacattagagtgctgctctggtgatttagcagatctgaaagtaaaatctgttgacgtagaagcttggtctccaagacagaagaaatactttgaagtaggaagctgttctaaccttggtgatgcacaggcaagaagactgcgcatccgtgtcaaaggtgaaaatggaaattactttgcgcatacattaaataatacagtagtagcaccacctagaatgctgatcgcattcttagagaacaacttaagagaagatggaagcgttgcaattccagaagttttaagaccatatatgggtggaaaagaatctctgcagcctaaaaaataagaaatagaaattcaaaaagagcgtctcaaaatgtgaggcgcttttccttttataaaggtttatgatattatatacgataaggaaaggtttaaggaaaggtgataaggaagcaaatgaaagcaaagatcattatcgtggaagatcatgaaccaattcgtaatgaattaaagattttgttaagtaaatatggatatgagatcatagtgttagatcgttttgatacagttgttgaagagtgcttgagagaagatgtagatctgattttattagatattaatcttccgttttatgatggttattatgtgtgcagagcaatcagagaaaaatcagaagtaccgatcattgttgttacaagtagggatagcgagatggatgagataatgagtataaatcttggagcggatgattttatcacgaaaccatacaatacacagattttgttggcaagaatttctgcaatgttaaaacgaacacacaaagaaaaagtaaatgattttttacaatatcaaggcttgaaactacaacttaatagcagtactgttatttataaagatcagataatcgaacttagtaaaaatgagatgagaatattgtatacattactgcaacataaagagagtattgtaagcagggatcaattaatggaatccttatggcagtcaaatgaatttattgatgataatacattaacggtgaatgtcaatcgtgtaaggaaaaaattagaagcagcaggactgaaagattttataaaaacaaaaagagggcagggttatatgatatgaaaatcaaagatttttttagaatggagtatgcccagattctgatatatattgtatttttgggattattggaagtattgctttttatttttgaagtgaattattttcttatgatatatttgctgctgatcggattgattctggaaggaatttatttatgccagcggtatatgaaaaaatatcggtattataaaaaagtgaaagcaaaactggatatactggaacaaaaatgcatgataacagaaatgttagaattgccagattttgcagaaggagagtttctatatgaaatattgcagacgtgcaacaagtccatgaatgatgagatattgaaatataagatagaggcagcaggataccgagaatatattgagatgtggattcatgaagtaaaaacaccattggcagcaacaagactgatccttgaaaatcatccaagtgagatcacacgggcaatggatgaagaaatgcagcagatcaattattatttggagcaggcattgtattatgcgaggagtaatagtgtagagaaagactatctagtgaaagagttaagtttaaaagaagtggtagaaaatgcggtaaaagcaaatgcaaaaagtctgatcggaaataagataaaaattaaaatagagaatctggatcagaagatcttcagcgatgaaaaatgggttttatttatattaaatcaagttatcagcaatgcaataaaatataaaaaagaagaagcagaaatatcattttgtgcaagatgtgaaaagaatgaaatacttctggaaatcagagacaatggaattggaatctcaccaaaagatttgccaaggatcacggacaaagggtatactggaactacaggaagaaactatcaaaaatcaacagggatggggttatatttgtgtaagaagctttgcagcaaattacaactaagtttttacatcgaatctaaagaagaagaatacacgaaagtaacaatcggcttcccaagaaattctatgatttttttaaatgaagaatgatcagacaggaggtttacaatgtttgcagattatcatgtacattcacattttagtgaagacacagatttcccaatggaacttgaaattcagaaagcgatcaaattagggatggatgaattatgttttacagaacattcagattatgatgtgccaactgtcgttaattgtgattatgatgcttattttgaagaaatggaaaaaatgaaagataagtataaagggcagatcacattaaagacaggaattgaatttggaattcagacgcatacgacgaaagcgtatgaagaaacattcagacagtatccgtttgattttgtgatcttttcttgtcatcaagttgaaaacaaagaatattggagacaagagccacaggaaggaaagacacagttagaatacaatcgaaggtattatcaggagattttggatgttgttaaagtatacaaagattacagcattcttggtcatcttgatgtgatcaaaagatatgataagcaaggagaaatcgaatttgaaaagattcaggatctgatcgagcagatttttgaagttgtgatcgcagacggaaaaggaattgaacttaatacttcaagccgtgcatataaactgaaaagtctaatgccatcaaaagaaattctgaaactgtatcatgatatgggaggtaagatcattacgattggatcagatgcacataatgcagaccggatcggtgactgcgtaatggagtcacagaagattttaaaagatattggttttgatggaatttatacttttgaaaagatgaaaccagaatttcatagattttaagataaattaaagaggtgcctattatttttaacaaatagacacctctttacatattgtgctatattttagatttcaagattatttatcaagtaagattagtgccataaatacaagatcttcatctccgatattctcaatggcatgtccagctccatcacatgtgaatgtagtatctcctggatgtacttcatattttgtaccattgtcattataaagtccttttccctgaaggatatggtaagcttcgccttcaccttcatgagtgtgatatgcaagagcagaaccaggtggtacgatgacttttccgaacagacgactgctatctttcatttctttttctgttaagaattccattttttttaatgggttatcagaaccatttgcatcaggaattgtgccaatttttacatcttcattttttaaaaacatgttgagtccctcctttatatggtcatgttaagtttagtatagtagctttttgataaaatagcaatatgacaaaattgtaagttttgtgtaaggaagttcgatggatacgaagatgatttactggtatattatagacaagacaataagagaaaccaaaaaagataaggagatggaaaaatgagttctgtattgaaagtagataatatagaaaaatattatgggagcaaagcgaatcttacgaaagcgatcgatcgtatcagttttgaagtggaagagggggagtatattggaattatgggggcttccggaagtgggaagacgacattattaaattgtatttcaacgatcgatcaggtgactgcgggaaatattatgatcaatggaatggatatcacaaaattgaaaggaaaacatctttcaagattcagacgagaggaattaggatttatcttccaagactttaatctgttagatacattgacagcatttgaaaacattgcgttggcgcttacgatcatgaaaattcctgcaagagaaattgaagacagagtcagatcgatcgcagaaaagttgatgatcacagaagtattgaacaaatatccatatcaaatgtcaggaggacagaagcagagagtggcaagtgcccgagcgatgattacaaatccatctctgatcttagcggatgagccaacaggagctttggacagcaaggcggccagaatgctgcttgacagtatggaaacgatgaatgtggaattaaatgcaacgattctgatggtaacacatgatgcatttacagccagttactgtaaacgtattttgtttatcaaggatggaaagatttttaatgaattggttcgaggaaatgattcgaggaaacgattttttgaccgtatcattgaggttgtgacattgcttggaggtgacagtacaaatgtattctaagatcgcatttagtaatgtcaaaaagagtatccgtgattatacgatttattttctgacattaacatttggaatttgtttgttttatatgtttaattctgttcaggcacaacaggctgtcttaaagctgaatgcaagccagaaatcaatgatgcatctaatgtctgtgatcattaatggaatttctgtgtttgttgcaattattcttggatttctgattgtttatgcaaatcagtttctaatgaagcggcggcataaggaaatgggaatctatctgttgttaggaatggaaaaacgacaggtatcaaagattcttctgatagagactttattgatcggtgttttggcattgatcgcaggattggtttcaggtgtgtttttatcacaaggacttgcgatgttgacagcaaagatgtttgcggttcagatgaaagagtttaagtttgttttctcgcaaacggcatttattcagactattttgtattttgcaattatttttattattgtgatgatatttaatggaattacgatatcaaaatataaactgatcaatctgttgaattcagcaaagaaaaatcagaaaacaagattaaaaaatcctatattgtcggtcattctgtttttgatatccattgggattcttggaatagcatatcatttaattcaaaaaaaccagatgcttgctgtggacaatgattttaagatcagcgtattacttggtgtagtaggaacatttctcttcttcttttcgttatcaggattcttattagaattggcaaaaagaagtaagaaattttattataatggattaaatatgtttgtgctaagacagatcaattcaaagattaccacaacatttgtttctatgtcaatgctgtgtttgatgctgtttttagcaatcagtgcgtttgcgacaggaagtggattggcgtcttcagtgaaaacagatttagaagatatgacaaagtttgattgtactttttatggattatcggaaaaaggatatcaggaagaacagcagcaaaagtttataaagaaattagatgatcttggattaacgatcaaaaaagatgcaaaagaaattttaccgatcacaatatatcagaatggtacatttcgcaaatgcagatataaaatggagccattattaaagggaagagaaaagtattcagattatacaaaagattatgtgaagaaaatttatgaaactccactaacttttgcaaaactatctgaatataataaaatccgaaaagcaatcggagaaaaagaattaaccttgaaatcagatgaatatatattgaattgtgattatggcaatctgataccgataatggaaaaggcggctaatgataaacaaaaacttacattggatggaaaaacatataaaatgaaatatggcttacaaaaagatacctatatggtagcagcagctaaaacagatatgggaacagtcattttaaatgatgaaatcatccagtcattaaagattgattattctacattatatttaaatctgaactggaaggggaatgcacagaaagtatcaagaaaatatacggaatatttaaagcagatgatcataaatagcaagatgccaaattcactatattcagcgacaatttcaaaagaggaagtatacgaacagagtactgggttaagtacgatcatgacatatattgcaatttatattggactggtatttttaattacatgtgcagcagtacttgcattacagcaattaagtgagaatgcagataatattgaaaaatacaaattattgagtaaaattggaacttcacaaaaaatgatcaatcgtgcgattaaagcacagatcatattgtatttttgtctgcctttaagtttggcattgatccattcttatgtaggaattaaaacagcaaaaattctgatatcaacgttaggacaaattaatataacaaaagcagcagctcagtcattgatcattgtgatcgtaatttatattggatatatgatcgcaacttatctaggaagcaagagtatgctgaaagaaaaatagagaaagaaatgacagaagatccaaatctgtcatttctttttttgagctattaataatgttaccggttaatgtctgtttggaagcatttaattttacagtacctccttatgttcattagtataaaaatcaaatgtgttcaaattattttgaaaacttgaacaaattatgaagaatatacgtgattgaaaataaaagaaaatgattgactatgattgaaattgtgatatacttaaataaaagcgaaaagaggtgatattgtgttagcgcaagagcgatttgaacgcattttagagattttaagagagaaacagtcagtcaccgtggtagaactgacagaaaaactgaacacctcagagtccacgatacgaagggatttaacggaattaaaccgacaaggtcttttgatcaaggttcatggaggagctactgcgatcaagtctgtgttatcaagagaagaagaagtcataaccaagtcaaagaaacaccaggaagagaagcgaaagattgcaaaatatgcagcatctttgatcaataaagaagatatcgtgtatcttgatgcaggaacaacgacagagatgatgttagattatctcagagaatatgacgttatttatgtgacaaatgggatcacacatgcgagaaaactgatgaacgcaggatttaaggtccatttgatcggaggcgagattaaagcggtaacagaagcattggttggagaagaagcattagaacagcttgataaatataactttactaagggctttttcggaacaaatgggattgatctgaagcggggatttacaacgccagatcagaaagaggcagcagttaagaagaaagcgatggaacagtgccagaaaacatatattctttcggatgcaagcaaattcaatgtgatctcaactattaaatttgcagatttaaagaaggcagagatcattacagatcatttagaaaacaaagagttcaaaagaatcacaaacattgaggaggtattttcatgatttatacagtaacatttaatccagcaatcgattatgtaattaaagtagataacctgacattaggacaggttaacaggacaacaagagaatacattttctgtggaggaaaaggtattaatgtatctcatctgcttgctaatcttggagtagatagtgtaggacttggatttatagctggatttacaggagatgttattgaatcaggagcgaaagaacttggatttaaaccagattttatcagagtccgtgaaggaatgacacgtatcaatgttaaggtaaaatccaacgaagaaagtgagatcaatggattaggaccagttattcatgatgatgaattagagcagatgtttaagaaattagatgaattagaagatggagatattttagttcttgcaggaagtattccagcaacacttccatcagatgtatatgaaagaatcatgggacgtctgcagggaaaagatatccgaatcgttgtagatgcaacaaaagacttgttgttaaacgtattaaaatatcatccattcctgatcaaaccaaacaatcatgaattaggagaaatgtttgatgttgtgctaaagacaaatgatgagattgttgagtatgcaaagaaacttcaggaaaaaggcgcaagaaatgtgttagtttccatggcaggagatggagcaatcctgatcacagaagaaggagaggttcatgtaacaccttgtccaaaaggagaagttaagaactctgtaggagctggagattccatggtagcaggatttatcacaggatatttgagaagtaatggagattataatgaagcactgaagatggggacagcagcaggaagtgcgactgcattttcagaagatgttgcaactggcgagaagattatggaattatataaaacattataatgaaatagcatacaatgaaagaaaattatgataaaatgaacctaagaaattaggttcattttttgtgcgtaattttataaaaactggaggatatcatgacgaaaaaagaagcaagacaacaagtaaaagaatggatgaaaaaattagacaaaaattatatagaaaaagcagatcagtcgatttttgaacaggtaaaagagttaaaagaatttcaagaggcaaaaactattttttgttatgcaagtatgaaaaatgaagttgatacatggcagctgatagcattggcactgaaacaggggaagaatgtcggagttccattgtgtattgggaaaggaatcatggaagtgagacaaattcatgctttagatgattttgaggaaggggcatatggaatcatggaaccatccagaaggtgtccaatcttatcgaaagagaagattgatgtggcggtaataccgtgtgtaagtgcagatagagaaggccgtagacttggacatggagcaggattctatgaccgttttttagatggagtaacatttccaaagattctggtatgttataaagagttaatgatggatcaggtaccgacagaagagcatgatattttgatgaatcaggttatttgtgacgaataatgaagtaatagaatgatcaagcaggagagatgatagacatgagaaagattttaaagaaaacagcaacattaatgatgacagcagtgatcggagtatctatgagttgtcccaagatgatagtttatgcgggacagagaatgcaaatgcaagagagatatacgactccaaaagaatggaattatgcagaaatcacagcatatcagtttggatctacagataaatttgaagattatcttcagacaggtggtacacatctatacaatgataaatttcaagaaaaagatcatatgatcaaaattacggttgcagattctgggtattttacaattgcaacacaaacagatggaaatagatcacagaaggtaaagctctatgattcaacgaaggagaaagttttagctcaaacgacatctgatggagacctggaatatggaaggcttgcaaaagcaggtgaggtcttctatcttcaaatgccagaaaaaatcgataaaatatttgtgacaacaggtgtgatcaaagatggatttggatctatgaaagcatcagatacttattatgaatcaggaactgggagtaccacatatcatccattttcaattaagaagagatctgcggtggaatttaacatttcagcgatcgatcgaaacagtgagatcacttatgcacacatcgaaaagaaagaaaacggacaatggaaaagaatcgatgatacggtaaagatcaagccagcatcttatgatgatgattttgttcatggattgactaaaggtgaataccgcctggcgatcaaagcaccgacaacacagttaaatgcagtctcatatacaagcagttctaaaagtaaaaaggtagcatataagaaatcaaaagcaaagaagatcaaactggatggacaaacatcgaatatatacaacaggagagaaaacttcaagatggtataaaataagtattacatctacaaagaagaaaagaattctgaatcttggaaagaacacggtttctggaggatacaagtttacaatttataaaaagggaaagaaaaaagcaattaaaacaattaaggtaacaggaaatgcaaatgcgaagatagcgaaaatgccaaagaaaaaaggaacatattatatcagaatctcaaagcttacaaagaaaacaaatggaacgtatgaaatagggtattattaatccaaatcaaaatataaggaggaatttttatggcaagaaggggaatcaagaaaatgggagcagttctgatagcagcaggtttaagcattgcaatgtgtagcccatcagtatctgcaaatgtaaggacaaatattaatacagacaagataacacagaaaaagacagccagatatgttgaaccagaagaatggaacaaagaggaattgactgcatatcagtttgattcagaagtagatatgatgaaatatctggtgagcggtggaatgcatttatataataagaattataaaggcagtgaccgctgggtaaagattaaagttgcagatccagggctgtttatggttggtgtcgtaagtaacgatgagacaaaaataccagtatatgatgcgtcaaagaaaagaattatagtaaataatttaaatgatggcggggacaaagaatatgtaggtatcgtgaaaacaggagatgaattttatgtaaaactgccagagaagatagacaaagtgatcattttaactggtgtgatcaaaaccgaatttacttccatggcgaatcagaaaagttattatgaacttggaaaagggacaacaacctatcatccattttccgtagcgaaacgctcaaaagtacaatttgatattacatccatcggaaagaaacatgaaaaagttggagtatacattgagaaaaatgtaaatgggacatggaaaaaagtcggatatggcacaacggtaaaaccagataaatatgacagtgcattgctctatggattagaggcaggaaaatatcgtctggcattaaaaacaccaaaagatcagatcattaatatagaatatacaagggacaaatcaaagaaaaaggcagcctataagaaatcaaaagcgatcaatctaaaatcagatattgacagtatatatacttccacagaaaaagcagcgcgttggtataaggcttctgtttcatctaccaaaaaaagaaaagcagttacattgtccaaagattctgtgggtggaggttttaaattctgtgtttatcaaaaaggaaaacggttaaaaacagtaaaagtcacaaagaatgataaagttaagacagtaaaacttccaaagaaaaaaggagcatattatgtgaaagttacgaaacttacaagcaaaacaacgggggcatattatttgggaacgtatacatattaagaatcacaaggagggaaactggatgaaaaaaatgaaaagtaggtcatttcgtattcttatggcagcagtcatatcagcagcgatgctgtgtccgcaggttaaagtatcagcagcggatggcttagtatcaaaagcagctacatcatattttccgagtaaaacagtaatgaagaaaacagcaagaaaaacagagccggaagaatggaatcaaaaagaaattaaagcatacaaatttggaactcttgaagatgccttatattatgcgctgactggcgggatcaaatattatgatcagaattattttaaaaatccagatctgatcaagctcactccagtagaatcaggagctttaggactggcagttgttggggataataaacaggaagcaattctatatgattccaataaaaaaatgatcaagaaattgccactgtcctatgtaaaggcgcaggtaaatgcaggagaaacttattatatagagtttccaaagaactgtaaagaaggattgatcacagcttacgtattacaaaatgaatgtggtgggttagcaaaaaacgacctcaatatgcaaaaaggtgaagaaaaagaaacttatcacacatttaaaatgacaaaaagaggatttgcaggttttgttgttgcatccatggtagaagatggtggaaatacaagctataaagttcagaaaaatgaaaaaggaaaatggatcacaatcggaagaacaaagtcatttaaaccaacaaacgaagacgaaacacagattgcagtaggttatggacttagtaaaggaaattaccgtctagtattgaaggctccaaaagagcagctcaatacaatgttgtatacgacaaaaaattatgccaaaaagaaagttgcctataagaaatccaaagcaaagaatctaaatgcaacagagatgtatacaatgaatgaaaaagcagcccgttggtataaagtatctgtaaaatctagcaaaaagcaaagcaaattgaagattttaacagttgcagatcaaggtggatttaagtttacgatctatgagagaggtaagaaaaaaccagttaagacagtaaaaacatctgcaaaacacttagaaaagacagtaaaacttccaaagaaaaaaggaatgtattatgtcaaagtaagcaagcgtactaagaagacaaatggatactatgagattaagaaataacggttagaatagaacgtcaaaaaaggaattgtcagaaaagacagttcctttttttcttaatgaaaaaaaaactcacttactattcttgaaacgaaattaaaaaaattataaactataggttaggaaatactaacctagaaggatgaaataaatgaaactaaaaaagttaatatgcatagtgatggtcagtgttttaggggtactatcattcgccggatgtgccaagaaacaggacgaaaagaagacagaaacaagtagtgaagcaagtacacaggaagcaagtgcgcaagtttttgccatggatacctatatgaatctgaaagcatatggaaagaatgcgcaaaaagcagtggatgatgctaagagtgagattgagcgattagatcagctatggtcagcagtagataaaaacagtgagatctatcagctgaatcagaagaaaaaaatgaaagtatctgatgagacattagaattgatcgaatttgcaaagaaaaaatcaaaagaatcaaacgatgcttttgatatttctatctatccgatcgtggaattatggggatttccgacacagaaatatcgtgtgccatcggacagtgaaattcagaaacttctgaaaaacgtaaatagtcagaaaatcaaaattaataagaaaacaaatgttgtgacattagagaagaatatgaagattgatcttggaggaattgctaaaggatacacatcacaaagaattgcaaaaatctataaaaaggatggtgtgaaaagcggtgtgatcagtcttggtggtaacgtacaggcaatcggaacaaaaacagatggaagccgatggaaagtcggagtgcagtcaccagatgatacagaaagtatgatcggtgcatatgaagctgctgatgaagcagtcattacatctggagcatatgaaagatactttgagaaagatgggaaaacatatcatcatatcattgatccagcaactggaaaaccatccgaaaaagatctgaaatcagtaacgattatcagtaaaaatggtacattatctgatacattgtcaacaacattgtttgttatggggaaggataaagctatttcttactggaaggaacacagcaaagaattcaatatgatccttgttgatgaaaataataaggtatatatttcacagggaatcaaagatcattttagttcagatagtgattttacagtaataaaaaaataaaacgttaacagatagaaagagagaaggaaaaacaaaaatgaagatcattgatcagttaaagaaagtcaatctgattcagtttgtgcctgcgatttttgtgatcagtctggttggaaacagtgtttttggatatacggcaccaaagtcagaaaaatcaaaaaataattctgaaaatcaggtagaagctgcaacgacacaagcgaaaaagaaaacaaagaaagcaaatgctggggatattgatctaagcaagatcaaggatggaacttatgaaggacaggcaaacggatatcgtggtttggtaaaggtttcagttactgtaaaagatcataagatcacagcgatcaaagtattaagtaattccgatgatgccgcatttttcaatcgtgcatcagcaggtgtgatcaaaaatattctggcaaagcagtcattaaaagttgatgttgtcagtggagcaacttacagttcaaatggaatcattaaggcagtaaaaaatgcgttaacaggggaagaagataaatcatccgcaaaagcaggcggatcttctgcgaaatctgcaggaagtgttggtacagcggatgaatcaggaacatacaaagatggtacatttattggaacagcatctggatatcatggcactgtaaaagtttctgtgacgatcaaaaagaataagatcaaatcaattaaaattttggaaaatcatgatgatgcagcgtattttaaccgtgcaaaaggtattttacttccattgatggttaagaaacagagtacaaatgtagatgcagtcagcggggctacatttagttccaatggaattatcaaagcggtacgaaatgcattaagcaaagcagcggttaataaatcgtctagtgacagcagttctacatctacgacaaaggatacaacgaagaaagatacaacagagaaagtatcaggtacatacaaagatggtgtttacgaaggaactggaacaggattcagaggaaagatcactgtcagtgtccgcattaagaagagcaagatcgtagagattaaacttgttaaaaatgaaaaagatgatgcggcatattttgaacgtgcatggtccgaagttccatttagtattattgcaatgcagagtgcagatacagataaagttgatgcagttagtggtgctacatatagttcaaaaggtatcatggaagcagtcagagatgcattaaagaaagcattagcgaaaaaagatacggaaactacagtagaaacaaataatacgaacaatagtacaaatgataataatacgaatactgataattcatctgaggataatacaacaactgtaccaacaacaccgacagatcaaacgtatacaggaagtgcagtatgtgagccagatgaagatggagattttgacgcatatgatcttactttagaagttgtagtttcatctgatggaaaagtaaaaggaatccaaaatataaaatggtcagataaaagcatgcaatcatggtataaggatgcggaaaaaaagatagttcctcaattgatcgcaaatggtttggatacatcaaaaaattatgacgtggtaacaggagcaacatgttcaagcaatgcattgatcaatgcatacaagaacgcaatttcaaagataaaccaataggtagaggaacaaaaaagagatatgaaacaattaaaaaaatacaagcatttcttaatgagacttctaaaccttgtgctgatcgttggagtatgttttgcatatcataatattgcaacgatccgggcagaaaaagaagcgaagatcacagctgagaacagtggttcgggttcatggaaagatggaatctatgaaggcagcggtcagggattcggtggtcagatcgttgtgagtgtaaccataaaaaatggttccatcagcgatattcagatcaaggaagcgaaaaatgaagacagtgcatattttaataatgcaaaaaaaatcatagatacaatgaaacaaaagcagacagccgatgttgatgtagcaagtggagcgacatacagttcaaaaggtattattgcagcggtacgaaatgctttgaaggaggcgtcataatgaaccttagacaaaagagagatataagacgtctcacccggcagatcatccagatcatctttttcctatggatgccggcattatatacatcagcattttctggtgtgaggtatgtgatcgaacagatcagggcaggcaagccgatcgagcagaatgcatttcttgtaatgctgatcgcattatgtggatttaccattttatttggcagattcttctgcggatatgcctgtgcatttggaaccttgggggatggaatgtatgccctatcccaatgggttcagaaaaaagtaaaaaagaagcttccgtgggtatcagaagaaacaggacggaaacttcagaaaatgaaatatatagtgttattagtcttaatgctgatttatgcattaggatttacaaaaaagttccatggaaccagtccttgggaagtattttccatgttgtacacaggtaagattccagacgccagttatttagccggatgggtcatctttgtacttatactggtaggtatgtgccttaaagaaagatttttctgccaatatctatgtccaatgggagctatctttgcatggttaccgacattgccgttttccgtactcgacagagaccgaagcaactgcattccaaagtgccgtgcatgcgagatcaagtgccctgtagatcatcagatcaaaagggaccagaagaatggtggggaatgtatccactgtatgcaatgtgtagatgtgtgtccgaagcagaacattcatctgtgttcaggcaagaaattaaaaggaaatgaaatccttattattctcctgaaacttgtattgtttattggggtttgtatttttgcacaaagtttgtaagacaattgacgaaataagaaggtgtccaatcccttataaaggcactttttttaaaaaacaatagttagtagaaactaacttaatgtgaaaaattctcaattatggtcagaacatgcaaaaatcaagataaatatacaaagatatttcagtacttatacctttgtatgaagctattaatttttataacttgaaggaggttcacatgagaaaaggaatgtggaaaaaaggtttaacagtagctatggctgctgcaatgttggcaggacctgtaagtgtgccagcagtatttaacaatggcgtggcggttgttaaagcagatgaaacaaataagggacaagatgtctatgtgttgatgaatatcccatatgctgatttttataaggcagaattaaataatactgtaaaagtagatgcgacaacttcagcaacaaagacaaaaacaaaaagtacattagccaatggatcttatcatgcagacaatactggagagcatatttcaggaatcacttatcctgtaaagatcaaagcaggaacagatctatctaaattaacaaaaattacagacgcttctaaagtttcaattacagtaaatatgaaaggaaaagaaacaacaacagaatataaaggcaaagatgctttatttgaaagtgcagattattcatattatgaattaggtacaacagcaccagcgtactataaagaattaactgtaaatgaaaatggatcttattcttttggcaagactacagcaactgaaaaaacagtaaaaggtgcagcaattgagaagtttaagacatcatctaagtatggagattatcaattaaatttaaactttgataaggttgcggatagtgatcagatcagtgggaatacgaaagttcttgcagcagtgatcacaacaattgatggaacacaatatggattaagacatgtagaaaatatctggaaagggacagaatttgcatggggaacaggatttacaacacagtctcatggttgcccaatttctggagaacattatgcatctatgatgggaaaaacaattgatgcagtaacatattatacagaaaatggtgtagtgaaatatgatattgatgatacatatgtaccatataagtttgatacaagtgcatttaaagttgaaaatgcagatgtaacttccggaagtgcaaaagtaactgtgccaacattaccagaagcgtatgatgcagaatatgcagtagaagggttaacaaacgtcagtgttgaaaatggaacattaaaatataatgcaacaggtgtcaaaccaggacagtatacattaaatgtaacagataaaagctcaaaatatgtaccatttagcacaagttttactttaactacagataatgttgtagcagcatataacaatgatgttaaagcacctgcattagtggcagcaaaagatgtgcaggcagatgattttgcaaactttgtaaaaaatattcagaaagtttctgtgaacggaaaagagtatgcagcatcaggaaaaggagctgtaaaattgatcaatgcagatggaacattggtgacaacagcagatgcattaaaagcagaaggtacatataacattgttgtaacagcgactggatataataagacattagaatttacatatacaaacaagtcagatacaacagcaacaaagccatcagatgctacaacagcaacaaagcctgcagctacaacaacagcaacaaagcctgcagctacaacaacagcaacaaaaccagcagtaaaaccagtcaaaaaagtaacagttaagaaacagacagtaaaagtaaaagcaggaaagaaaaaattaacagttacatggaagaaagacaaaaacgtatctggataccagatcaagatcgcaactaagaaaaacttcaaaggtgcaaagacatacacagtaaaatcttacaagacatataagaaagtcatcaagaagttaaaagcaaagaaaaaatattttgtaaaagtacgtgcatacaagacagtaggaaaatctaaagtttacggtgcatacagtgcagtaagatcttgcaaagtgaaataatgaaaaaataaatagtagcgtatagttttttctgaaaaataaaaacacgagattgccatagaaggtagcagtctcgtgttttgttgttatctaatcataaagtttttaaaagatctaaatccaaatcatatttatgaggtatatcagatcgtaatagtgttttgatggaatctttcttcaaacgattattaatcgtaacataagatttatcaagcatttcagcaatttctctggcagacaatggttccagaccaaataaagaattctgtaatagtaaatgaagaattccataatccgttttatctttaaaattagacaataatattcgctcgaaataatgcaaacgttctattttgtcttctagagaatcgattaatgtttcaatggatgcaagaataatttctagaaaatttgtaataaaaccagtcaggtcaccacgattatcagtatcatttgtataatcaaaacttttataatatttggaaatattttgttttattgtttttgctaaatgatagctgatcagaggctctaactccttggataaaagataactgctgataaaacgatttgttcttccgtttccatcataaaatggatggatatatccaaatagataatgaaagacggagattcgaatcaaaggaggaatggatttattatgcaatataaataaagctttttccatacaggcaataatttcggtttctccagatattccacggtgaatttctttcatatgtggactgtaaacggaaacagatttttttcgaaaaaaaattccatctggaagattcaaaggatcattatttttaatttcttcactcactaattcattgtaaatatttcgaatgtcagaacaattatgaattgaaattttttcagaattttttagtaaattatatttttgaactaatccataaagacgcatatttttttgtgtgatcgattgtgtatttaatatatcttggatctcacgtcgagtactgtttacaccttcaatctcatttgtaagttttacttcatctataagacaggtttgagtatactgttccagagcaatctgagggagtcttgattttaaatagattaaagtctgggtaagtttatagattcttgatgttaaatttaaaatttcggtagttgggagtgaaaagcatggaaaaccatgaatttcaaaatcataatgtaatactaattcattttcatatcgggaagaatagatagattcaaattgatttcggtttgtatatcgatatttttttaaaatgtgataatccatagttgtcctccttaaaaaatataaagtgaattttaataataatagaagtataacataaaaaattaaaaaatatgctaattttttaatttttttggatataatacatataaaaataaaaaacgagagaaatttttaatttctctcgttttttatgagcaattaataaaatcatcgtttcttttttcgagaagctaattgatttgccagattcacgatcgtctcgatcggatttgcaagcttactatgattcatagcttcaatatatttatcacgatcttcataaacactgttaacagcattcaataaagtttcgcttgtaacatccttctcctgaagcacatagctgtatccctgattctcaaaagattcagcatttaggatctggtctccacggctggcttctaatccaagaggaatcaggatatttggctttctaagtgcaagaagctcacagatcgcattcgctccagcacgggacacaacaacatttgcacatgcaaaataatgttttaactcatctttgacatattcaaactgtttgtaaccttttctgccctcaaggctttcatctaagttattacgtccacacagatgaatgatctggtatttttcaagtaacgcatcaatgttactgcggatcgcattgttgatcgcaacagatccaagacttccaccaataacaagaagtacaggtttttcttctgtaaatccacacagacgaagtccttcttcacattttcctgtaaataattcttcacggatcggagaacctgttagtacagcttttccttcagggagaagttttactgtctcagggaagttgcagcatactttacttgcactaggaatacttaacttgtttgctaatcctggagtcatatcagattcatgaatgatcacgggaatatggagctgtttggcagcaatcacaacaggcacagtgacaaagccacctttggaaaatacaacatctggacgaagtttctttaagatcttctttgcttcaaaaaatcctttgataactctgaatggatcagagaagtttttgatatcaaaatagcggcgaagctttccagaagaaattccatagtaagtaacaccgatatcttcgatcagtttcttttccataccttcgtaagaaccaatataataaatattatatccttcatcaatcagtttcggtataagtgccatatttggtgtaacatgtccggcagttcctccaccggttaatacgattcgtttcatgatcttttcaccccgattaattattttctttgtacgcgatcagtgctttagaaagctggtctggacaagaagttccacggaaaccacactgaattccagataatttgtcgataacttcatcaataggcagtccctttgctaatgcagcgacaccagttgtatttccctgacatccaccaacaaaatggatatctgttaagattccgttttctacctcaaattcaatttcactggaacaagttccttttgttttatataccataattctattatcctcctgtaaatatatttcaaaaattaagtatctggtaaaatgcctagatacacaacaaattatagtgcaagagagtgtgtatttcaagagattcttatttgacataaattacgatttctcgtaaactgaaatcaacataaaagaaaaggagataacatatgattggtatcattggagccatggaagaagaagtcagtcagctgatcgaagctatggaagaaaaagaaaaagtaacctgtgcaggtatggatttttattgtggaaagttaaaagataaagaagttgtgatcgtgcagagtgggattggtaaggtaaatatggcattatgcacacaaattcttgcagatcgttttgatgtaaaagctgtgatcaatacaggtgttgcaggtggactatataaagacattgagatcggggacattgtaatctccaaagatgcagttcagcatgatgtagatgcaactgtttttggatataaagttggggaaatccctagaatggatacttcttattttgaggcagataaagatctgatcgaacttgccaagaagacatgtgacgaagtgaatccagatatccacagctatgttggaagagtagtcagtggggatcagtttatttcagataatgagaagaaacattatctgatcaatgaatttgatggatactgtgcagagatggaaggtgcagcgatggcacaggcagcacatttaaatcagattccatttatcattcttcgtgcgatctctgataaagcagatcaggaagcagcaggaagttacgaagaatttgaaaaaacggcaataaaacacattgttcgtctggttcttggaatattagacagaatgtagtctaactttgtaggacggtttctcttaagtttcgatagatatccttttataatcataagtaacatatatatgatgaaaaggagtggtatctatggaaatgttaagggaaactttttttatgaaaggatttataacagcaatggtgatcgcagttcttactaaggtcatagtttgggcaaattatcatagattgttagtatcttcagaagaaatggagagaccaaaacggcattggatcggcacattaaaaaagaaaatagaaaactattataatctgcaaacaaaagtgaataatatcagctgtattgtggataaatattttgaagcggacaagatattggggataaattcgtttttcctggaacagattccagggttttgtgcaattatctgtgtaggtcttggatgtctgggcgctattcgtggaatagcaatgaatgcagatattaatttctggggaagaaatttgatcattggagttgtatgtggaatttccatctttatgatggattatttaacaaaaatggatcagatgaagaggaaaataaaaattaatctgatcaactatttggaaaatatattaccaaatcgaatgttgaattatacaaaaaaacaaaattataaagaaaatttagaaaataagaaaaaagaagagataaaaaaagaaaagaaacaggtagcgaatatcgaagagcattggggagagattgcaagttccagagaatgtcagctaacagatgaagatctgcagatattaaaagattttataaaagacttataaagtgagaaattggataatacatataagaaaaaggggttgtgtgggtgcttttatgaaatatcgaaggatttttcagatgatcttagtttgtataacaggaatattacttagtggatgcaggggacaaatcgaagagcagaaaaagaaaaagcaggatacgcaccaagattcaacaatacagatatacaagacggtgggaaatgtttcgcaagggattgaaagttggtggtttaaaagaaatgaagaacatcagcagccagaggtttcacagaaaatagatctgtcaaaatatgatgcatattatgtagatccaaaatgcacagaaaaaaagatttatctgacgtttgattgcggatatgaaaatggatttactccaaaaattctggatgttttgaaaaaacaaaaagttgtagcagctttttttgtaacaaaaccatttatcagagaggaagcaaagcttgtaaagcgtatgaaaaaagaggggcatatcgtgggaaatcatacggtgcatcataagagtatgccaacattgtcagatcgcgataataaacaggaaatcatagattgtgcacagtattgtaaagaagcaacaggatatgatatggatctttttatccggcctccaatgggagagtataatgagagaacactagcattaaccaaaaagatgggatatcggacaattttctggagtatggcttacgtggattttaaggtagatcaacagcctggaaaagactatgtgatagaacattttcaaaaatatacgcataaaggtgcgatcccactcatacataatatatcgcgatcaaacgcagaagcgttggagacagtgatcataaacctaaaaaaagagggataccgatttgaaggattgaaaaaactgccggactattgaaagaaattcgttagtttgataaaataaggaacgttataaatattaacagatacgcagaatatcatttataattaggagatacagatgaataagatagcacaatttcataaagtaagttttgaacagttcaaagaaagctgggatgatagttttccaggagcttcagaagaagaaatcaaagaaatctatgaccagatcaaattgccaaagagagcaactagaggatcagcaggatacgacttttttagtccggttgattttgaattaaaaccaggagaaacaatcaagattccaacaggaatccgagtttttattgaatctgattgggtattaaatattttcccaagaagtggattaggatttaaattccgtcttcagatgaataatacagtcggtattattgacagcgattatttttattccgacaatgaaggtcacattcttgtaaaattaacaaatgacaccaatgaaggtaagacagtttcagtggcacagggaactggcatggtacagggaatctttatgcagtacggagttacgatcgatgatgatgcaacagaagtcagaaatggcggctttggaagtacaacaaaatagaaaatgaataacaggtcagagtattaatctctgacctgttgtattttgtatggagatgatgagaatccatacatttgtggaatttataagagagaatccattatatctgagatatgattcagagatgagacctgtcatcaatgaaaattatattctatatacggacgaatacagggtgtcctgtttttttgactgcctgttgctatcttgtaatcggtaatcctgctgttattattatgcgtttaaaatacaatgttcactcccttatatatagtaaaccgatttttgaagaaaaaagggaaccagaaaataaaaaaatattcttatttgtattgttcataggaaatcctctttctgaaacatggttcttacgcgtttcttggctacagcaattcttttcttaactgctctttcagaaatatgaaacatacatgcaatctcactatatttaaatccatagaaataatgaaaaattatagtatcacgaaaatcgggtgttagtgttgagaaaatgatcttgagagaatcaagataaatataacggataaacagatcctcaggatcaatgagattacgagaaatatcgttaccatcatcataatctaaaggatagtgagaatttttatactcatccatagttagtgtatacatcacattacgctgtatagcaaagagataatagataatctcgtgttcaggtacatgtaatgctgtgtcaggatgtaaaagaattttttcaaatatctgctgaacaccatcttcagcaatacttggatttgacgtgtaatgaaaagcattacagtataatttatgcgaatatttctgatataaaagtgcaacatattcagaaatattctgattgtttgtggggtgaccgtttcccttcatataaataatctccatttgttttgtggttttgtaaacgatttcaaaagaaaatataaaattatttagtcttcttcaattacctgaatttcaagaaaatcaaaatcaatatcttctacaaaactgtcagaattaaatctggtttttgaatgatggataaagtcgtttttattgtgatcaagccagagtggtttagaaagatcaaattcataacagatctcttccaatgcctgatatacttttctagttcgattcagatcactatctatacagattacagtgtcttttaacatatgattttcatgaaaaatcttgccccacatacgaaacataaataaactcctgccttaataaattggtaaatagttacttcttttgacttagtatagaagtatttttgtttcttgtaaagcaaaataggtatgttatactaaaaaaaacattatgttaaaagggagatggagcatgaaaattttaaaacggatttttatagatggattgtcaggaatggcaataggattatttgcaacattgatcattggaacgattttagaacaagccggaacgatcataggaggagatataggaaatatgatcgttatggttgcatcgattgctaaagtattgacgggagctggaattggaattggagttgcaagtaaattaggagaatcaacacttgtatgtgcatctgccgcaagtgcgggtatgatcggagcttttgcttctggcttattgaatggaagtgtaagttcaagtggcaaaatcctattaagtggcccaggagagcctcttggagcatttgtagcggcttacataggaatagagattggaaggattttcattggaagaacaaagcttgatattattttgacgccattaacaacgatcgtatgtggtggaatcgtggggttaacggttggaccatatatttcagatctcatgaaacagatcggagagatgattcgatggggaacagaacagcagccatttttgatgggaattgttgtttctgtattgatgggtatggcgttaactcttccgatcagttcagcagcacttggaattattttgaatctttctggaattgccgcaggagcagcaacgattgggtgttgtgcacagatgatcggatttgcgacggccagtttacgggagaatggaattggaggtctattggcacagggaataggaacatcgatgttacaggttcccaatattgtaagaaaaccattgatctggctgccaccgatcattacaagtgccattcttggtccgatctctactgtagttttaaaaatgacgaataatgcaattggttctggtatgggaacggcagggtttgtgggaccaatgatgacatataagacgatgacaacaggaggaacttctgcagtgactgttattgtcatgatactggtcatgcagatcatagctcctgcatttttgacatattttatttcggaagcgatgcgtagagcaggattgatcaaggatggggacatgaaacttgatatatagaagggatattagcggattttataccatttgtgataaaatccgctaattttataacggtgtgaagtcgagtgttttgaattacagattcgtttgaaacggaatcagaaaagacatttacaattccagtgattgataatcgtccgatcggtgggagttgttttgaaacgcctcggccaggaagcagtgggagaggggagagtgtaatacatccaacatgctgtgcataaccgagacaggaatcgacagcgatgatgaaaggattttggcagacagaataaatttctttaaaagtttgattgagatttttagcgtgaataggttcttttaaagtcccaaaaactgaatattgaggagaaggaagcaatgcctgaccaacgagtggtccaagacagtcaccagtcgcgcggtctgtaccgatacagacaatgacgaggggctgattttttttatgctttattttgagataatgtagcagatcattttgaaatttcataagagcataaggggaatctggatgatagtaagatattttttttaacaatagatcgtcctcctgatttaaattctctttttagtgtatacaaaaagaaaagaagtatgtaaaaaaattttaacgtctcgacgttgtttgataaaaatttttatctctttatgataaggtttttgtgaaatggaagaaaaggaggttttttcgtgaaaacagagcagcagttgcctaaaaatatcaggcagattggaagtccagcaggacacacaaaagtatatattgaagattacgttataacatttttaaattctttatccatggacaaaaatacatatgtaagaggagcaattttatttggagagaaaaagcagattggaaatgatcttgttatttttataagaggagcgatcgagggacagaatctggaattggatcttgatgaaacagtatttgatgatgaagtatggagagagatatatcaacagaaggagcgattgttttctggtctggatgtcatcggatgggcacttttaagaatgggattttcggttcgactcaatgataaaataaaaaagacacattttgaaaattttccaggagaaggaaaagtgttatatatgatggataatctggaaggagaagatgcattttatgtttttcgaggagaagatctctcaaggcaaaatggatactatatatattatgaaaaaaatccgatgatgcagaattatcttgtggaacgaagacaagatataaaagaggtgcagacatatgaaaaaatgatggagagtcgaagagatgagaaattgatccggcagtttcgtgaaaagatatccaaaaaaaccaagagtaatcagagaaaaggaaggattcggaatatttcaacggcagcagcagttacgatcatgatgatcatgggaggtacgatgtattattatgctggacaagatcagagtataaattttaaagaggttgtaaatggtgcggtgcatacgatgggaaaaggggtgtcggatcaaatttcaacaaaatcatcaacaaaatcatcaacaacgagtataaaaataacaaaaacattagattcggcaacacaaacttcaatacataaaaaggaacaaaaaacaacacaacccacaataaaacaaaaacagaaaactcaaaaagtaagttctgggcaatacaagtcttatacatataccgtaaaaagtggagagacgttagtatcgattagtcggaaggtatatgggacccagaagcttgttcaaagaatcaaaaaggcaaatgcattgtctgacgaaaatcagatttacccaggacagaagttgatcattcctggaacacttcgatgatatttaaactaggaaatatgtgtagactggacacatttcattgaataaggtatacttacctgtattcagagatgatgattgattagaaaatggaaggtattttatggaacaaaagacgaaatcagggttttctctttatgtcaattccaatgagaacattcaaaatgcattatttctaagagaaaaaaagaaaaaatatcgtatgggattgatcatagcgtttgtggttgtatgtatatgtacaatatttgcatatcgctatcggacatatcacaggatgaaggttgtaaaaacgatcacaaaagagctgacagaatcatttcagtcatttgcatataagaaaggaacgatctgttacagcgaagatgggatttctttcttagatggaaaaggaaatgaaaaatggaataaaacatattccattaagaatccacaggcatcttattgtggggactatattgtagttgcatccaagaatgggaatgagattgcgttacttgattcagatggacagatgaaaaaatttagtgtatcttatccaatcgtagatttggaagtggcaaaacaaggtgtaattgctttaattcttcacggtgataatggaaattatatagaattatatgatgcagcacagaagaaactggtaagtatcaaagtcacatctgatcaaaatggatatccaatggatattgatctgtcatcagatggacaaaatcttttagtcagttatcttgtcgttgatgggattaatgtaaaaagcagagttgcactgtataattttggacaggaaggtgaagacagtggagatcagatgatcggtggctttgattttaaagatacggtaattccgaaagtgagctttatgggtgattctaaagctgtggcaattggagatgatcagatgattttctttaaagtaggaaaaacaatttctaaaaagcaaacgatatcatttgataaagatgtgagtagtgttgcggtgaatgatgattacgcagcattcgtatttgaagatcagaaaaaaacagatcaagaaaaatatgaagcagtcgtatataataaaacaggaagaaaattgatgtcacataaattctcttcagaatataataaattattattaggagagaaagaattattgttggctggaaattatcattgttcaattgtgaattttgctggacatgaaatgtttaagaaagactttaagaaacggattgtcaatatttcaccaacaggaaaaagacagaaatatctgataacctatgaaaatagtacaaatttatcagagatatactagaatggagtacatatgggagaaattatcgtagctgtttttggaatctatttgatcttgcagatgatcataggttatcgaagaggactcattaaaagtatgctgaatcttgcatcatggattttaacttttgcgatcgcttataaaggcgctgcatattttaaagaaatagtgattcaaaatgtaccagaaatccagggaacgattgttacagatcgaattgcatatatgattgcatatatggggttgatgatcgtatgtaaaattattttttcagtggtaatacgttttgcaaataaagttacaagggttccaggtgttgggtttattaacaaggtagcaggagcagcacttggattgatcaaaggttccttgatcattatggtagttgtattttttatttcattgatgccacatgttggaatggaatctgaatatgctcagatcgttggcggaagtgaagttatgcagacaatggtggagacgaatccattagaacagatgatcaaacagcagatacagatagaaatacagaaattattacaacaataaaaagaaggtattttgcaaatgtcatttaatgattcatttgcaggataccttctttttgaaataatgatgagagtgttaaataataaaaatagaaaaaatgaaaaaaggtgttgacataaaagaaatggcatgatattatatttaagctgtctgtgagagacagtgaggaacatattgtttcaaagggatttgaaaaaatgtttcaaaaaagaattaaaaaagttcttgacaagtaagaaagaacatgatatgatgtaaaagttgctgcggttcttatgaagaacgggtcaacaaaataaatcaaaaaagttcttgacaagctaagaacaaagtgatataataataaagcttcttatacgaagcggatcacaaaaagatctttgacaactgaacaataagacaaccttgaaaattctaatgaatttttcagatgattttag

SEQ ID NO: 613 - DNA, 456 bp, Unknown
  gut microbiota DNA sequence
caaagaaggctgaagtgtaagagatgtagaaagattcttgtatgttgttttgaaggtatatcctttacaaataaggcccggtggctcagctggttagagcgccgccctgtcacggcggaggtcgtgggttcgattcccatccgggtcgctttattttttgaatatttgggatcatagctcagctgggagagcatctgccttacaagcagagggtcataggttcgagtcctattggtcccactttttaatttaataactatgccgttgtggctcaattggcagagcagctgatttgtaatcagcaggttaccggttcaagtccggtcaacggcttcacacctggtcataattatgttatgatttaggtgtttaaaatatatatggttggattcccgagtggccaaagggggcagactgtaaatctgttggcaccgccttcgaaggttcgaatccttc

SEQ ID NO: 614 - DNA, 50852 bp, Unknown
  gut microbiota DNA sequence
aaccacttaatttttatcgcgggatggagcagtctggtagctcgtcgggctcataacccgaaggtcgttggttcaaatccggctcccgcaattttttattttaataattagtatgcccagatagctcagtcggtagagcagaggactgaaaatcctcgtgtcgctggttcgattccggctctgggcatcttttttattttataaagaaattcaaagagttaactttcagaaagaatgaaaaaaccgaaagttgactcttttttttaattcctattcaataggaattaagtatgatataataaaaatgaaaaaatatgtttacaaagggataaaaaatgacatcaatttataataagttgaaacaactacaatacaaagaagattatccttttcacatgccaggacataaaagaaatttaaagatcgatccattattagatgcgatttccaaaattgatattacagagatcacaggatttgatgatcttcaccatccagaagaaatgattagagaattgatggatgatttaaaacagatttatggaacaaaagagagttatctactggtaaacagcagtactgcggggaatttagctgcaatagctgcattgtgtaatattggagataagatactggttgcgagaaactgtcataagtcagtctatcacgcgatagaattgttgggacttgatccaatctatatttatccagagattgatgaatatggaatctgtaaaggcattacgaaggaacagatagaaaatatcataacaaaagaaacttcaattaaggcaatggtccttgtttcaccaacatatgaaggaagagtatcagatatcgaaggaatatcagatgttctgcatcgaaataatataccattgatcgtagatgaagctcatggggctcattttatttatcatgagacatttccagagagtgcggcaaatagcggagcagacattgtgatacaaagtctgcacaagacattgcccgcatttacgcaaacgggattacttcatttgtgcacagattgtgtcacaagagaaatgatgcaaaagaaattgtcaatatttcagagcagcagcccatcctatgtgttgatagcatcaattgaacaatgtatccacatatgtaatgaaaatcgtggatattttcaacaatactacgagaaattgtggatactacgtgaaaaactagaagaattaaaatatatcaaactggtaccaacggatgatattggaaaacttgtgttttcggtaaaagacacgacaatatctggagaagaactatttgagattttaagagacaactatcatttagagatggaaatgtcagaactttattatgtgatcgcaatgacaagtgtgtgcgatacacaagaagggtacgatagattgtatcaggcattaaaagagatcgacagtgagatcacaaaaaagaatacagagtatttatttttggaaaatgattttcatcaaaataaaaagatgttaaaaccagaagaagctgcaacaaaagatcgaatacagattgattatgatgatgcaaaagatgagattgcagcggaatttatttttttgtatccaccaggaattccacttgttgtgcctggagaagtgatcgataagtatgtgattgataagatcagacagtatgagcaatataatatgaaagtgataggactgaatgatcataaaatatatataataaatagatgagaggatataaatatgggattatttttgaccgttgaaggaccagatggagctggaaaaacaacacaaatagaattactaagagactacttatctgacaaaggttatgatataatagtatgtagagaacctggcggaacaccgatcagtgaggctgtaagaaatgtgatccttaacaaagaatttactgagatgggacatatgacggaattactgctttacgcagctgccagagctcaattgatcgaagaagtcattcgtccggcattagaagatggaaagatcgtaatctgtgatcgatttgtggaatcatctgcagtctatcagggaattgccagaggaatgggaattgatcttgtttacaaagtaaatcaatttgcaatcggagatacgatgccagatttgacgattatgatcgatctggatgcagaagctggtatttcaagaaagaaaaaacaggcagagctggaccgaatggaaagcgagacaattgattttcataagaaggttgttgaaggatacagacaacttgcgagcctgcatccagatagaatctatactgttgacggaagtctgacgatcgaagagattcatcagaagattgtttcacaggtcaacaaaaaatttcatggtaaagggtgatgtagtatgaagagttttgatgcaattataggacataaaaaaataatttctcattttgaagaagcaatcaagacgggaaaagtttcccatgcctatttattaagtggcgaagatggaagcggaaagatgatgatcgcaaaggcagttgcgaaggcacttctgtgcgaacacaaagatggatgtggagaatgtgcagcatgtaagcaggtggattcattaaatcatccagatgtcatttatattactcatgaaaagtatgaaatcagagttgatgatattcgaaaagggatcaatgagacgatcgatattaaaccgtatagcggagattataagatttatatcattgatgatgcggatagaatgaatgcaggagcgcagaatgccttattaaagacattagaagaaccacctgcatatgcagtgatccttctattaacaaacaataaggatagattgttagatacgatcctctcaagatgtgtgtccatgacattaggaagtgtcagagaaagcgaaattgaagattatctaaaagccaatacaggggcaagtcatgcagatatcgcatttgcagcagcattttcacttgggaatattggacgtgcattgcatgtactggatacagaagaatttaaagatatgctgaatgatacaatgaacgtgatcactcatatgaagagtatggagatttatgaagttgtatcgtatgcgaagagtctgacaaaatataagaatgagatttatgatttccttgatatcattatggtatggtatcgagatatgctgattcttaagacaacaggatctttaaatcaacttgtatttaaagataaataccgtcagctaaaagatcaggagatttatatttcatttgagggaatcagtcatattcttgatgaagtagaaaaggctagaaggcgactgatcgcgaatgttaattttgaagtggcaatcgaaatgctgcttgtgacgataaaggagaatggtaaagtatggtagaagtaattggagtgcgatttcgtactgcaggaaagatatatttctttaatccaaaggaatttcaggtaaagtcaggagaccacgtgatcgtggaaactgccagaggaattgaatttggatcagtcgtttctgagagaagacaggtaaaggaaaaatgcatcggagatgaattaaaacctgttttaagaatcgcaaccaaagaagatgaagaaagggcagcgaagaatagagagaaagaaaaagaagcatataagatctgccttgataagatcaaggagcatgagcttgatatgaagcttgtatcaacagaatatacatttgataataataaagtattattttactttacggcagatggacgagttgattttcgtgaacttgtaaaggatctggcagcagtgttcaggacaagaattgaattacgacagatcggcgtcagagatgaagccaagatgcttggtggtatgggaatctgtggaagaaaattatgctgtaatacatttttatcggagtttgcacctgtttctatcaagatggccaaagagcagaatctgtcactgaatccgacaaagatttcaggagtctgcggaagattgatgtgctgtcttaagaatgaacaggaaacatatgagtatttaaacagtaagcttccaaatgttggtgagaaattaaagacaaaagatggcgtagttggagaagttcagagagtagatgtacttcgacagaaggtaaaactgatcgtggaagatgagaatggagataaagaaatccaggaatataagattgatgatcttctgatgagaaagaaaaagccacaaggatgtcaggggtgcagcaaaggatgcaataataagaatcaaggatgtaataaaggacatggaaagagaaagaattgatgatcttgggatcaatggttatcagatcatccagaaagaacagggattttgttttggaatggatgcggttcttttatcagattttgcacaagttaagaatggtgggagagttctagacctcggtacggggactggaatcctcccaattttgatggaggcaaagacgaaggctgttcatcttacagggcttgaaatacagccagagatggcggagatggcggcaagaagtgtcaaattaaatcatttagaagataagatagagatcgtagagggtgatatcaaagaggcttctgcgattttttcgcatgatagttttgacacgatcacatcaaatccaccatatatgatcggacagcatggacttaagaatccgtcggagacgaaagcaatcgcaagacatgagatactttgtacatttgcggatatcacggcagcagctaaaaagcttttaaagaataaaggaaagctgtttctggtacacagaacattcagattgtcagagattttatgccagctgtctaaggatggattagagccaaaaagaatccgttttgtgcatccatatattgataaagaaccgaatatatttttattagaagcagtaaaaggcggaaagtcaagaatgacagttgagcctccattgatcgtttatcaaaaagaaggaaaatacacagaagaaatttataagatttatggaatgaatccggaggaataagcatgagtggaacattatatttgtgtgcgacaccgattggtaatctggaagacattacttttcgtgtgataaacacattaaaagaagttgatctgatcgcagcggaagacacaaggcacagtatcaaattattaaatcattttgaaattaagacaaagatgacaagctatcatgagtataatcgtgtggagaaagcaaaagttcttgtaaagcagttgcaggaaggaaaagatatcgcactcattacagatgctgggacaccgggaatttcagatccaggagaagaattggtaagacagtgccatgaagcaggaatcacagttactgcattaccgggagcatgtgcgttgatcaatgcactgatcatctctgggcagccaacaagaagattttgttttgaagcatttcttccatcagataaaaaagaaagaaaacagattcttgattctctggaaaatgagacaagatctattatcatttatgaagcaccacatcgtttagtaaggactttggaagaactacatgaagtgctcggagacagatccatgacattatgcagagaactcacaaagaagcatgagagcatttttaaatcaacgcttggggaaatccttgcctatcatagagaaaatccgccaaaaggcgaatgtgtgatgatcatagaaggaaaatcatttcaagaattaaaagaagagagtcaggaagaatttctaaagattccattgtcagagcatatgaaccgttatatggatcagggatattcaaagaaagaagcgatgaaactggtagccaaagatcgaggtgttggtaagagagagatttatcagcagttgttggaagaggaataaaaatatatcaacaaaaaaggtatgggaaaataatatcaattcccataccttttgtttgtctttattgaaatgattcaaaaaattacgcttcagtaatttcgaatccagcaagtttagctaattcaatgatagattttcttgagactttctttcctttgtagtcaatcagatcatccatatcttctccagtaaaaatatctgcaggattatatttctttaaaataatcttatcgtcatctacaaatatttcaagaggatcgcgttcgttcacatcaaagttacgacgtaattcgatcggtaaagtaattcttccaagttcgtcaagccttcttacaatgcctgtacttttcatgtgtaaacctccttaatgtcttacaatcattttatatcttaaaccatagcataccaaaatctggttgtcaattcatttgtttacttataaactagagaataaataagtataattaacagatttcagcacctgctggcatatctttatctggtgttacaagagctaattcacccttatcattttcagcacaaagtaacattccttcagagagaactcctgctaatttggctggttttaagttcacaagtaccataactttcttaccgaccatatcttctggtttataataagctttgataccagaaacaatctgttttacctggcttccaatcttaacctgagagcaaagaagtttcttggatttcttcacttcttcacaggcaatgatctcaccaacttggaactgcatcttagtgaaatcatcaaaagtgatctcatcttttggttcaatgtcgatgacagtatcttcttctacagcagcgtttgcagctttgacagaagcagcctgtttctccattaagactttggctttttccataacttctttctcatctaatcttgcaaataagatctgaggtttttcagttacttttgtaccactcttgtagtttccaaatgttgcaaggttatcaaattcaaccatagatgtatttaactgagcaaagatcttctcagatgtctcaggcatatatggtgataataaagatgcaccaattgtgattccttcaacaaggttgtataaaacagtagccagacggtcttttgaagcttcgtcttttgctaatacccaaggcatagtctcatcaatataacggttgcagcgacggaataagttaaagatctcagtcattgaatctgcaacacgaaggtcagccatcttctcagcaactttatctcttgtacctgtcacaacggctttcagatcatcatcataatctcctacaacacccttgttttctacgattcctccaaaatatttgttggacatagaaatcgtacggtttacaaggttaccaagaatatttgcaaggtcagagttcatacgctcgatcatcaattcccatgagatcacaccatcacgttcgaaaggcatttcatgaagaacgaaataacgcactgcgtcaactccgaagaagtcaaccagatcatctgcgtataaaacgttacctttggatttactcatcttaccatcgccctgaagcagccaaggatgtccaaatacctgtttaggaagtggaagatctagtgccatcaggatgattggccagtaaattgtatgaaaacggatgatatctttaccaatcaggtgaagatctgcaggccagaacttgttaaacttgtctgaactgtttccatcacagtcataaccgatacctgtgatatagtttgtcaatgcatctaaccatacataaacgatgtgtccttcatcaaagtcaactgggattccccatgaaaatgatgttcttgaaacacacagatcctgaagtccaggaagaaggaagttgttcatcatctcattcttacgggattctggctgaataaattcaggatgtgtattgatgtgttcaatcagacggtctgcatatttgcttaattttaagaaataagcttcttcttttgcgggttgtactggacgtccgcagtcaggacatttaccatctactaactggctctctgtgaagaaagattcacaaggtgtacagtataaaccttcgtattcacctttgtagatatctccctgttcatataatttcttaaaaatcttctgaacctgtttctcgtgatcttcatcagttgttctgataaaacggtcataagaagtgttcataagatcccagattctcttgatttctccggcaacatcatcaacgaattcttttggtgttactcctttttcttctgcttttaattctactttctggccatgttcgtcagttcctgtctggaaaaatacgtcatagccttccattcttttatatcgagcaatactgtctgccaggatgatctcatatgtgttaccaatatgaggttttccggaagtataagtaattgcagtcgtaatataatatggtttcttactcataatgatcctccgattttctgtttctatccttataattatagtacatcttgtgcggatagtctattttttttctttaaaaaataagatattaacaagtgtttatttggaggtagaaatggaatttgcagggagattgaaaaagatcagaataaagttgatcatgattggaatttgtctgatatttctaggaggatatagtctgatccaagaatggaaagatcaaaaaaagaatacaacaaaaaaagtatttgatcagtatacggatgcgttttttaaagaaaatatatcaacaaatgagatcacgatgcatttctttttagaaaatccagaaaaatatagattagaacaaccgaaaaatctttatccatccatgaatcagggaagtatcttgaatgaaaaaattaaaatttcaaaagaaattgagaagttaaaaaaatttaaacaaaaggaattgacgaaaaaacagcaaaatacatatatggttttgatggattatttaagaagacagaaaaatctttcgatgtatccgtattatgaaagaatccttgggaaaacatctgggcagcaggcacagattcttctgacattaagtgaatatcgtctgaaaaatgagaaagatatcaaaagctattttcaattattgaagggactggatggatattttgattcactgatcgaatacagcaaggaacaggtaaagagaaatttattcctatctgatcagtctttaaaagaagtattgcagcagattcagaatgtcataaagcaaaaagaaaacaatatgttggttgcaacatttaatttaagaattgcagatattaaaggaattaatgcagctcagaaaaagaaatactgcagagaaaataagaaattgatcggtacaaaggtgctgcctgcttatgaaaaattatattcccatttgcaggcattaaatggaaatgggaaaaatgaaaatggtctgtattattataaaaatggaaaagaatattataaagtattggttgcacagaaaacaggatcagataaaacgatagaagaaatgatcgaaatcagtgatcgatccattgaaaaatgccttcgaaaacttataaaattgcaaaaaaagtatccaaatatcataaatgaatatagaaatcataaaaaaaatataaaaattgtgcaaaatccacaaaatatacttaacaaactaaggcaaaagatggtaaaatattatccaaaggcaccaaaagttagctgtaaaataaaatatgtgcacaaaaccatggaagaatataccagtcctgcgttctatatggtaccagagattgattcttacaaggagaatgtaatttacattaataaggcacagactgcagagttatatccaactttggcacatgaaggatacccaggacatttataccagaatgtatattatgcggcaaggaacgatgatccagtgcgttatctgcttgattatcctggatattcagaaggatatgcaacgtatgtagaagtttttagttacagtatgatggatgctgaaggatatggcgatatttatcaacagatgaatatggagatgtacgagtacaatctggcactttgttcaagagttgatcttggagttcattatgaaggatggaagaagaaagatgtcagggcgtatttaagatcatttggaatggatgattctcaagcagatgaattatttcagatgatcatcgagaatcctgcaaattatttatcttattatatcggttatcaggagtttcatgagcttttgactgattataagaaaatggcagggaataaatacagcttaaaagcgtaccacacagagattttagatgcaggcccatgtagttttgacattttgagaagacgcatcgaaagcaacctatgaatggaggagtaacttatgtcaacaaaagcttattacacacatgaagaaatcggaaaaggaaagcctggattttcaaaaacaagatccattattgaagcagcattctatggaaataacgttgtagaagtaaaagatttaaaacaggcttatgaattagcaaagaattcacctggaacgatcgttacagatatgccagtatataaaccagaagcgattggtttagatgaggggtccaaagttctgttatttaatgatggatcagtgactggacgttgtgcagccgcaagaagaatttccagtgaacctggtgtagatacaaatgatctggatctgaaactgatggacgcgatctatgatacaagatggacaacaatgtatcatgcacaggtatatatcggtttagatcctgaatttatggtaaaagcacatcttttaattccagaaggtgaagaaaatattttatattcctggatgttaaatttccagtatatgaatcctgaatacaatgaaatgtataagaattcacagccagttgcagatgagacagatatctatattttctcagatccacagtggacacatgaagaacatccattaggattaacatattttaatacagacacaaactgtgctgcacttcttggtatgaaatactttggggaacataagaaaggtacattaacaattgcatgggcgatcgcaaatcgtaacggatatgcttcctgccatggtggacagaaagaattcagattagataatggagagaaattcgtagcatctttcttcggattatcaggatcaggaaaatccacattaacacatgcaacacataataataaatacgaagagattcaggttctgcatgacgatgcatttatcatcaatacagaaacaggtgcatctattgcaatggaaccaacatactttgataaaacagcggattatccaacaggatgcccagataataaatacttattaacagcacagaattgctctgcaacaagagacagcgaaggaaaagtcgttcttgtcacagaagacatccgtaacggaaatggtcgtgcgatcaagtccaaattatggtcaccaaaccgtgtagataagatcaatgacccagtcaatgcaatcttctggatcatgaaagacccaacaatcccaccaatcgttaagatcaaaggagcttccttagcatctgttatgggagcaacacttgcaacaaaacgaagcagtgcggaacgtctggcacctggagtagatccaaaccgtctggttgtagaaccatatgcaaacccatttagaacataccctcttgtaaatgactacaagaagtttagaaaacttgtaaaagaaagaaatgtagattgctacatcattaatacaggagacttcatgggtaaagatatcaaacctgcaacaacaatttccgcaatcgagcaggttgtagaaggaactggagaattcaaacagtggggaccatttacagatatcgaagtgcttgagatggaaggatatgtttcagactttaatgatatgaattacgtggaaacattaaaagcaagaatgacagatcgattaaactttgtcttcgagaaagacgtagaagatggtggatacaatgcacttcctacacaggcaaaagaagctttagcaaaagttattggagaagcacacaatttagaagtggaaaattccaataattaaaggtataatactcttaaatcgttgtttaggaggtaaattgattggataaagatcgtttaaataatatggtggtagacttattccacggaatttcatatgaagaagagaaagccgtgatcacagatgagtttaaggatatttcgaacaaagatctgcatattattgatgcgatcggaatcaaaaaaccgaagaatatgtcaacgattgcaggagatttaaacattacggttggtacacttacaaccgctatcaataacctcttgaagaaaggatatgtaaatcgcaaacgcggagagaaagatcgcagagttgtttatatatctctttctgagaaggggaggaaagcatacagtcatcacagagaatttcataaacgtatgatccagggactgcttgatacgcttaatgagcaggaacaggatctgttggtgaaggttatgcagtattttcatgattactttcgtgaacatatgtaaaatttatttgttggtttgatagctgtagtcttcgtttttctcagatacctaaagtttacaggtattaaatcaaataaatcaaaactcatagtatgtatattttacggtatttgtttatgtttttagataatcaatgactgaaaaatctcttatcagattcagaagattaaagtttgtgattcagtgaaaggtttgagcagtgaaaataaaaaatggagaaataataatgctcaaagtcagttaagaaaaattacagacaagaaaggaaaacttgagtcatatcaaagaaagacaattatttacggagacggattccatgctccagagcagagaattggaaaatatgagtttgaatttttatggaagtggtaagaatcatagtgttttaaaatgctttgaataaaattataagaaaaaagatccagataatgcgcttttctggatcttttttctgtgtcacttggacattatctcattttttcgaagataatataacatatatttataaatatttcaagtatgcataacttaatgaatcaaagtatgtgtgttatctaaaaaaataaagcaaaaattctttattttcctaaaatgatatcgtatcataaagatattcatacaaaccaaggaggggaaggaatatgctgcaattaaattacaaattaacagatgaagactacatagaattcaacgaatttcatcagttaattcattcagaaataggaaaaagaaacctgttttttttaagattaatcggtccaatgatcagtattctagctatgatcattttcatactagcaagagcagaagtaatgttaattattggtgaagcaattgtattattcattttttctgtggtggatatattactagctaaaaagattatgaaaagagggattcgtaagacaattctaaaaatgaaagaaaaagaaggactaccatttgcagaagaaacaacattaaattttacagaagatcagatcatagagataacaaaaggtcaggaagtgaaagtagattataaaaaggtagaagatgtttgcgaaacagagaaagctttttatgtttacatgagctctgtacaagcgattattattccgaagagagtattggatcaggataaggaaaagaaattgagacagatcttaagtaaaaagtaaaagaaaatcataaactggcaccattaaaaataaaaaaactggctattttaaaaataccaataacacgataaattataacacaataaaggaacgcagcgtacttgaaaaactatatatcatacaagaaatcaggaagtgaggaaaataaaatgaaagaaaataaagtacagtttattgcaataacagcaatggcagttgcattaacttatgtgtttacagcgtttgttaacgtaagattaccgatcgcagctaatggaggtctgattcatttaggaaatgttcctctatttattatggcaattttattcggtaagaaaacaggagctatcgctggtggagttggaatgggattatttgatctgttgtcaggatggacagcgtgggcaccatttacatttattatcgtaggaatcatgggatatgttgttggagttatgacagagaagcatgaccagtatggatggaaagttgcagcaatctttgcagcatttgtaattaagatcgttggatattatattgcagagatcattctttatggaaactttattgcaccaatcagttctgttccaggaaatgtcgtacagattgctgtagcagcagttgttgtactgatcgtgatcgaaccaattgagattgcagttaagaaaattggaattacacagttcgcataataaaatgatataatgataccgggattgccaaagcattttctatgcagtgatcccggtatattagattataaaaataaaaaagaaagtgagtgacggatatgagtaaatacaagattatgacaccaggacctgttcaggtgccagaaaatgtaagactggcgagaagcctttctacaacgaatgcagatttggatccgcaattctatgatgaatacaaggaaacctgtgagctgatcagtgagctgcttcatacgaagaatgaaacactgatcctaagcggagaaggaatccttggtttagaggcagcatgtgcatctatgacagagccgggagatagagttttaattcttgataatggaatttatggagcaggatttgcagattttgtatctatgtatggtggaactcctgttatgtatacaaaagattataaaaatgcatttgatgttgatgaattagatgtatatctgaaggaagatcacgattttaaatatgcaacagttgttcattgtgatactccaagtggaatgttaaatgacattcataaaatctgtccattattgaaatcctatggaatcatgacagttacagattctgtttcaggaatgtttggaaatgaagtcaatgttgataaagcacagatcgatatcttatgtggaggatctcaaaaagcagtttcagcgcctccaggacttactttcgtaacgatcagtgatgaagctaaaaaagctatggaaaatcgaaaaacaccaatcgcatcattttattgtaatctgacgattttcaaagattactataaaaatttatggttcccgtatacaatgccgatcagtgatatctatggattgaaagcagcgatggataatattgcagcggataaagatctgatcaaacgtcacgccagaatcgccaatgcgacaagaaaagccattgaagcatttggtctaaaattacatttggaaagtggattttcagatacggttacagtatttgatgtaccagaaggaatgacagcggatgatattctggaaagaatgagagaaaaacatggaatcatgctggcaggttctttcggagaattggcaggaaaagtcattcgaatcgggcatatgggtgcaagtgcaaatgtaggagatatgttagaagtgatgtctggattggaagaaacattgagatatcttggatggaaatcagagaatagtttgttgggagtgtttcatacagaattatgatattaggacatacaataaaagattataaaagagaaaatctgttgcatgatgtgatcacaggaatcatcatcatggcagtatcgattccaatttctatgggatattcccagattgccggattacctgcggtttatgggctatatgggtctgtatttccgatcattttatttgcgttattttctacatctccgcagttcatctttggagtggatgcggcaccagcagcgttggttggatcagcacttcttgggatgaatatacaaagtggttctaaagaagcacttgcagttgtgccagtgatcacattttttgtggcattgtggctgctcgcattttatctgatgcatgcaggaaaacttgtaaattatatttcagcaccagttatgggtggatttattacaggaatctgttcgacgatcattttgatgcaagtgccgaaattaatgggaggaacagcaggaactggagaattattagaactgttagagcatatagaaaaaacagcagaacagatcaatcttccatcattgatcttaggaatcctatcactagtcatcttgttggcagcgaaaaagatcatgccgaaattcccaatggcagttgtgatgatggcagcaggggctgttttgacgcaggttctgccaatgaaagaatggggaattaagacattagatgccgtagcaccaggacttcctaaatggagttttccaaatcttatgttaattccaatggatgaagtggtgacgatcagtttgtcggtagcggtcgttattatggcggaaacacttcttgcagagaataattttgcacagaaaaatggatatcgtatcaatgataatcaagaattactagcatttgcagttggaaatcttgtggcagcattgactggatgctgtccgatcaacggatctgtttcaagaacggcgatgggagaacaatatcagggaaaaacacagttaatgagtattgttgcaggattatctatgatcctattactgttatttggaacaggatttattggatatctgccagttccggtattgacggcgatcgtaatttccgcacttctgggagcgacagaatttgaactggcggtaaaactgtggaaagtcagccgcacagaatgttttattttctggggtgcatttattggggtattgttacttggaacgatcaatggtgtattgatcggaattatcttatcttttgcggaaatggtgatacgatcatcaaaaccagcaagttgttttctgggaattcagccaggacataagcattttcgtgatttagctgagagtagtcagattcacgagattgaaggtgtgttgatctatcgtttcagcagcaatttgttttttgcaaatgcaggagtgttgcagcaggatattgagcaggaacttgaacgcagaggaaatatcaaagcagtgatccttgatgccagcggaattggaagtatggatatcacagcagcagaccgcattgagattctttataagtcattgaaagagcaaggaataagattttatatcacagagcatatcgcagatttaaatgagcagatgagaaagcttggaatcggatatctgatcgaagaaggatgtgttagaaggacgatttatattgcgttgaaagatatggggattaaacgtccgtatccattagaaggcggagttgataatgaagaacgcagtgcatcaagaaagcgtgtagataaccgtatgcaggaatttgtctgggcatttggttctgacacggaagatcagattgagaggcagattacaaatcagattaagcagttaaagcaaaatggagatgtagaaaagctgttacatggaagctggtcacatatggaagcttttgacgaagatgaatggttagaacatctggaagaacatctaaaagaaatcgtaaatatttctggaaaagatgaaagaactctggcggcacgttttgaggaacatcgaagggaaattcatgaacgtattatgaaagaacatccagaacttgcacagagatttaaagagcgaagacatcgtttggatgaacatttgaaagaacgacggccggaagtttatgatctggttgtcagtttgagagaattagagaaacgaaaagatatggaataaaaaagatgagtgctatcagtagtagatgctgataacactcgttttttgtgtatgctgatttttataatacaatctaaatttatttatgtcaaaattatatcataaatatatcgggaaaagttaaaaataagagatgaatacagaaataaaagtaccaacaaaaacggcaagcaatgccccagtcaatgtatatcgaatcttttttattccaaccacagaataatacacggataatgtataaaaacaagtttctgttgaactaaggatcacagaagacataaacccatccaaagaatccggcccggaagttttataaatatcaagcaggaatccagttgcagcggaagaagaaaaaagttttgcaaagatcacgggtaaaacttctttaggaatctttaatagttttcccataggagtcagaaaacgaacgatcagatccaaggctccagaagaacgaaagatctgaatcgcaaaaaacaaagcgatcagagttggggtaatctcaagaacaattttaaatccatccatgacaccttcaagaaaaggggtatagatatccttccgctttagggttccatataaaacaagtataaatatgaacaaaggaatgacaagatttgcaagaaatgtgatcatcgttttcggtccttccatttgatatagataacagcaacgatcgtggaacctaaagtagcgataagtcctggaattaagatcttagatggattgacagagccatattggcttcggtaggcaatgatattgatcggaatcaattgcagagatgatatattaagaattaggaacgaacacatttcatttgttgcggtgtttttgtcagggttatctttttgtaattcttccatagcttttaatccggaaggagttgcagcccaaccaagacctaatatatttgcgacaatatttgtactgatatattctttcgctttatgatttttcagatttggaaataagaaagtcagaaaaggggttaacagcttttgaagttgtgtagtaattccaagagacagagcaatgttcatgagtccagaccataacccaacaattccaaacattagaatacagagttccacagcctctttggaagaagaaagaatggtatcagaaagtgttgtgatctttccattaaaactgctgacaatgagtcctgcaaggatcataaaacaccagatcttattcatcataaaatatacctcaaaacccctttatcataagatattcaaaaaaaatgaaaaaaattcaaaaaaacacttgcaatttataaaaagtggtggtatagtattacttgtcgctgaggaaaacacaacacagcgaacaagatatgcgggtgtagttcaatggtagaactccagccttccaagctgatcacgtgggttcgattcccatcacccgcttggtatttatttaaggatatattcgagaggatatatcctttttttcattttacaggaaagaactataaacaatagctagatatgagggagaatatgatagaagaagaaaagaatcagtttgcagttctgatcgatgcagataatatcagtcctaaatacgcaccgatcatttttcaggagctggaagcctacggatttccgtcttgtcgaagaatttatgggaactggtccaaagcaaatggatggaatgaagagttgttattagaatattctattattcctgtgcaacaattttcttatacttcaggtaaaaatgcaacagacatggcaatggtaattgatgcaatggatctgttatatggaaagaaagtagacggattctgcattgttacgagtgacagtgattttacaagacttgcaatgagacttcgagaagaacatatgtatgtgatcggaatgggagaatcaaagacacctgtggcactgacaagagcatgtaataaatttatccatctaaatctgatttatgaagcggacagaggtaaagaagaggatatggaaagtgatgaaatagagaatgttacatcactggatgagatttcatatacgatcgcagatattatcagtgaaaatgggaatgcaccagtagatttagggaagattggaaatcgattaaatgcaaaatattcagattttgatgtgcgaaattatggatatacaaagctgagtgttttaattgatgaagagatggataattttatgcttgtgcaggaagatacaaactgttatgttgaatttaaagaactgacaagcagagaaacgattgaagaagaagtaattcattttgtaaagaaaaatggtggatctttagataatctttctgcggtaacgttagaattaaaagataaacacagcggatttaatatcaaagactatggttacagccgtatgtcaagtttcttacgaagcatccgttgtcttacggtcaacggaaatacagtcagattaaagaaacgaagagaaaagggagagagacgatgatatttgatacacatgcacattatgatgacaaacagtttgatcaagacagagaagaattgttagcatctatgaaggacaatggaatcggaacgatcgttgatgtaggatcgaatatggaaacgtctacatggatcgtagaagcagtgacacgatatccgatgatgtatggagcagtcggcgttcatccaagtgatacggcagagttgaaagagtcagatatcgatacactaaagaaatatgcagcaatggatcgaattcttgcgatcggagagatcgggcttgattattactgggatgaaccagaacgcagcattcagaagaaatggtttgaagcacagatcgaacttgcaagagatgtaaaattaccgatcattattcatagcagggacgcagcaaaggatacttatgatataatgaaagcgttacatgcagaagaaatcggcggggtggttcactgtttttcttattcaaaagagatggcaaggcaattccttgatatgggattttatattggaatcggtggcgttgtaacatttaagaatgcaaagacattaaaggaagttgcagcttatacaccgttagacagaatcgtattagagacagactgcccatatctgtcaccagaacccaatagaggcaagagaaattcttcactaaatttaaattatgtagcagaagcgctcagtcagatcaaagggatcaacaaggaagaactgatcgcagtcactgaagaaaatgcaagacaattgtatcgtatgaaagaggtataaagagtgaaacttggaaatccaaaaaatacaatagaagtaattcagaaatatgattttgattttcagaaaaagtttggacagaactttctgattgatgaacgtgttcttgagaagatcatttctgcagcagaagtgaccaaagatgatttcgtgttagagattggaccaggaattggaacaatgacacagtatcttgcagaaaatgcgagagaggtcatggcagttgagattgataagaatctgattccgattctttcagacacattaagtgcatatgataacgtgtccattttgaatgcagatattttgaaagtcgatattgcaaagatcgtagaagagaaaaatggtgggaaaccagtgaaggttgtggcgaatctcccatattacattacaaccccgatcatcatgggattgtttgaaagtcatgtgccgatcgacagtattactgtcatggtacagaaagaagttgcagaccgcatgcagtcaggtccgggaacaaaagactatggtgcattatcactcgcagtgcagtattatgcagaaccatatgtggtagcgaatgtgccgccaaactgctttatgccaagaccaaaagttggatctgcagtcatccgtcttacgaaatacaaagacgcaccgatcaaggttacaaatgagaaattattattccagttaattcgtgcatcttttaaccagagaagaaaaactctccagaatggaattaaaaatttcggaggcttaaacttctccaaagaacaggtagcacaggcattagaagagatggaattacctgcatctgttcgtggagaagcattaaccttagaacagtttgcacagttaagtaacatcttagaccggtaagataaaataaccaaaatttccagttttatgtggttttagcggcaccgtgataaaagtcttaaaaccaaacaaacgggagataaaagctttttcgttatcaaagattccaggaattccaagataacgttggccgctgtcttgatctttcgcgagcattaagtggccgaaattcccataatttaaaaggagaaaaccatttgtctttatgttatcatcaagatcaggaatctgatcaagatcttctagtccgatcttaatgctaggatcaaggctataagaaggaggcatgggcaaggtgggatactccttccagtcgaagtcctttggtggatttggatgtgtgaattctttcgcatccttttctaattgaagggcttcaatgtattctgagagactggatgtaggagaagcttcagtttcagaaagtgtttcggtttcaggtgaaggttctggaggtaccgttttttcagtattctcatttttattttcagcagactccacaggtacaaaacttcgtataatgatcggatgatctttccactgcgatccaaagaaatgatcattcgaataatacagcaagaatccatccattttatcaaaatcatcgatcaaaggatatgtgtttttaaattcaatgatcgcatcatttcgcttgaccgtatcaagataaatcccattcatagcaccctgatgaaaataataaaaataaattttgtattctaatgcctgttcatttgtttttacatggaaatagaccctcagacggttttggcgtttttctattttggcaaaaccgacattggaacccttgattccatggtgatattcatacagataagatacaatacgttgataatctgacaatcgtgtactctctttttgcttcattctatgttataataaagaaaaatatgacatagatataaggggtaagagtaagtgacacaagaagaaaaatacatgaaagaagcaatcaaacaagcaaagaaagcggcagtgatcggagatgttccaattggatgtgtgatcgttgaagacgataagatcattgcaagagcttataaccagcgcaataagaagaagacaacattggcacatgcagaacttcttgcgattcagaaagcaagtaagaaagttaatgattggagactggaagattgtaccatgtatatcacattggaaccatgccagatgtgcgcaggagctatcgtacaggcacgaattcccaaagttgtgatcggagcgatgaatccaaaggcgggctgtgcaggatctgtattgaatattttacagattgataaatttaatcaccaagtagagatagaacgtggtatattagaggaagagtgcagtcagatgctgtctgatttttttaaagaattaagaagaaggaagaagggggacaaggaacatggaaaggattaagaagcttattgtagttattttatgtgtcggcatgataagttctttaaatatttcttttatctatgcctcacagtctaatggatatcatccattgaatattaagattgaatctccagatgtgcccaaaactgtaacgccaaagaggaatgccagatcattggattcatattacagttcctcagaacttggacaggtaacatcagtgaaagatcaggggaacacagaattatgctgggcgtttgggattacgtcgatgggagagacttctctgatcaaacaaggaatcgcaagtacgaatatagatttttcggagaaacattttggatattttatgtacaatcgaaaaaacgatatattaaacaatactaaaggggacaaaacaaaagtttcaggagattggagatatgcgggtggcaattcactgcttgcaatgttgtcgctaacaggatggtatggtcttgcaaaagaaaatattgcaccatttaatacaggaaaatggagattatctgattctgtaggacaaaaagacagtgcaattctgaagaatggatttttccttggagatacaccgcaagcagcggtagtaaaatcctatatcataggatatggttccgtagttatggcgtaccatgcacctgaagagacatgggaagaaacagcctattacggaaagaatcatgaggcatacaactgcaatagtgccagacagacagcaaatcatattgttgcgatcgttggatgggatgatagttatagcagagataattttaacagtggatccagaccgtccagagatggagcatggatcgtaaaaaacagttggggaaatcaagaaggaagtaacggatatacctatatttcttatgaagataaatctctttgtgaatttgttgcagggcaatttgtgaaagcctcagagtataaatacaattatttctatgatggttcagcgaatcctggaattttaaaactgaaaaaaggacaaaagttcgcgaatgtatttacagcgaaaaaaggaagtgcaaagaagaaagaactgatcaaagcagtgaatctggtaacttggtctgcaaacgtcaaatacagtatacagatttatagaaatcctaaagatggaagaccaacaagtggaacaaagatgttaaaacgtccggtaacaggaacgatcagagaggccggaacgcatacgatcgatcttccaagaaaagcagaggttctgagaggagacaagtttgcgattgtagtaaaattaagatcttctggcaagattggttttgatgaaaatgatgattaccattgggtatcttttgttaataaaacaaaaaaaggacagagttatctttatgatcatagaaaatggaatgatctgaacccagatcatgcaacggtgcgtttaaaggcatatacagtaatgcagccagtaaacaagattcatttgagatattgtaaggcggattctaaaaataagaatccaaagggaatcgtattatattacaaaggaaagcatttaaaaaagaataaagattacaagatcgtcaaaaaagaaggtcacaaatatgtgatcgtaaaaggaagaggaagatatcggggaacgaaaaaaatttatctaaaaaccaaataagaataactattgaccaaaagaaaagtatttagtataatcaaatatgcatcttgcaaaagatgccaaagataatcaagtcataaagcttccgtgctagccggggaggtagcggcaccctatttctgcaatccgctatagcagaggtgatggtttgcttcgggctgttttctgtagagctgccctctacaagtggcgttgatatctgggtctcacgcaataggaatccatgaaccgtgtcaggttgggaacaaagcagcactaagtggaaccttctatgtgccgtgagggtgcctgggttgagttaactatagaggtaacgtctgtggaagatagcacaacgcattccgcacggatttttttacccatttttaggtatttaagaacttactactcggattgtatgctattgaatacaaagtgaaacagtgatagaataggaatagcaaacatggtaaggagtgagacatatgagagaattagaattacctgatgtacaagatgtaatgcttgaataccgaaagatcaaattattatatcgttctgcattaaaagagatcggaacgaaattagagatattaaatgatgagtttaaacttgtgcaccagtacaatccgattgaacatatcgaatcaagattaaaaacagatgagagcatcacaagaaagctgatacgtaaaggtaaagagatcacagtagagaatatccagaaatatattgacgatatcgctggggtcagggttatttgttcttttacaccagacatttatcgaatcgtagatatgatctcatcacaagatgatatagaagtactaaagacaaaggattatatgttgaatcccaaggtcaatggatacagaagctatcatctgatcgtaagagtaccaatctttttatctgacagagtggtacctaccaaagtagagattcagatcagaacggttgcaatggacttttgggcatctctggagcataagatttattataaatatgagggcaatacaccagaatacattaagaaagaattgaaggagtgtgcagatcttgtgacgtttttagacagcaagatgttggcgatcaatgaagaagtgagaagtattcgggaagaaaataaagaataggacatgcaatattttctctaaatgatcataagatatgattgatagagaaaaaggagcaggaagatggcagacagagatggtttaggagatcttccattatttgataccgaagtaagacctgtcagagaatttgtagcacaggaacagaggcaggaagacgattatcagtatattacgagaatgtattctgcactggccagacagattctggatctgatcgaagatatttgtgatcagatggaatatgagggcagcaggatgtttgatgaatatatggatcgaacgatgctgcttgctatggcggataagatttatgataagatcgatcatcaagagaagcaagattgtcagaagaaagaacaattattatatcagatgatcctttcgctgcttggaggagagatttatcatagaagatgccgttatcgaagaaaacgaaatatgttcaaagcataaaaagaaagagccgggagaaatcctggtttttttcttgtttcatagggaatcactatgaaatccgctgtaaaatgaaaaacatacatcttaaacatttcttaaaaaggttgtattcatatacaaaaacggataaaatgtacattataaggcttcacggaattaggaaaaggagaaagtaatgaagcaaagtaaagtgatacagatttcagtatttggaattctatttttaatttcattatttatctggaattatatgttagttggaagaaataacaaaggggttacagaaactagtcaagcaacaatccctttattaacagtgtctgcagatggaaagaatattaaccagttgcatgggtatcagggaagtgttgatgcatccttgatccgtgacagtatcacaccaatttatgagaatgaagtaaaagtaatgctgacatatgcaaaatctgacgtcagtgtcgtgtcatataagatttatgatacagataataaaacaatccttggaaatggtgatacggcatttcataaagtcaaaggaaaaaagacggcaaacattaagattaaagaacgtctggaaaatggaaaaacatatctaatggaattgtcagtgaaacaaaatgataaaacgatccgttattttacacgtgtgatttatggaactagttttcatttaaaagaatgtctggattttgcacagaaattccatgatgcagcattgacagaaggtaatacagagtttatcagtcagtatttagaaacggcagaaggaacaacatcgaataatctggcgaatgttgacttgaaatcgacacaggaagcggtatcttatgcaacattaaaaccacaggttgaaagtgtatatccggcaacagtgaaagaaatttctgaaaatgtaacgtcactggagatgagatatattctttcagcagagaatacggatggaacaaaacagtattatcaagcaacagaatatttcagggttcgctatgcaaaggacagaatgtatctgttgaattatgaacgtaatatggaagcatacatgcgatacgatacgatcgaccgcagcaataatcgtattttattgggaatcggaagcagtcagaaacagttgatcagtaaaaatggcggaaagaaagcagcattcgttgttcaagatgaattgtggtattatgactatcagaagtctaacatgtacaaagtattttcttttgaaggagaagattatcgtgacagtcgcaacaactatcaaaagcatgcgattcagatcatgaagatgaagaataatggagatatagcattcttggtttatggatatatgaatcgaggaaaacatgaaggagagaatggtatttctgtttatcagtatactgcgtcagaccagaagattgaggaactaggctttatcccaacacagattcagtatgatatgatgaaaaatgacattaaaaaaggtgcatttttaagtggtagtgaacagttttatttctatttggatggagcggtttatcaggtagatcttgactctggaaagagtaagattctggcaaagaacattacagatgatatgacagttatctctgagaatggaatgcttgcattgaatcagtcaaagaataagatgaaagttgtggatctttctacacagaaaacagaagtgatcacatgcaaagatgatcaggtactgcgtccaattggatttatagagaaagattttatctatggagttggaaataaaaaagaagttgtaaggaataaagatggttcttatatgtatccattgacaaatgtatatataagaaacaataaaaagattgtaaaagagtatggagaagatggcacttatattacgaacacaagtgtagacggaacaacgatcgcattgacacattctaagaagagtggaaatggatataagaagattaatgtaagttatattcgttacaaagataaacaggagagtaaggcagttttagagtacggatatacaggaacaagattgaatcagctatatcttgcattcccggatgatgtttatattcagacaagaccaaattatctttctacaaatgttgaggaacaggaagatgagataaagatcaaatttgctgtaaatgataataaatatagagatgcatttgtctatacaggtggtaagttgtcaggaatttacagtaatctgaaagaagctatcaaggtcgccaagcaaggtggtggagtagttgtaaattatcatcagatgtatctgtgggagaaaggtgttgcacagaattatggaaaaggatctaatatcccgatgatcaaagcagagaataaagatgagacagatattgcatgtattctgatgatggcaaggtcagaaggaattaagatttcctatgataagatcaagaagatgtcaggcagcacatatgataaattatttaaagtgttcaataagcgtgcagttaattattctgactgcagcatagatgatcttgtttatgcaataagtaagggaagatcttttatggcacagagaaagaatggcacatatgtattagttatgagttataatcagacggatttaagatattatgatccgacaaatggaaagtctgtaaaagcaaatcgcaagaagcttgagagtgaatttaaacaggcaggaagcgtttattacggatatgccaattagattttgtctttagagtgcgaactatgtcgagataaaaattttagttatgatatattttatgttaaaattaagatatatatctggagatgatccggaaaatgagaacagtaaaaacaaacgaaaggtgaaaggaatatggctgaagaaacaaaggaaacaaaaaagattattcccgaaagcaagaaaaagcataaaaagaaacataaaaagaaaaaagttcttttgaaagtttctgttgtctttttgttgttggtcgtaatcggctggtttacttttggggcaaaggttatgaagcttagaagtgaagccaagaaactcgttgctcagtcgagtgaggatacatttaaggcatcacagacaagtattgtatatgacaccaacggaaaacagttactgaagtttaaaggtgaaaaagatgtatattatctgaagtacaaggagcttccggtttatgtcatagctgcagtaatttctgttgaagacaagaatttctataaacacagtggtgtggattacaaaggaatctcaagagctgcggtaagttatgtggtacacaaaggaaggatcacacaggggggaagtactctgacgcagcagcttgcgaagactgtctttttgaatcgtcagaagacatggaagagaaaagttaaagagatctttatggcagtagaattagagaaaaaatactccaaggagcagattcttgagttctatctgaacaatgtttattatgcgaatggttattatggaattcaggcagcaagtcaaggatatttccgtaaggatgcgaagaatctgacaatgtcagaagcagcatttttatctgcaattccaaataatccaacaatctatgatccacgtacaaacaaagaaaatacgatcaagcgtagaaataagatcctaaaggatatgtacgagcagaaactgatccgtaaagatcagtatgaagaagcgatcaatgaagaaatcaaagtaaagagtgcgcagaagagtaagacagagaagaagaattacgtagaaacatatgtcattcattgtgcgacaaaagagatcatgaaacagaagggatttgaattcaaatacgatttcagttcgacttcagagaaggaaaaatatcaggaagaatatgataagatgtatgcagagtgtaagaggactttatacagtgcaggatatcatatttatacatccattgatccagatgtccagaaacagctgcagagcagtgtagataatgcattgtctggatatacagagaaagataagaatggcatttataagacacaggcatctggaacatgtattgataatgatactggaaaggttgtagcgatcgtcggtggacgtgaacagaagaatatcggttatacattaaaccgtgcgttccagagtccaagacagccaggtagtgcgatcaagccattgcttgtatatgcaccagctttagaacatggatggtctgcaggatcaacggtgaatgattcaccgatgtcaacgaaagataagaatcgtgtaagaaactctcatggttcttattctggacaaatttcacttcgaagagccgttcagaaatcaagtaacgttgcaacaatgcggatctatgagcagttgacaccaaagacctgtttaaaatatctggaagagatgaattttaaatatctaacagattctgattataagtattatacgacatgtattggtggtttcacgaaaggaacaacatcagaagagatggcagcaggatatgctacattgaagaacgatggtgtgtatagagaaccaacgtgtatttctaagatcacaacttctgatggagatgaagtgatgtcatcttctacaaagaagagaagagtatattccacaaatgcagcaaatgcaatgacagatgtactgaagagtgttgtcacaggtggaacgggtgttggtgcgaaggtaccgaatgttgatactgccggtaagacaggtacaacaagcctgaataaagatggatggttttgtggatacacaccttactatacaacagcagtatgggtaggaagagatgataacaggattatggaatcgttaagtggagcatcttatccaaaatccatctggagtaatttcatgaatgcgattcattcagaatactcttctacagattctatgggtggaaattatacagattatcagggagagactacacagcagacaggaacacaggcaacgacagcgacagagagcagcacaaagggcacagaagcaactacagcagcacctacgacagcagctcctacaacggcagcgcctacgacagcggctcctacaacggcagcacaacagacagaagaacagccagcagagaatcagtaaaaagaatattgagataattaaaaatcacaggtaattcaatacctgtgatttttgtgtataagaaaattctgcaaaaaaagactccgccataagacgaagtctttatctatatattacatattcttcttttcaagatattctttgatacgttctgttgggtttaacagatcactgattgatgcatcatgatttaatgtatcaattaatagtgcaacgtatttggatacgtcagaagatgcataccagtcacgagataataattcaggtgtctgataagtaagattagttgtgataaccttctcaataataccttcttcaactgcacgatcaaatacttctaatccgtttgtaaataaaccaaatgtagataagcagaatacacgacgggcatttctgcgttttaattctttggctacgtcgatcatactttctccagaagagatcatgtcgtcgatgatcagaacatccttaccatctaaggagtcaccaaggaattcatgtgcaacgataggattacgtccgtcaatgacagtagaatagtcacggcgtttgtagaacataccaacatcaacaccaacaacgtttgccatgtagatcgcacgctgcatagcaccttcatctgggctgataaccattaagtggtcgttgtcaaagtgaacatcatcacattgttcaactaatgattttacaaactgataagtaggctggatgttatcaaatccactgatagggattgcattctgtacacgagggtcatgtgcatcgaaagtcaggatattatcaacaccaaggctgatcagttcctgaagcataactgcacagtctaaagattcacgtgtacttctcttatgctgacggctttcatataagaaaggcatgataacattaacactcttagcctttccagcggaagcactgatgatacgttttaagtcagcatagtgatcgtctggagacatgtgatttacacgtccacttaaagagtaagttacgctgtagtttaatacatcaacaataatgtataaatccatgtcacgaacagattcgcgaatgatacctttagcttctccagaaccaaaacgtgggcaactggcatctaaaagataagtatctcttaaatatccatcacaggcaacagagtctttgaaatctttgtaagtttcagatctccactggatgatatagttgtcgattgtttttccaagttctttgcatccttcaagggcaatgattccaagtttaccgtctggaatcttagtaaagttacggtcagatcgtctcatgatactatctccttcgtatattgttctatagttttttataacattataaataagttacgtcaagttcgattttttgaaacggatatcatctccatagattttctgccatgaataattctcaatgatccttgaaaaaattcgttcagaataagtatttctgaattcttgcagagataaatttgtggatatgatcgttgatctttcctggatcaatcgttcattcaaacattgaaataactgtgagatcacaaatttattgatcatctcagttccaaggtcatcgatgatcaatagatcgcattgaaagatcaggttagcagatgtttcctgttccatatcctttcctttgccaaaggtatgctttgccaaagtatcaaacagctggaaagctgtcatatagacgcaggtaaaaccgcggtccatgatttcctttgcaatacaatgacttaagaaagtcttcccaacaccagtggaaccctgaaataaaatgttgtcatgatttggaaatctggaaataaaggttttacagtgttccacgactttctggatgttacgtctagggcttggaagaccttgcttggtcatctggtcggaataataatcttcccggaaggtctgaaaattctcccgtgctaaaatcttagccatattagaaccggaatacaggtgatcgatcatcgcctgatgaaagcaggaacattgttcctgtccaatatatccggtgtccttacacttcttacaatagtagatcggttccagataatcagaagaatatccggcttcttttaagagagcctgtttctggctgatcagcacctgattctttatacggtattcttctctcaaagcaggatcatcccggacgatcagctgctttccgagagaaatagaattggcagtgatctgtcggtcaagttctttaatctctggaattgttgtgtatatatctttcttgcgctgttcatggagacggtaattagaaagccgtctttcctcatactggcgcatgatatcctgataatcgttatttgataatgacataagttagttctccatgagttcatccgcgaactgtttctgtaaaagctgttgctctaacgcatcaaaatcataatcacgctgcgtaaagttatgcatattgctctggttgttattgttagcgaaagtctttggtgctttctgccggatatggaagttcttcgcatcttccaatgttacgatgtggttatctttccagtgctttaagatcgtatctgcatatggaaaactaggtttgttgatcgcattgatcgtacgattacaagcttcaatgatcagtgcaagatcaaaaccatcagtttcaagccatcgtttcatatattcttcctgaacaggggctggattctgatttaatccaaatgcacgcatgatagaataatattccttacgaaaattcttgctgtacgctttcgcttcttcaggagttttgatatttgcttcgtaccagttgatcgctacagactgcatataacggaaactcttcttaccatttgatacacaatgctctacaagatattcgatcaattcacatgacattctaagatcttcatacatgtaaagtaaagtgttcatatccgtacaagttaatggctttcctaagaacatctcacatacgtagagaagataagaaaaacgctcatcttcgctcttacgctgaagttctgcaggagaaagcgtcttcatggcaggaatcggttcagcaccagtgatcgtctgatccttcacagtagtcttagaagctgctgaagaagtagcttgggctgtgtcttcttgttttgtagtctgtgcaggagaatgtggattgccactgacagggagaagctctataaaactgatctcgccgtctttaagctccatgcgtaagagggattctttctcccagtattttaacgcacgagtaacatcacgctccgtaagttccagtacatctgcaagacaaggaatgctgaagtttgcaccgtcagaaaccatacgcagaagataaatatacactttgatgtattcaccgttcgcacggatcatataattatcaacaaatgcgtttggaagcagcgttccaccggttggatatgtggttgttactttaatgtaattcatggcaatctctccttcttttattatcgttaatctgactataacgcagattggagaaattgtaaataccagggaaatccacaccctgattgtgtacaagtctgtggataatgtggataatgtggacaaaaatcgtaaaacaatggaaataagccatttacatagattttacaattgtggaaaaggacaaaagaaatccacagatttgtttatcaacaattgtgtacaagtctgtggataatgtggataactatctatttacgagcgaatttccgatagaatcgacgtttccggcccccatagttatcaacagatcattttttttgcaattttttaaaataaatttttcaatgtcatcaaatcccttaatatagtgtacatctacatcataatcagccatgcggtccacgatatctttggaacttacgataccagtatctttttctctggcagcatagatgtcagtgacgatcacgtggtcacagagacttaatgcctttgcaaagtcatcaaggaatgcaattgttctggaataagtatgaggctggaatacacaccataattcgttatgtggataattcttagcagattccagagttgcacggatctctgttggatgatgcgcatagtcatcaacaacggtgaagtcgttgcatgtgccttttagttcaaaacgacgtttggcgccagtgaatccaagaagtcctttcttcattgtatcaacatcaatgccgatacgttttgcagcagcaatggcagccagtgcattcttcacgttatgttctccgttgacatttaactggatatggtcaataaattctcctttatagtaataatcgaaatgagcatgtccaaatgcatcatacccgatgttctttgcacaatagtcataagaatcattttctaatccaaaagttgcatattctgcctttaatccgtccacaatataatcaatgttctcaatttcaccgttgatgatcagataaccataatcaggaagtttgtgggcaaattcacggaaagaatggcggatatcatcaagatccttaaagaagtccatgtgatcttcttcaatattgaggataatactgatcttagggaagaattctaagaaactgtttgtgtattcacatgcttcagttacgaatgtctcggaatgtccgacacggatattcccattgatcgcatcaagaattccaccaacgctgatcgtaggatctgtgttaccagcaagtaaaatataagataacatagaagttgttgttgtcttaccatgagttccagatacggcgatcgcattctgataattatgcatcatctgaccaagcagtgtagcacgtttcatgacaggaatgttacggcggatggcttctttatattcttcgttggtatcgaagttgatcgctgctgtgtatacaacaagatcgatatcatctgtaatgttatcagcagtctggctgagataaacctttgcgcctttatcttctaagtgtttgatgatatcggaagtatggatatcggatccagaaatcgaaaagccctctttgataaggatctcagcaagaccgctcatgctgattcctccgatccccataaaatgaatatgaattggtttattaaaatctatctgatacattttcatgtgccctttctttcaatcgttgatatagtttcattgttttccttattataagtcaccgcaactaatcttgcaagacggagattaaattggaaaatattatatgtactataagaatatggagaaaaaagtagtaaaatgtcataataaaaaagctgataaaaaacaagtttttgttcacatttgctgaaaatagtgttataataaaaattagcatatacggtctaagagaaagaagaagttaccagagcctgaccggagagcgaattttagctatattattagaaactaggaggatgacaacatgcaaataactgatgtacgtattagaaaagtggccaaagaaggtaagatgaaagctgttgtgtcaatcacaatcgataatgaatttgtggtacatgatattaaagtaatcgaaggggagaaaggtctgtttattgcaatgccaagccgaaaagctgcagatggtgaatatagagacattgcacatccgatcaattctgatacaagaaatatgatccagactttaattttagaacaatatgaagcaatgaatctgggggatattgacgcaacagcgccagaagtctaagattaagagaataacttcttcttcaaagtgtagaaaaagaatcgggtattgaccacctggttcttttttctgttataatcagaactatagtgtaaaagatagatcagaacaaggaggtttgatggatggaatttcagatcggagatattgtcaaattaaaaaaagcacatccttgcggtataaatgaatgggagattctgagagtgggaatggattttcgtttaaaatgtgttggatgtggcagacaggtgatggtgccaagaaagatggttgaaaaaaattttagaggatttataaaaaaagcttgccaagattagaagtttatgatagagtaattattcgtggtatataaaaatatccttgctctttcacgaagaaagagccactagaccaaaaggaggtgcaagtaatgatgaaatatgaattagcattagttttaagtgcaaagatcgaagacgaagaacgtgcagctatggttgaaaaagttcaggcaatgattactacagcaggtgctgcgatcactaacgtcgatgaatggggtaagaaacagttagcttacgaaattcagaagatgaaagaaggatactactatttcatccagttcgaaggcgaaactacagttccagcagaacttgaagagagacttcgtattgaggaaactgtattacgtttcttatgcgttaaacaggatgcgtaattaacaggagggatccgaataatgaataaagtagtattaatgggaagattgacaagggaccctgatgtaagatattcacaaggtgagacacctttggcaatcgccagatacacgttagcagtagatagaagattcaaaagaaacggtgaacaggatgcggattttattaactgtgtggcattcggacgcacagcagaatttgcagagaagtatctaaaacagggtactaagatggttgtttctggaagaatccagacaggtagttatacaaaccgtgatggagttaaagtttacacaacagaagttgtgatcgaagagcaggattttgcagagagcaaagctgctgcagcccagaacagtaatatgggagttccacagccaagcgcgccacagcctagtgccgcagcaagcgatggttttatgaatattccggatggtttggaagaagaattaccatttagttaaataggaggtagaaatcatggcttatacaaaaggcgattctccaatgagaagaagaggcggacgtagaagaagaaaagtatgtgcattctgtacagaagccgatgctgtaatcgattataaagatgtagcaacattaaagaaatacgtatctgaaagaggaaaaatccttccaagacgtattacaggaacatgtgctaaacatcagagagctgttacaggagctattaagagagctagacatttagctttaatgccatatacagctgaataattttaagcagataatgaagagttatattgtgacgtatgttgcggtatagctctttttttgtatcatagaaattccgatggaatcccctatgatacaaaaagccctccgggcaagatcgcactgcgacagacatgtcaaaataattaagaaaattgcgtaaattgaacaaatatctcgctttcgttaaatataatgtacaaattcatgcaattgagttataataaaggataattgtaagaatcaaatcaggagaaaaaaatggacattatgaagaaaacaaagatagaacagtatcttcaaggaccattatgggcattgcttattctggcttttgtagacattgtgttctttttcttggatattcgatgtggagtgatcttagcggtctcactagtcgtatttttagtttttcagatgatcatttattcccgaagcaaacaagagatcatcaaagaatgtatggattttatgtttgagcagagtcaggtgcagaattatttgttacaacagcttcctgttccgtatgcactgcttgatgggaatggaatgatcatatggtcaaatgatgcatttcataaaattgtgggagagaaccgaggaaagtcattgcaacagatttttccgaatctgaaccgtaatctgcttccgtcggatgtgatgcactctatttctcatattgaatataaaaagaaatgcaaagagggagataaggaaaaagaacagacgctattctataaagtagagatgaatcgtattcgtgtagaagatttctctgatgagaatgataacagttgttctagacagatgcttaaggacaacgatctgatcgcagtatatttttttgatcagacattacttaagaaatatatggaacaaaatgagaatcagagaatggtcattggtttaatctatattgataattacgaagaaatccttgatgatattgatgcggtgaaacgatctatgctgatcgcagtggcagatcgtaagatcaacaaatttatccagaatgtctctggggttgtgaagagaacagagagagataaatattttgttgtatttgaacagaaatatttggacaagatcaaagaaaacaaattctcgatccttgatgagatcaagacgatcaatcttgggaattctatgcatatgacattaagcatcagttttggaattaatggaaatacgtatcaggaaaactatgaagcagcctgtgcaggtatggatctggcattaggacgtggtggtgatcaggcagtgatcaaggatggggaagatatttcctactatggtggcaattgtgaggttatggaacgtaccacacgagtcaaagcacgagttaaagcgcatgcgttaaaagaacttcttgaatcaaaggaaaaggtcgtgatcatggcacataagattccggatccagatgcgatcggtgcagctgttggtctgtacagacttggactttctctgggaagaaaggcacatatcgttatgaatgaagtaacgatctctgtccgtgcgatggttgatgaattaaataaaagtggtatttatgatgaagatatgttcattgataacgaacaagcaattgagatcacagatgaaaacacgttattgatcgtagtggatgtaaatcatgcaaattatacagaatgtgaacagttattaagtcagacaaagacaacggtgatcttagatcatcatcgaaagaataaagatatgatcaagaatccggtactttcatatgtagagccatatgcgtcttctacatgtgaattggtagcagagattcttcaatatgtagattcaaaaccaaagttagagccaatggaagcgaatgccatgtattatggaatgcttgtagatacggacaattttgtgaataaaacaggtgtcagaacatttgaggcagcggcatatctaaagagaaatggagctgatcttacaaaggtaagaaagatgtcaagagaaagcatggaaacttacagaatccgtgcgaaagcgatcagtgaagcagagatcttatatggcaggtttgcgattgcaacactggtaggaatcggtgtggacagccctactgttattggtgcacaggtagcgaatgaattacttgatattgatggaattgaagcatcttttgtattaacaggtgttcatgagcgagtctatatcagtgcaagatcgatcgatgaagtgaatgttcagaagatcatggaagaattcggaggcggcggacatttgacagttgcaggtgcacagcttgtcgatgtatcattagaagaagccaagaatattattcatgagacattacgatatttgatatcaaaaggagagatataagcgatgaaagttattttattagaagatgtaaaatcagttggaaaaaaagatgaagtagtagaggttaacaacggatatgcaagaaatgtattattccgcaagaatttagcaattgaagctacaaataaagcattaaatgatctaaaattaagaaaggcgaatgatgataaactggctgcagaagcattagcagatgccaaagttttagcaaaagagattgaagaaaaacaattggtattaaagatgaaagttggagaaggtggaagaacatttggatctatttccacaaaagaaatcgcagcagaagcaaagaaacagttaggatatgatttagataagaaaaaaatgcattgcgaaccaatcaagaatcttggattccatgatgttgcaatcaaagttcatccacaggtaacagcaacattaagagtcaaagtagaagaaaaataagagggcatatttatggatgaagcatttatcaagaaagtgcagccgaacagcccggaggcagaacagtctgtgatcggtgcgatgatcatggacagggatgcgatcgcagatgttatcgatattgtgaatgccgatgatttctatcagaagcagaacggcatcttatttgaagcgatgacagaattataccgggaaggaaagccggtcgatctggtaacgcttcagaataaattaaagaaaaaagacgtgccagaatctatgaagagcctagaatttatcagggatcttctggaagttgttccaacgtcagccaatgccaaacaatacgcaacgatcgtcagggaaaaggcaacacttcgtaaattgatcaaagttacagaagatatcacaacagaatgttatcttggtaaagatgatgtgacagagatcttggatcacacagagaagaatgtattcggacttcttcagcaggcaagtggaagagaagagtttgttccaattgacaaagttgtgttaaatacattggatgcgatcgaagaagcggcaagttctgctgggcgagttacaggtattgcaacaggatttacagaccttgattacaaattatctggactacatccatcggaattgatcattgtggcggcacgtcctgccatgggtaagacagcatttgtgttgaatatcgcacagaaagcggcagtcagagatcacgttccaacagcaatctttagtctggagatgtcaaaagaacagcttgtaactcgtatgatggcgatggaagcaatggtagattcacagtctatccgtactggtgatcttcaggaaactgattgggagaagatcatggaaagtgcgggaacgatcggtcgttccccattgatcattgatgatacaccaggtattacaatcgcagaattacgatctaagtgtcgtagatacaaacagattcatggactggacctgatcattattgactacctgcagttaatgtcaggtggtaagcgttctgaatccagacagcaggagatttcagagatctcaagatcgttaaaagcattagcgagagagatgaatgcaccagtgatcgcattatctcagctaagtcgaagagttgaagagagaaaaccagccaagccaatgctatcagatcttcgtgagtcaggatcgatcgagcaggatgccgacgttgttatgtttatttatcgtgatgaatattataatgaagattccgagaagaaagggattgcagagatcatcgttgacaaacagcgaaatggttcaacaggtagtgtagagcttgtatggctcggacaatacaccaaatttggcaataaagagagagcaccacattaatttttgggtgctttttcttacatatacaattggataaaatatacaaataaaacaaagttctacaattttaaaacaagatcaaatgatgtgattgaataagggggtatcttatgttatcatttctatttcctccgatctgtccgttatgtgccaaagaattattggacaaaggagaacatatctgtaaaatatgcagtaaaaagcagatttttatcaaagaacccacatgttattcttgtggaaaatcaatgaagaatcaggaaaaagaatattgcagtgactgcagacagcatccgaagaattttgaacgtggtatggggttatgtatttaccagaaaccagttactgattcactggctgcgatcaaatataagaatgagagaaaatttgcacagtattatttggaagaaattcgaaaaagaaaatacagggaattgctgcgactaaaagcagatgcggtaattccggtgccgattcataaaaaaaagagaagaaagagagggtttaatcaggcagaaatctttgcaaaggggattgcagagatgttggatcaaccgatgtatacaaagattgtggaaagaatccatgatacgaaaccacagaaacaattaagcccaggagagagaaaaaacaatttaaagaaagcttttcgtggaaatttgaaagaatatcagaaagcagggatgccgaaaagggtattggtgatagatgacatttatacgacaggatcaacagcggaagcagtgacgacagcgttaaaacaattgggagtgcaggaagtttatgtattttgcatagcgatcggaaaaggattttcctgatatttccgtcatggtgttttgtgtactggtttgttataataagggctggtatatttgttgaaggatattatttagaaagaggaaaatagatggaacaacgatatgatttaagcggatcattgcttcactggtacgattataataaacggatcttaccatggagagagaataaggatccatatagaatctggatttccgagatcatgctgcaacagacaagagtggaagcggtaaagccgtattttgatcgctttatggaagcactgccaacggtttatgatcttgccaaagtagatgatgaccggttgatgaaattgtgggaaggacttggttattacaatcgagcaaggaatttaaaagcagcagcacagacgatcgttgaagaatatggtggacaactgcctgcagattatgataaattattatcgctgaagggcattggaatgtatacagcaggagcgatcggatcgatcgcatttgaattacaggttcctgcagtcgatggaaatgttcttcgtgtgctggctagattgtggggagatgattctgatattctcaaagataagacaaagaaagcgatgggaagaagagtcatgaaatttatgccggaagaccgaccgggagattttaatcaggcattgatcgaacttggagcaactgtttgcgtgccgaatgggcagccattatgtgatcaatgtccatgggatacagtctgtaaggcgtataaagaagatctcattgatcaattaccggtcaagacaccaaagaaggcaagacggattgaacataagactgtatttttattagaatgcggagagcagattgcaatccataaaagaggagacaaaggattacttgctggattatgggagttcccgaatgaagacaagaaaatggatgccgaagatatcaaggaatggatggcagagcatcatatggaagatgcgaagacaaaagcagtaggaaagggaaaacatatcttcagtcatgtggaatggcacatggaaggagtaagaatttccttgaaaacaccgattcagagtgaaaattacgtctgggtactaaaaaaagaactagaaaatacgtatgcattgccgtcagcatttgaaatattccgtaagatattgtaaaatagaagttacgtatataattatggaatgtaaaattccataaaagctaaattattattaaaaaggagaacagattatgaaaaagtttttaacagtcgcattagctggtgtactggcagcatctatgctgtttacaggatgtagtaaaaaagaagaaagcaaagttccagacaaactgatcgtaggaacaaacgcagaatttccaccattcgaatatatgaatgataagaaacagccagacggtttcgatattgccatgatcaaagaaatcggaaaacgtatggacaaaaaggttgagatccagaacatggaattcaaatctctgatcggggctatggagtctgattcaatcaatacgatcattgcaggaatgacaaagacaaaagaacgtcagaaatctgtagatttttctgatagctactatacatctaatcaggcaattatcttaaagaaagacagcaagatcaaaaaattatctcagttagaaggaaagaaagtcggtgttcaggaaggaacaactggtgacatcattgcttctggagaaaaatttggtgaaaagaacaaagtcatcgtaaagacagatgtaaaacgttataaaaagggtgttgacgctgttatggatctgaaaaacggtgcaattgatgcggttgttattgatgaaaaaccagcacaggaatttgtgaaaaataatgcgaagaagttaaaattagttgttgactctgcaggagctgaatattactgtatcgcaattacaaaaggtaacacagcatacaaagaagagatcaacaaacagatcaaagcaatcaaaaaagacggaacatatgataagctgaaagcaaaatacattgattccgcaaactaggaaattaggaaggtaaggtttcaaaatgttagattcattttacagagcgtttgtcgccgagcagcgctatctgctgtatcttgatggattaaaggtgacgatcttagtatctgtcattgcaattcttattggtgtagcacttggtacgatcttggcgttaatgcgcttgacggcagagcagaaaggaaagagtacacttttatcgaagatcgcatacgtgtacattgatatcatccgtggaacaccaacattgacacagttgatgatcatgtatttcgttattttaaaaggtcagaatggactgcttgtaggttccttaacctttggtttgaacagtgcagcttatgttgctgagatcatccgtgcaggaattcaggcggttgatcagggacagatggaaggtggacgttctcttggattatcctatgtacagacaatgaaagatattatcttgcctcaggcgatcaagaatattcttcctgcccttggaaatgaatttatcgtactgatcaaggaaacatctatattaggatatgtagcgatcgttgacctgacaaaggtatcagattttgtaatttcaagaatcttcgaagcactggcaccattgcttggaacagcattgatctattatgtgatcgttaagatcctgactcttggattaaacgcattagaaaggagactgagacaaagtgatagacgttaagaatttacataaatatttcggatctctggaagtgttaaaaggcattgactgccatattgacaaaggagaatgcgtttgcgtgatcggaccatccggatctggaaagagtacatttttaagatgcttaaacttattagagactccgacaaagggagatatcgtcatcgatgatatgcatttgacagagaaagacttcgatgtagatgcaatgagaaaacgagttggaatggtatttcagcattttaacttattcccacatctgacaatccttgagaatgttacattagctccgatccgtcacaagatgatgacagaagagcaggcaaaagaaaaagcgatggaattgttaaaccgtgtaggcgttggtgataaagctgataattatccagcgcagttatctggtggacagaaacagcgtgtagcaatcgcaagatcactggcattatcaccagaagtcatgctgtttgatgaaccaacttcagcacttgaccctgagatggttggagaagtattagaagttatgaaacagcttgcccaagaaggtatgacaatggttgtcgtaactcatgagatgggatttgcaagagaagttgccaatcgtgtatttttcatggatggcggaggaatccttgaagaaggaacaccagaacagatctttgaccatccacaggaagagcgaacaaaggcatttttaagcaaagtattataaaagatcataagaataagaagggaaatacacatattttaatgttatatctcccttcttttttgtatacaaaaaaataaatttgatattaatttggaaattttttgtaaaattcaggtttctcgatggaaaacgataaaatgatgtgctatcataaaagggtatttaagcaaattaggggaatatatcaaacaaaaataggaagggaataagaagtgaaccagaatataaagataaccagacaacaggcagaagaagaagctaagatgctagagaaagtatttgatgttgtcaggtttttggagggggatttttttgagcagatgcaagatgatccatgcatcggagtaaaaattggaatgtgtcagtgctatgatttttggaagaagaataaaccatgtgagaactgtatatcaatgaaagcatatgcagagaagaaacaaaaaactaaactggaatttttggatgcagatgtttttttggtaatttcaagatatttggaaatagatgatgaagcatgtgtcatggaacttgttaagcatcttgataatgatacgttgatcgataccgatggaagggacaaacttgttggcaagttacaagggtatcagaataaattatacatagatccagtaacaggcgtttacaatcgaagatattttgaagatgagattcgtaatatgcagaattcagcaggggttgcgatgatcgatctcgatgattttaaattgtataatgatatttacggacatgatatgggagatcaggttctatgtattgttgcggatgtgatcaagaattgtattcgcaagacagataagttaatacgttatggcggagatgaatttttattgatcttgtcggatatggtaagaggtactttgcgtggaaaactgcttcggattcaagaggctattgagaatgcaacgattccaaactgctctagattgaagcttacagcaagtattggaggagtgatatcggaagatgggaagatcgatgaggcgatcgcgaaagcagaccagttgatgtataaggcaaaagatcataaggcacaggtcataacagaatgtgataaaacgatatttaaaaaggaaaaaattcagaataaacctagaattttgatcgttgatgattcagaatttaaccgtgcgatcttgaaagagattttagaggaaacctacgaaatcatagaagctgatggtggaaatgaagcattgcataagatcgatgaatatggaatgaaaatttcgcttgtactattagatatcattatgccagaaaaggatggttttgaagttttgaaatatatggaagaagagcgtttaatctcagatattccagttattataatctcaagtgaggattctgcgaattatatcagaagagcttatgagatgggagtttctgattatattaaccgcccatttgatgccaatattgtctatcagagagtatctaatacagtgaaattatatgcaaaacaaagaagattgatggcactggttacaagagtttaggacattatttacaaacagatcatacgaggtaaactatgcagttaaagaagcttatgattgaagtcatgatctgtttcgtattaggctgctttctttgtgcatgtggaaagacaaaagatcagactagaaaaacaacaaaagatgcgaacaaagagattatgatcggtggagacaattatccgccatttaactataccgatgagaatggcaatctggcaggaatcgatgtagaatttgccagagaagcctttcatcgtatgggttataagccggtctttgtaaatattgattgggagaataagaaaaatcttgtggaacaaggaaaaatagattgtatatgggcgtgcttttcagtgacaggaagagaaaatgattatcactgggcaggtccttatatgctgagccgtcaggtgatcgcagtgaacgacagcagtaagatcaataagttgtctgatcttaagaataaaatcattgcggttcagtctacaaccaaaccagaggaattatttctaaaacaaacagatcccaaaataccaaaagtaaaacaagtctacagtatggaaaacagagaattgatctatacttctctgagcagaggatatgtagacgctattgcagcacatgagatctcgatcagacagtatatgtctgattttgaagcaaaatacagaattcttgatgaagatattcttgagactggaattggtgttgcgtttgcaaaaaatgataaaagaggaatagaaaaagaactgtcaaagacattaaaagcaatggtcaaagatggaagtgccaaaaaaattctacaaaaatatgttcctgatgcagaaaaatatctggaggtgaacagccttgagagataaatcggataaaagattatggacattgagtattgttggctgtgtgatcgttgtcttgacagttctttttgtgtccgtaaaaatagaaacaaacaataccaaaaacaggattcattcgacgatggaatacatcaaggatcaatattccatgtataacagttttaatgaagcagttgaagcaagaagtcttgtcagaatggttgaaaaagtccagcagacggcgagaaatttcaaaacagataaacaggcattggaaaaagaatatttaaaacagtatgcaagggaacaaagacttacggggattattgtattaaatgataagaataaacaaattgcacaatatcatactggaccaagatttaaaaaagttttgggttatgtcatggagaaagaaacacttcgtgatgtaaagaattatccgcagaaatcatatatgacaagaattgagctgaaaaatggaggctatattgatctggcatcgtatggaagaaaggatgcaaaaggaacggttataggatatcagtatgtaaaaaccgaatatgcgaaaaacaataatcttacaatccaaaacgtgcttgctggatataagcgggaaaatgatggaacgatcgtaatcacaaatggaaatgatattatagcatcaaatgatgaaaaattaattgatacaaaggtacaggaatcttgtaaaaacattgacgagtaacattggaatagcggttattttatatggaatttttgtggcaatcttaatgacgatcaaagcaagatccaatcaacaatatgaacgcattcagaaacaacgagaagaagagtataaaaaagaattagaaaaatcagcaaaagaagcaaagaaagctaatattgccaaaacagaatttctgcaaagaatgagccatgatatccggacaccgatcaatggaatcaggggaatggtagaagttggagattattataaaagtgatatagaaaaacaatcagaatgccgcaaaaaaatatgggaagcatcaggattcttactagaattgatcaatgaagttttggatatggggaaactggaatcggaagaagtaatcctggagagaagaagttttaatttctttcaattgtttcaagagattcgaacggttattgaaaaacaggctagagagagaggaattaatatagttgtacataaatataatgtgattcatgaagatttgatcggaagtccagtgcatgtaaaaagaattgtgatgaatattttaacaaacgcgatcaaatataacaaaaataatggaaagatctgcatagaatttaatgaaattcagaaaaattacaatactattattattcgatttaaatgtgaagacactggaattggaatgagtgaatcattccaaaagacgatctatgagccatttgcacaggaaaaagcaggggcaagaacggtttatggtggaacaggacttgggatgtcgatcacaaaaagtcttgtagagaaaatgggaggaacaatctcatttgagagtgagcaaggtgtgggaacgacgttttatattgagcttccattccagatcgatcataacataaagcacgaagaatttaagacaaaagagataaaaaaagcatcgatcaaaggggtcaatgtactgcttgccgaagataatgaattgaatatggaaattgcagaatttgttctggagagtgccggggcgaatgtgattaaggcatataatggaaaagaggcattggaaattttcaaagaatcgaaacagggagaaattgatattatattaatggatgtgatgatgccggtgatggacgga

SEQ ID NO: 615 - DNA, 40054 bp, Unknown
  gut microbiota DNA sequence
agagtaatcaattattcctgtggacatattaatgtttctgaccatccacatcatgcgaagcagattccctcaatacaactttccctgctgcctgacgccgtctcgtatcagacattgccgcataatgttttcgagtcgtattaacatcagagtgtccaagaacctccgccacaagataaatatcatcggtctcctgataaagagcagtaccataagtactacgcagtttatgaggcgtgatcttctttagcggagtgacttccttcgcatattttttcacaagattctggaccgcctgcacaccaattcttcgtctttgcatagaataaaataaagcatcttcatgcccttcctttggaatgatgagttttctgctgccctcaatatattgctctaaagcatctgcaacttcatttccaaaatagacggtcatttcttttcgtccttttcggatcagatgaagaccgttattgcggaaatcaacatcatcaatgtttagacccactaattcagatacacggattccagtcccaagaagaagtgtaatgatcgcaagatcacgttccttggtcttttcataataagcaagtttctgtccagtcaaatggtcaccaccgtgttctacaaaatcaagcaaagaagcaacttcatcggcttctaaacggataatttccttctcacggatctttggcatatcaacaagcaatgttggatttttctcgatcagctgtcgtttataaaaatatccgtaaaaagaacgaagtgcagacatcttacgaaaaacaccttgttcagtattctgcatatgcttatgttgttcttccgaaatatagactttcaaatattccatatattcttccagatcaacggattcaatcttatcaagatcactcactttaaaatccagcacagagtaattacggtaagcaggattttcatcgatcagaaaatgaaagaacactctcagatcatatgcataagcaattcgagttcttacttgtgtggtagaatcaattgcacggaagaattctttcgcaaaaggtgggagtgttttaataagttcacgtaatttgatcgtctgtcttgcagtcagatcgtcataatatggtaatgatttcataaaattcacctgtttcttatttatttagcataccatttacggctattcagtagtagtaaatgaaaataatacatgacttattctatcaatttttcacaaagcttgcaaactttccccttctatgtataatgatagttagataagactaactagaacaaaaataaaaagaaaggaactttcgtgtatgatgcaattttttaaatcatcaacaaaagaagcgatgaacttcctaagatatgtcggaccaggtttactagtcaccgtaggttttatagatcccggtaactgggcaagtaatatcgctgcaggttccggatatggatatacattgttatggatggtcacattatcaacgatcatgctcattatcttacagcataatgcagcacatctaggaatcgtcacaggaaaatgtttatcagaagcaacaagtctgtatattaataaagggtttaagaacatcattttattaacagcagttgcagcatcaatcgcaaccgcaatggcagaacttttaggtggtgcaatggcattagaaatgctgtttcatattccagtaaagattggtacatttatcattttagggatcgtactgatctgtcagtttacgaatgcatacagcagaatcgagaaactgatcatcttatttgtatcactgatcggattctcttttctgtttgaaatctgtattgcagatattgaatggaaacaggcgctggtcggatgggtaaagccagaaattcccaaaggttcacttccagttgtcatgagtgttctaggagcagtcgtgatgccacataatctgtttttacattcagagatcattcagagcagagaatggaatctaaaagatgaaaatgtgatagaacagcagttaaaatacgagtttaaagataccttattttccatgatcataggatgggcaattaacagtgcaatgatcttaatggcagcagctatcctgtatcaaggaaatggtcattctattgatgatattcatttagcaggttccatgttaacaccacttcttggaaacgcagcatcaattatttttgcacttgcattattacttgctggaatttcatcaagtattacagcaggaatggccggtggaacgattttttctggaatttttgatcatccttatgatattcatcataaagatacgaaattaggagttcttattacgatgattccagcaacattgattattttactgataaaatctccattcgatggattgatctattcccagatgtttttggcagttcaacttcctattacgatctttactcagatctatctgacatcctcaaagaaagtcatggggaaatatgcgaattcgaaacgattaaagatcatactttttatgattgcactgatcgtaacatttcttaacatatgtctgtttgtgactggattttaaatataaaaaatgagataataaagataaaaaaagaaaggagcatcttatggaaattaaatatctatcaattaagaattttaaatcaatccggcatatggaaatatcagatatccagaatgctctgattcttgttggaaagaataatacaggaaaatcatccatccttcatgccttgcgtgcagtcgaaggatcttatgaaatctcattggatgattttaacgagacaatgcaaaatatagagattggatttatattatccattacagaagaagatcttcatatttttcataaaaatggtatagtgagccagtataaaaaatacgatctttggaaaaaggattttgagagtaaacttccatcttacaaaaatgaagagatcacctttacattcattgccaataaagaaggcaaacagcggttttacgatggaaaaaagaaacataataagtatattcgggaaattttcccaactatttatttcattggaacgaaccgtaatttaaaacagatacaggatgatctttttatgttacaggaagacagtttgcttaagatcatgcgtacaaactgctgtatgtttgatcctgtgaaaccatgtactcattgttttcagtgtatcggtctgatcgatcagaagagtccaaaagagctgaatgcatttgagtctgcaaagttatttgaatataaattgtatgagatgaacattgaccagtttgagaaacgtattaatgagagcttccataagaacggcggatttgaggatatcattttttctatgaattatgatgttgatcagatgcttcaagttaatgcagaggcttataacaaagaacgtgatatttcgatttctgtggaacgattgggtcgtggaatgaaaagtatttatatgctttctcttttggaagcttatgtaatggatgagaatagtctttcatcgatcattctggtagaggaaccagagatgtttttgcatccacaactgcaaaagacagccagtgagatcctttatcgtctggcacagaagaatcaggtgatctttacaacacattctccacatttattagccaattttagcagtagacaattatgtcagatcatattggatgaagattcatattctgttgcaaagaagaaaacgaacattagttcggtattagacgatcttggatataatgcttccgatcttatgaatgttgattttgtttttatcgtagaaggaaaacaagataaataccgtttgccattgttgttaaatcattattattctgaaatttatgatgaagacggcagattaaatcgtgtagcgatcctgacaacaaacagctgtaccaatatcaagacgtatgccaacttaaaatatataaatcagctttatatgaaggatcgttttttaatgatccgtgatagtgatggtaaggatcgagatatgcttggaagacagctttgtaaatattatgatgagagaaatcttgtggatgttgatcatttaccaaaagtgacaagaaaaaatgtattgatcttaaaatattattcttttgaaaattattttttaaatccagagatcatgtcaaaacttggagttatagaatctgaagatgctttttatgagattttatatgataaatggagagaatatctgcataggatcaaaagtggagttcatttgatacagatgatgggacgtgattttacatcaccgcaagatatgaaagaacatatggaagagatcaaaacctatatgcggggtcataatctgtttgacattttttatggaagatataaaaaagaagagaaagatttattaaagaaatatattgagatcgcaccaagagatgaatttagtgatattcttgatgcggcggattcgtttatctattttcagagtaagacaaaacaaaaagatattcagaatgaaacaaaataaagaaagtgcgagataaataatatgacaaagaaacacacaatattaacagcgatcaattcgaaatacattcactcgaaccttgcagtttactgccttcgtgcctacgcaaagccatatatcgatgaagtcgagattgcagaatatacgatcaatcagcaggtggatgatatcctgatgagtctgtatcaaaaacatccagatatcctttgtttttcctgttatatttggaatattgaatacatagaacgtgtgatcagggaaatccataaactactgccggatgttccaatctggcttggaggaccagaagtttcctatgattccagagaagttttaagacgacttccacaggtaacgggtgtgatgaaaggggaaggagaagttacattccttgaagtgcttgatcattatcatggaaagagagatgatcttagcaagattcctggactaacttatagaaatgaagatgagatcgtagaaacaccatggcgtccagtgatggacttaagtaaagttccatttgtgtatgaacatattgaagattttgaacataagatcatctactatgaatcaagcaggggctgtccattttcatgtagttattgtttatcttcgatcgataaatgcctgcgcttccgaaatctttctcttgtcaaaaaggaattacagtttttcttagatcataaagtgccacaggtcaaatttgtcgatcgtacctttaactgtcgacatgatcatgcaatggaaatctggcgttatataaaggaacatgataacggcattaccaattttcattttgaagtggcagcagatgtcttaaaggatgatgaaattgaattgatctctgatatgcgtccgggactgattcagttagagattggcgttcagtcaacgaatatcgatacgatcactgagattcacaggaaaatggattttaagaaagttgcagatatcgtaacaaggatcaatgctggacataatatacatcaacatttggatctgatcgcaggactgccctatgaagatcttgaaagttttaaacagtcatttcaggatgtctatgaagtacatccagaacaattacagttaggctttttaaaagtattaaaaggttcttatatggaaaaacaaaaagagaactatgggcttgtttataaagatacaccgccttatgaagtcctttatacaaaatggctgccttatgaagatgtactggttttaaagaaagtggaagaaatggtggaagtttattataatagcagccagttttcgaacaccttgcggttgttggaaaaagaatttgacactgcatttgctttatatgatacacttgccagattttatgaggagaaaggttatgacaaggtcagccacagccggattgctcgatttgaaatcttatatgaatttatacaaaccattacagcagaagagaatcttgtattatataaagagttgttaacgtatgacttatatcttcgtgaaaatgtaaagaaacgtccgaattttgcaggagattatacattacaaaaggacgagcttcgttatatcaacgaagagattttattaaaagatgaacgacttgcatattttggacaaaagaatatgcggaaattttcccatatggaacaattcgatcatgcggtaaatgaagattttaaagaaacaaaaaccatcctattgtttgattatcagaatcgagatccattgacaaaccaggcgacagtttatccgattacaatgaatttgataaaaaatcaataaaaatatagtaagaaagagggtgcagaaaataagatgatcgcaatatatttagcaccactttatctgctgttaaatgtctattttttattccgaatattgaaatggttagagacttgtcatgtttattttaaaaagaaatggatcaaagcagttttggccatgatctatgtatttcttgcattcagtattctgatcgcatttttgtttccacaaggaacgatacggcgagctatgaaattgatcagtaattactggctgggtgttttgatgtatttggcgcttacgatccttattgtggatctgatccacctgatcttgatctattttgtaaaagcagatcaggaaaagtttcggacaccaaaagtttttaggattgttggaagcatttgtatgatcttgatcgtatcaaccagtttttacggagtgtgtaatgcaaggaatatcaggacaacaagctaccacgtaacgatacataaaaaagcagaaaatcataaaaagctaaagatcattttacttgcagatcttcatcttggatacaatattggatgttctcagatgaaacagatggtaatgaaagtaaatcagcaaagtccagatctgatcgtggttgcaggagacatttttgataatgaatatgatgcattagatgatccagatcagttggttaagatatttcgacagctaaagagtcaatacggtgtttatgcagtttatggaaatcatgatattgatgaaaagattcttgcaggatttacatttggcagcggtcgggagaaaaaggtcagcgatccaagaatggatgaatttgtaaaaagggcaggaatgaagttattaagagatgaatctgtctgtattgatcaaagcttctatctctatggaagaccagatgctgagaaagtaggccgtgggatcagcagacgtaagactccaaaagaactggtaaatggaatggatcttaaaaagcctgtgatcgtactggatcatgagccaaggcagttggaagagttaaatcaggcaggagtagacattgatctttgcgggcatacgcatgatggacagctgttccctgggaatattacaattcatttgttttggaagaatccgtatggatatcgtaaggttggaaatgcgcatcagatcgtaacttcaggtgtcggtttatttggcccgaatatgagggtcggaacgaaagcggagattgtggttgtgaatgtggattttagatgatctgacaaagatgtcagttatactataataaacataatggaggaagacatttttatgaaatataacgatggaaaagacagatgcagttgggctaatccaaagaatccgatatatattgattatcacgataaagaatggggagtgcctgtctatgacgaccataaattgtttgaaatgctgatcttggaatcgtttcaggcaggattatcgtgggagtgtgtgttaaataaacgagaagcgttcagagaagcgtttgatgattttgatgtatataaagtgagtgcatatgatgaggagaaacaagcgcaattaaaagaaaataaaggaattataagaaaccaaagaaaaatatctgctgccgtatcaaatgcgactatttttatgaaaatccaggaacaatacggaaccttttctgaatatttatggaagtttacagatcataagatcatccatgagacgggaaaaacatcttcagaattatccgaccagatttcaaaggatttaaagaaacgtggaatgaaatttgtcggtacaacgatcatttattcctatctgcaggcagtgggagtggtcgagtcacatgaggaaggttgtttcctatatcataaagaataaaaatttacaagtacgtaacactgcgtacttgaatttttatacaaaaaggagtaaggtagaaattaccagataaaattgagtattagaaagatgatcatgtcataacaatgttcaaacaaagggaggaagcgatcatgagacataagattatgacagcatttgtatgcgcgattatgacaatctctgtaataccggtttatgcagatgatacacagaccgatcaggcagtgacaacagaagtttctaccgaaacagcagcaacggtgcaagaaacaaaaagaacgcaaagtaaagaacaactgaagaaaaagacaacaagcaagaaacatactaagacaaagaagacaaaattaaagaaaaaggaagaaaacaaagtcattccaatgccaacacaagtgatcagtaagagttcttcggatacgatcgaaggaaggatcaaggataaacaggcgaaagtgaaacagctgaaaaaacaaaaagcgaagattgaggaagagattcgcctggaacagcaaaaagcacaatctataaatgaattttacaaaaagtatacagcaaattccaaggcggagattgctttatatgggcaggagatcactccttctatgaagatttctaaaaaagatgagcagttaagagaagatttatatgagcttgcagatttatttggagatgagaatctgagaacgatcgcaagcaaatatgtctttggaatcaatcatccggactttgagactttgcttgataagaataaaacgattcagcttgatcagtatttaaagaacgaacagatacttccgatcaaaccaatagaagaaaaggttcagacgatcaagaagcagatcaagaagttcaaaggagagatcaaaaaagaggaacagacaagatattttaatccaaatgatgtcagtgctctaagtcatatcacagtttcagacgccaaacatattttggaaggaactgctttgtataatgatgcgaaagcttatgtcaaggcggaagaaaaatatcatgtgaatgcagtctttttgatgggaatcgctgcacatgaaagtgcatggggcacgagccgccgtgcgagggaagataataatctgactggatatggtgtaacatcggatcatgcaaaaggaattaacaaatcaacgaaagaagcaggacttttagcaactgcagaaactttacatgaaaaatacctgacatcaggtggaagttactatgttggaacttctgcggcagcagtgaacaaacattactgtgttggcggagaatgggcggcagcagttgtaaagaatgcttatttattaatgaatcgtttataattttctatttttgtattgattttatagaatcacaatgctataatttacaagaaatcaaaaagaagaaaacgttgatgagaagagtactttgtggaaagcttccagagagggatacatttgctgaaagtatcctaagcagacaaacaaaggaagaccacctcggagtggctgtaaaccagcccggctgacaccgttaatcgtcgattaagtgatctgtttctggagtttatgatcaaaggatatgaaacagataaccagggtggaaccgcgataactcgtcccatggatttttattagtccatgggattttttatttctgttatagatttattatagaagaaatctatagagaattgtgacaggataaataaaacgttatatatcaagaaaggatgaataagaagatgaagattacattaaaagatggatctgtaaaagagtatgaaaacaatatgtctgtcattgatattgcaaaagatatcagtgaaggactggcaagagttgcctgtgcgggtgaggttgatggagaagttgttgaccttagaactgtcattgacaaagactgcgaattaaatatcttaacatttgattctgatgaaggaaaacacgcattccgtcatacagcatcccatattttagctcaggcagtaaaacgtttatatccagaaacaaaacttgcgatcggaccttctatcgacaatggtttctactatgatatggagaaagatactccatttacacaggaagaccttgagaagattgaaaaagaaatgaagaagatcgtcaaagaaaatcttgaaatcacaagctttacaaaacctagagatgaagcgattgcatttatgaaagaaagaaacgaaccttacaaagtagaattgattgaagatcttccagaagattctgtgatcagcttctatcagcagggtgaatttgttgatctttgtgcaggacctcacttaatgactacaaaaccagtgaaagcattcaaacttacaagtattgcaggtgcttactggcgtggagatgagcataatcagatgcttacaagaatctatggtactgcatttacaaagaaagcagaattagatgcataccttacaatgatggaagaggctagaaagcgtgaccatcgtaaacttggaaaagaacttggtttatttatgatgagagaagaaggacctggattcccattcttccttccaaaaggtatggttcttaaaaacacattattagactactggcgtgaaattcatcagaaagcaggatacgttgaaatctcaacacctatcatgttaagtcgtcatttatgggaaacatcaggacattgggatcattacaaagaaaatatgtatacaactgttattgatgatcaggattttgcaatcaaacctatgaactgcccaggtggagttcttgtttatgattctgaaccacgttcatatagagatcttccattaagaatgggagaattaggtttagtacatcgtcatgaaaaatctggtcagttacatggattaatgcgtgttcgttgttttacacaggatgatgcacatatctttatgacaccagatcagatcaaagatgagatcaaaggtgttgcaggattgatcgatcaggtttacaatttatttggatttaagtatcatgtagaactttctactcgtccagatgacagcatgggaagtgacgaagattgggaacttgcaacagattctcttcgtgcagctttagatgatcttggacttgattatgtggtaaatgaaggagacggagcattctacggacctaagattgatttccacttagaggattctatcggaagaacatggcagtgtggaacgatccagcttgacttccagctcccattacgttttgaccttcactacacaggagcagatggagagaaacatcgtccaatcatgatccaccgtgttgcatttggatctatcgagcgttttatcggtattttgatcgagcattttgcaggtgctttccctacatggttagctccagtacaggttgaagtgattcctatctctgataagcatttagattatgctaataaagtacttgatacattaaaggcagcaggaatccgtgcagacatcgatacaagagctgagaaaatgggatacaagatccgtgaagcgcagcttcagaagattccatatatgttagttgttggtggaaaagaagaagaaaacgaagctgtatcagtaagaagccgattcaaaggtgatgaaggacagatgaagttagatgacttcttagctacaatcaaagaagagattgctaatagagaaaaccgtaaggttgaaaaagaagattaactatcaaatgaaaaggaggcaccacatttgtggaatgcctccttcctttatatcatatccgttctaataattcatcaggtttcatagcaggtactttactttcgataaaatccttgatattacgagttacaataaaatctactttcattcgctgtgcgcataccatttgaatcgcatcttcataatcagaagttttcatattcgccgcttttcttatatcagaagactttagatcagcaatatgaaaaatcataaacagctgttcaataatttgctgagttttttctggtgttaattcttttctcaaaatataaacaatatttggaatagataatgctgaaatatatccatcaattttttctacttcacataacttccagatttttgaagagctttctacaaaatcagttctgtcacataatacatccaggattacatttgtatcaatcaatattttcatatttttctgcaatcctttctgcgcggatatccttttcgttataatctttttttagaattccagttaaagaatcagtcaagaaagaaatacctgtgtcttttgaaattaatctggcgacttcttttcctttctttaaaataataatttcattaccttcttggacagcttttaaatatttaccaaagttattttgaatatcagttgctgttgttgtaatcatagtatcacctcctatttcaatagttaatccctaaaattattatatgctattttagggattttatcaatgatattagaaaaattgattcattttataagttatataaaacaagattgtctatataactgcaacattttctcaaataaacatcttgaaatataccctaacagggtatataatatcaaacgtaaaggaggaaatcacatggaagaaaaaaaagaatgttgttgtcatcacaagacaaaagaacgttcagacaaagaatataaagatcttattaatcgtctaagccgtattgaaggacaagttcgtggaataaaaaagatggtagagaatgatacttattgtaccgatattttagttcaggtatctgctgtcaatgcagctttaaatagtttcaataaagtccttcttgccaatcatatcagaacttgtgtagcagaagatatccgagaaggaaaggatgagacgattgatgaattagtaaaagttctacaaaaactaatgaaataacaatttgacaagcaaaatgaaaggaagggaaaccatggaacaatatcaagtgactggcatgagctgtgctgcttgcagtgcacgcgtggagaaagcggtttccagtgtagaaggagtcacatcctgctctgtaagtctgctgacaaactcaatgggtgtcgaaggaactgcagattcatctgtgatcatcaaagctgtggaagatgctggatacggagcaaagaagaagggcgtgcaaacgcagagtaattcttcagatgcagatttattaaaagatagagaaactcctgtcttgaagaaacgactgatcacatcgttatgttttttgattcctttgatgtatctgtcaatgggacatatgatgtggaattggccaattcctaagattttagatggaaatcatgtagcaatgggtctgatccagttgttatttacaacaatcatcatggtgatcaaccagaaattctttattagtggatttaagagcttattccataaagcaccgaatatggatactctggttgctttaggatcagcagcttcttatggatacagtgtttatatcctatttgcaatgacagatgctcagatgcatcaaaacatggatgcggttatgaaatacatgcatgaattctactttgaatctgccgctatgatcctgacattgatcacagttggtaagatgctagaagcaagatccaaaggaaaaacgacagatgctttaaagagtcttatgaaattagcaccaaagacggcaattgtgatccgtaatgaacaggaaatagaagttggaatcgaacaggtacatcaaggagatatcttcgttgtaaaacctggagaaaatataccggtagatggtatcattattgaagggaacagtgctttaaatgaatctgctttaacaggagaaagtatccctgtggataagaaagaaggcgatgctgtatctgctgcaacattaaatacatctggttatctaaaatgtgaagctacaagagttggcgaagacacaacactttcccagatcattcagatggtcagcgatgcggcagcaactaaagcaccgattgcgaaagttgcagataaggtatcagggatttttgtcccaactgttatttgtattgcaattgcaacaatgatcatctggctgcttgtcggacaaagttttggatttgcacttgccagaggcatttctgtattagttatcagctgcccttgtgctttaggacttgcaacacctgtagcgatcatggttggaaatggaatgggcgcaaagcatggaatcatgtttaagacagccgtatccttagaagagacaggaaaaacacagattatagctttagataaaacaggaacgatcacgagtggaaaacctcaggttacagatatggtaccggtagaaggtatcagcgaagaagaattactttccattgcatatgcattagaaaagaagagtgaacatccgcttgctcatgcaattttacaaaaagcagaagaggcgcagattcttgacaatcttgaaattaaaaactttttggctattgctggaaatgggctttctggaaagattgataaagagacggtctatggtggaaaccagagatttattgagaaatatgcaaaaattccattatctatgatcaaaaaatcagaagaacttgctaatcagggaaaaacaccattattctttgcgtgtgatgaacagctgattggtatcattgctgttgcggacgttatcaaagaagacagccctcaggcagtcaaagaacttcagaacatgggaatccgtgtggttatgctaacaggagataatgaacgtaccgcaaaagcaatcggtaaacaagctggtgttgatcatgtgatcgcaggtgttcttccagaaggaaaagaaagtgtcatccgtgacttgaaagaaaaaggaaaagttgcaatggttggtgacggaatcaatgatgcaccagcacttacaagagctgatatgggaattgcgatcggcgcaggtacagatatcgcaattgatgctgcggacgttgttttaatgaaaagccgtttaagtgatgtacctgcagcaatccgtttgagtcgtgcaacattgaagaacattcatgaaaatttattttgggcatttatttataacatcattggaattccattggctgcgggagcctggtatatgttacttgggtggaaattaaatccaatgtttggagctgcagcaatgagtttatcaagtttctgtgttgttaccaatgcattacgattaaatctctttaaaatgcatgatgccagcaaagaccagaagatcaaaaacagtgtagtacttgaagaaattcaggttcaaaatataacaaaacaggaggaaaaaacaatgaagaaaacaatgaagattgaaggaatgatgtgtggacactgcgaggctgctgtgaagaaagccttagaatctttagagggtgtagaagaggcaattgtaagtcatgaagaaggaacagcagttgtttctatgacaaatgaagtgtcagatgatgtcttaacacagacagtagaagataaagattacaaagtaacagaaattgagtaaaaacaaagattgttataatattttgacataattcaagaaaatataacaacaaaaaatcaatattgttatataaaataatgataaatttgcaagatagatgtagatttatcattatttttttatataaatcaccatcttgttgagaaaaattatcaaaagtgtggtacaatatgactggttagaatcatctaatcaattacaacaataaagatagataaaggatataaaaaatgacactaaaagaattacaaatcggtaagagtgcagtgatcaaaagcgttggcagtcatggtgcattaagacaacattttcttgatatgggaatgatccctggtgttgaaatcacagtagtaaagcttgcaccaatgggtgaccctatggaagtacagattcatgggtatgaactgactcttcgattagaagaagccgatcagattgaaattgatccaattgtagaaagaagcagaagtcataagggtgcggaatatatgagaacttttgagcatccgggattaggggaagaaggtaaatatcattccaaagaagatgaacatccacttccagagggaacacaattgacttatgcattagtcggtaatcaaaactgtggaaaaacaacattatttaatcagttgactggtgccaatcagcatgttggaaattttccaggtgtaacagtcgatcgaaaagatggtgcgatcaaaggacatcctgaaacaaatgtaacggaccttccaggaatttattcgatgtcaccttatagtagtgaggagattgtttccagaaacttcgtactagaagacaaaccaaaggcgatcattaatattttagacgcgacaaatattgaacgaaatctttaccttactatgcagttattagagatggacattccaatggtggtggccttaaatatgatggatgaagttgttgggaatcaaggatcgatcaatgtcaatgaaatggaatcattgctaggtgttccagttgttccgatttcagcggcaaagaatgaaggagtcgatgaagttgtaaaacatgcacttcacattgcaaaatatcaggaaaaaccattgcggcaggatttttgtgataaagaagatcataatggtgcagtgcatcgttgtattcatgcagtaatacatttgattgaagatcacgcggaaaaggcacagataccagttcgttttgcagcgacaaaagctattgaaggagatcctttgatcttagaacaattaaagcttgatcaaaatgaaatggaaatgttagagcatattgtcaaacagatggaaacagaacgagatttagatcgaagtgcagcaatcgcagacatgagatttgattttattgagggtttatgtgaacagaccgttgttaaaccaaaagaaagtaaagaacggattcgaagtgaaaagatcgatcgagttctaacaggaaagtatacagcaattccttgttttgtaggaatcatggttttggtattctatcttacatttaatgtgatcggggcctggcttcaaggaatcttgcaattaggaattgataaaatctcagtgcttacagatcaggcattaactgcggctcacgtgaatcatgcgatccatagtctggtgattgaaggaatctttactggtgtaggaagtgtattaagctttttaccgatcattgtaaccttatttttcttcttatcattaatggaggacagtggatacatagcaagagtggcatttgttatggataaagtgcttcgaaagattggattgtctggacgaagtatcgttcctatgttgatcgggtttggatgtacagttcctgcggttatggcaacaaggactttaacgagtgagcgagatcgtaagatgacaattcttttaacaccatttatgagctgtacagccaagctgccaatttattcttttttcgtgaatgccttttttccaaaacgtggtggtcttattatggcaggattatatttatcaggaatcatgataggtattttgattgcatttttatataagggaacgttatttaaaggagaaccagtgccatttgttatggagttaccaaattacagacttccaggagtgaagaatgtagcacaattattatgggagaaagcgaaagatttcttacagaaagcattttctgtgattttggtcgccacgatcgttgtatggtttttacagagatttgatctgcagttaaatatggtagaagattctgcacatagcattttagcaatggtagctggtgtgttagtaccagttttttcaccattaggattgggagattggagaatcgtgacatcattgatcagtggatttatggcaaaagaaagtgtagtttcaacattaggagttttattcaatggaaacatcacagcggcgatcacaccattagccgcaagttctttattagtatttagtttgctttattctccatgcgttgcggccatcgcatctgtaaaacgtgaactaggaacaagatgggcggttggtctggcattatggcaatgtatgattgcatggattgcagcattaatcgtaagattcattggattagtaatttgaattacataaaataaaaatatcgagagaggccagtaaaatgctggcttctctgtcttttattagcaatctataatttaaatcggtattttgcgtatagattgattcttaagcatatggcactttcaaggtctgttctttccatattttatatcattattgtcaaatgtaaaaaaataaaggaacattgaaaatcttattccaattccatgttcctttatcatttagatgttatttagaaacttaaatgcttctttttctttaacagattcgcacctgtgatgattagcatgattccagatgcaagtccaatacaaatggataagattccaagcacgatgtttccagcaccggtacgtttcattgttaagtagattttctccatgtccatgatgtgacctccgtttgagaattataatttgtaatgtctatgatttactatatcattaaaattcatacttcgtcaaataacaacttataaaagcagatttcttaccattgcaccatcaaatgttacactattcatatggtggacttcaatctgatataatgcattggctgcaatatgttctgcggcttgttccagatctctgattcctgtggtttcagaatacatctcaatgacagcatctaaggcctcatctgtcataatacattcatcatcttttaatcccatacgttttaataccttagggagtgcaaatctttggaagatcgctttcttctcttctggtgtgtaatcagggatgtcaatgactgcaaaacgtgacatcaatggtgcactgatctggtctttttcatttgcagtggcaattggatatactccaactgttgggatcatacattccatataattatcggtaaatccgagattatcgagcaatgttagtaaaacatctgcaggatttccatttccctttcctgaattggctttatcaagctcgttaatgataaatacaagatttgattctcctgccatggaaaatgcatccatgatgatccctggttttgcatttgcataaatacgggaacttcccgttaactgctctggatcgttaatggaactcatatcaagagttgtccatggaagttttaaaattcttgcaaccgcataagcaatctgagattttcctgttccagcaggtccaactaataataatccataagcaggcagcgtgtgtgtacgattgatctgaatgatcgtttcaatgattctttgtttcacacgttccataccatagagttcttcatcaagaatccgtcttgcttcttcaggatcgatcgctttaaaataattactcttccattggatgttcatcatgatggataatgcacgctgggcatgacgtctctcttcttgtgaaacttcatgagattttgcaacagcaagatttcttcttgcccatagacgaatattatcaggcagcgtacttccggcacatgtcataaaatctgtgatactctggatgctggtaagtttcatatcatcacccatctcatcaagattttcatcagtgatccgttcatctggtgcatcactttggaataaacgttcgatcataaactgaaggaaaccatcttctgcagataatttggtgccaccgccaagagcaatttctctgatcttgtatacacaataaccttctactgtattctccccagataagcggacatgaatatgattctctccaagccatctgaccaggcttacaaaacgggaatctaattttaagatatcagatattactgtcccatcttctccctcaaattcaaaggctgtctgcttatcttgatcagaaaatacaccacaggaatgatgctcccactgcttcttcttgtttgataaaatcaagatagggcattctatcgtagcatgatctacattcgaagaaaatgttgtataagtacagactacttcttcttttatttctgatgtatcgttactaaaatcaaatactggcataattaaatactcctgttttcttttgtttagcatatttatatttcattatatcagtttttcctgatttttaaaagttttaaactctttataaaatagaaaaagggataaatgcttctggatgttctttatgttttccaatatatttttccatccagaccatatcataccaacgtccgaatttatagccgcttttataaaattttccaaccatatgataaccaagatgttcatgatactgaacactgttttttgtaacatattcatcttcgatttccggatctgtaatgcacgcatccaaattgatcacatgttgttttcgaaggatttcttctaatgcctcatataattttttcccgattccctgtcgttttacatccttatctacataaatggttgtttctacggaccagtcatatgcagcacggtttttaaaagatgatgcatatgcatatccgacaatctttccatgtccatcaacagccgccagataaggatagcgttttaatgtctgtttgatcctttgacggaattctgttatcgaaggtgtttcatattcaaatgtgattgctgtatgttctacataatagcggtaaatttccagtaattcttctgcatcctgtggagttgccaatctgacttccattttgtcattcctttcagtttaatgaaatagtggtgcttttttatttaattttgcatttgaatgtgttccccagtgatcacttcataacaaatcagattttttgtgtttaaatcttcttttgtcatatcaacagcactgatctggtgattatcataggttgtataatagtagattcctttttgcgtattacaacaagaagtatataaggtaatctcatattttccattgacatcgcagcatcctctttgctgatcgacagatccaagaatatggaaaaactgattgacactttcattttcagaatctccagagacagaatgtaatttggtaaatgctactttagcaaaacgtgaggatgaagaaagatctccaggaagaccaatcgcacccattccacgactgtattgatctaaatcgatatcttttgcaaatagattttctggttgttttggagaaagattcatatattgatttaataagaacatctgaatgttaaatggaggattatttgttaataccccaacgttattttcatagatatgcatcccatcttccattgcttcgactgtgatcgcaccagattgatctgcaatgatccagtgaagctgcgctaatggaaattgttcactgtaaggggtattggtaagattcatatgaatcaatgctgtcttcgcttcctcaagatttgcacaagttccaagaatccaagggataaattcaaactgtgcgatattgtctttcccttcttctatatcataatatgctgcatttccaacaaaattaagcccagccattgccagtccacattcattgaatgcatcataatacaaagggtcattgtcgactacatgagccattccgatcatagcataatgactttctatggcatcgatatgtctaaaatgaaatggataatttcttggagtgatcacaacctcatctccataagagaattcataatctaaagttcttccaaaataaaaatcttttgtcttgtaagttgcagctgtacacattgctcttttactcctccttctattaattaatttcaataattttcagtaataattatatcctgtttctaaggtatcattcaaagatgttatgcctgatctgtcataatggaattattttcaaaaagatttcgaatgctagtcgttatctttcggaataactggtcaaatccataagcataaagagagccaaaaacattggcagcgattcttaagataatggcattcttcaggccaaaaagattctctgcaatataaagagccccaaaggtgttgaaaacggtttgccaggcatatccagcagaataaccaactcctatcccgccgatcagaccgatccattgaaagatatgatcaggaaggatcgcatgtaaaataagaaagatcatacatccaagaatattaaatggtcctcttctttgtacacggtatttcatatcttttgaaaatggcaacaggacggacattgcagcaatcccgatccacataattcttggcatatgaaccaattctccgattaacattgcagtagaaattccaagagataatcttaaataccagctgcttcttgcagaaaacagatgaaattccttaaataaatgataaaatcctctatgaaatgttcgatttctatgattcttgtaaaatacaagggaacagatcacagcacctgcaaataatccgcaacatcttaacacatagttatgccctgtaacatcatatccatagaataacaaatatcctaagataaatgtggactgattggacatgataacgttatggcagcttaagatcatgattgccataatacaaagaaaatgaataaaaaaagcaggaacggtatttacagtattagcaagtcttggtccaaccgcaaggattgcaaaaatcataaagataacgccaatgctgtgttttgtatcgattccgaagtcaacctgtcgtaagatcattaaaaccagtaagactagcacgccgacaacactgttttgtgatccaaagatcatactgtaaagagttactactgcaaaacaaaatgcaacaactaaatatactttaaaattatagataaggatacgtttatgtttctcttttgaatctttggcacctttgatccattgtttggaaccgatggaacttaattgtaactgttgataaaaatccaatgttaatacctcctgtgataagaatctgtttctgagtagcaatgaacaattttactcacttctaggctgttcgtcaatacgttatttgacgttttttcttatttttgatatgatttatttatgaaagcgacagacaaagaaaggagaatttatcctcatggcaataaattttaatcagatgttaaagtttcagcagataaaaaatacattcaaacggtttgatcaagaccatccaaaattcaagaatttcatgaatgctgtatggagagagcaggcacttaaacaggatgctgtgatcgagatttctattacatctccagaagggaaaaattattgttcgaatatcaaactgaatgcagcagatatcgagatgtttgaacagttgaaatccatgaaaccagaataacaactcaaaaagaaggctagtcaaatttcacgactaaccttcttgatttttactgtaattcttcctcagacaccagatttttcatgcttctaagccctatacaaagggttgaagtattatgtaatacggcagatgttgttggctgaataaagcctaacacaccggccccaataagccctgcgttaaatccaacaataaagcggtaattattatgaattcggcgcattaagtggttactgatatgtttgagagttaccagaccatgtaaatggtctccttcaatcgttacatctgcgatttctcttgcaatctgagctccatcactgatcgcgattccaacattagatgcagataatgctggagaatcattgattccatctccgatcataataacttttcttccttcggctttttctttctcaacgaaagcagctttatcctctggaagtacctcagcatgatattcatccacaccaactttggctgcaataacctttgcagtacgatcactgtctccagtcatcataacgactttcttgattccagcagcttttaatgctttgatcacatctttggcttcttcacgtaatgggtcttcaatacagatcacacctgcaagttttccttcgatcgccatatataaatgcgaacattcttcaggcagtttctcaaataactcttctttgccttcaggaattgtacactgctcatcttcgaatacaaaatgataacttccaatgacaacttttttattctcgatcatggaagaaattccatgagctacgatatactcaacctcagaatgtaattcttcatgtacaagatttctgtcaacagctgcctgaactacagcttttgccatagaatgagggaaatgttcctctaaacatgcggcaattcttaataattccttgcatttcattccgttaaatgaaacaatatcaagaacagtaggttccgcttttgttaaagttcctgttttatcaaagacgatcgtttcggcttctgccattgcttctaagtatttaccacctttgacaacgatctgatggtcatttgcttccttgatcgcagataaaacagagattggcattgcaagttttaatgcacatgagaaatcaaccatcagtacagataaagcttttgttacatttcttgtaaacaaatatgtgagagcagttccagccaatgtataaggaactagacgatctgcaagatgttctgctttactttctaaagaagattttaatttttcagattcttcgatcatcgtaacaatcttatcaaatttgcttgatccatttacttcttttacgcaaacttttaagtcaccctcttcaacgacagttcctgcatatacgtatccgtcaggaatcttgcgaacaggtgttgattctccagttaatgatgcctgattgaccattgcttcaccatcaacaacaactccatcaaatgggatcatatttcccatctgtatgtgaacgatatcgttagcatcaatttcgttggatggaactaaaatctcatgatcttcttcgactttccataccttatcaatattcaaggacatgctttttgcaagatcatcgacggatttcttatgtgtccattcttcgagaatttctccgattccgagtaaaaacatgatagaggatgcggtattgatatctcttcgaatgatcgatactccgattgccgtaccatcaagtactggaacttcaatcttaccctgagcaagtgtatgaattccttcatatatatatttcaaagatttgatcactgtgatccctgctcttaatggatatggaaataataatttgtttccataatggaataagactttacttataagtttctcctgatatgtctggtttaattgtctgctctgactttcttgataattatcagggactgtgatgattccatgataaaattcctttaaagcagtaagaatttcactgcggctggcatcataacagatcacgatgtcatttgtgcggtcatagatttttacagatgttacaaaatcttttgttataagataatattgaagttcatctgcctgatcagcactcattgtcttctggcagttatgaatacgaattctgcctcgaatctcatgtttgatcgtaaatttcatacaaactcctttttgtttgaaaacacctgcaggaaaactgcaggtgccttaatcttaatgttctattctattctgcaacttctttgaaagtatcttcggaaacttcttctgtttcttccgcctcatcagtttcagcataagcttcccattcctctgcttctgctgctctttcttcattgatctgctgagcttcagcatagatatcttcagcattctcctgtacagttgcaactgtatccattacacattcttttgcacgaagaacagctgctgtacaatttgtgtaaaatttctttgcatccttacttgataatgctttaatacctgctgttccaaataaaacacctgctgcaaaaaatcctgtttttttactctttactactgataaaacttttgttaaatccatgtttttttcctcctgtatgatataaatatgtatttatttctcgtatacttaagagctatatgactttatatgctctctaagtaactttgtccattataaaacatcctatggcgattactcaagactaatcgcagtgccttattgataatatttctcaataagcgctactctccttctgtagtgtcagagctgttaaatatgttcccagaatcaccttttgaacggttatagtcgtatttggaaggatatccacatgtctcagcagcatctgcacctccataattcttagcaaaatcctgacgttttcctttattaaacataaagtattttaatgcttcctgatttgctttgaaatttacaaagaaaacatatccacatggaggatagtttccagcaacagctgttttgtatgtattctcgatcggtacacgaagctgatcaatctctgttgttcccatttttgcaacagataggatcagtttcttaatataagttgcgtccatatccgtagatacatcaccaagtgcatcaatcgcaatatccacaagatctaaaggattttgctgtaacatcttctggaaagttgcctgcataacagcacgctgtcttcctgttcgtccaaactcttcaacaccatactttttagagaacacatgacgaactcttgcataccctaatgcctgattaccatttaaagtctgtttaccgacttttacatttcgatattttttctttgaaatataatttgttgtatttaagtattctgcttctctttgttcaagagtcatttcaattccgccgatcctgttaattaccttttcaaatgcggcaagatctacaacacagaatttgtcgatcttaatattaaaattttgagccagtgtctgatataaaagcgcttccccgccaaatgcataagcggcatttagtttattacgtccatgacctggtatttctacatacatatctcttaaaaaagaagttaatttcaattcttttgttttaaagttgatcgttgcaaccatcatactgtcagatcgaccatgatcacctttttcggagccctgagccccattatcagaaccaactaataaaatattgacaacatctttatcgaaggtcagatcttcctcattcttaatcttcactttatccatagattgtttttttggcgtcactgcggcttccagtcgcgcatcataatacccaagcataccaccaacgccaattgcaatgatcagaaaaaaactgattatgactgtaaatttttttgtaaacattctaaagttccctccttattttcctgtccgtattttaccacatattcttttgatatcaaactgttaatctttgtttttttcatttcctaagaaaatcttcagaattttatccatatcattttgatatggatatgatgtaaaaaatgtattttacacttgtttttattcatgataagataaaaatatattaagtcaggtaactagtttacacttttatatattgttctgagaaatctccagagataagcaacgggtgctgttctttggaggttttttaatatcataggaattttcgatggaatcccctaatttaagaatcttaagaatgccttagctgcgatactttgtggatattctgtatcatagatcaagatgatattacgctgaggaaacgtttcttttacctcaatctcaaagacttctccagattccagatcatctttagcaaattctggtgggataaaaccaattccaagattatgtcttacagctggaaggatcatatctgtagttgcaagttccatatctgcctcaaattttaatccattcttttcaaaatactgatttaaaaactttcttgtgatagcttctggggtcagactgatccaaggatattgggcaagttgcttgatagaaattttttgaccttttaattcctcaaaacgtttcccaccaattaaaatatcatggtattttcttaaaactttttgctgtaacggtttttctatttgaaatggtgcagatacaactgcaaaatcaacattgccttcttttacgatattgatggattttcttgtactattatttaaaatcttaaaatgcacattcggatattgttcattaaaggattccattgcctgaaataaatagcaatgcagagcggtttctgtcgcacttacatagattgttccattttcaaggcttagcatatcacttaaattgctctctgctttaaaaaactgagcacatccggctgcgatgtattcataaaaaacttcaccttctggtgttaacttcataccaactttgcttcgttcaaataatctgcagtttaaattcttttcaagattgtggatcgttcttgttacggatggctggcttgtatgtaaaactgtagcagctttcgtaagattcccatattttgctacataataaaaaatccggtaatgttcaaaatttgtattcatcgttttatttccttttcgcaagctgccagaatgcaacagcactcgcagcagctacatttaatgaatctactccatgtgccatcggaatctttactgtatagtcacatgcatcaatcgtttcctgacataaaccatcgccttctgttccaaggatgatcgcaagtttatcttctgacatcaaagcttcgtcatcaatacttacagatcggtcagtcaatgccatcgcaacatttttataaccaagttcttttaaacgatgcattccatccgctggccatgtatcatccccaagaaatgtccatggtatctgaaaaacagttcccatactaacgcgtacagatcttcggtataatggatcgctgcagcctttactaagcagtatggcatccatattaagtgccgcagcagaacgaaagattgctccgacgttggttggattcataacattttccagaataacgattcgttttgcatgatcacagatcgtttcgagcgcaggtaatggttttcgacgcatggcacacaacatgcctcttgtgagtccaaaaccagttagttgttttaatacatcaaaagatgctgtatagacaggaatatcctgatattgcaatataatatcttttgcctgtgttttaatatgacgatcttcaaccaaaaaagaaatcggttcatatccttgttcaaaggctgtctgtataacctttgggctttccgcaataaaaatcccaagatctggttcataataatgtaataactgcccttctgacaatcttgcataaatatctagttgtggatcgtttagatccgtgatctgtatgacagacatcttatcttacctccatgtctttgttctgaaatgtagctttaaaatccacattattatatcgtatttcacaaactaaatctacaaaatataaaggatttgtgatataataaatcttcaaacacatttcaatcaaaggagaaattactatggataaccagaacatcctggctgttgttgccggagaagaaatcacgcagaaagatttagatgcactgattgctgcattaccaaaagaacaacaggcatatgcagggaatgaacactttagaaaccagtgtttagaacagatcattactgttcatcttttcgctaaattaggagaagaattaaaattagaagaaacagaagctttcgctgacaatttagctcatgcaaagagagagattcttgcacagatggctcttggagaggctatgaaagatattactgtttctgaagaagaagcaaaagaatattataaagcgaatgaaaatcagtttatggctggagaaacagttcatgcgaagcatattcttgtagatgatgaagacaaatgtcaggaaatcttagaaaagatcatcggtgaggaaactacatttgaagatgcggctaaggaattttcaacatgcccatccaaagaaaaaggtggagaccttggtgcatttggacgaggacagatggtgaaagaatttgaagacgctgcatttgctgctgaagttggacacgttgtaggtccagtaaagacacagtttggatatcatctgatcaaagttgaagataaaaaagacgcagaaacttctgtatatgaagatgttgctgatacgatcaagaatatcattcttcagcagaaacgtaacgatgtttacggaaataagattgctgaattaaaagaaaaatatgtagaaaaatagaattttcttacatagtgtaaagtataaaaagatgccttccacaaaaactttatgggaggcatctttttgaatatttaatttttattacatgatcaatcttctaaatctactacgttattctacaccgtaatgtgttaataaggctttttctgcttctgcgctccataatccattatgtctgtcacaaatatcagcaagttcattgaaaaaaggatcatcttttgcaagacttctaagatcagaaattgctgtcattggcatattgatatgaagatatgataatttctttccaccaggaatatttggaagattcattgttgtatcaacgatagaatcaattcctccaacatgagtgatcataacagctggtttgatttcttttcttgcagcacgatcgattgcttctttcatgtcatcgatacttccaccagtacttccaagaatcttcgttgcattgtaatgacagtcatacagattcacatctgctgaaaattcggagtctgttggtcctgcaaacaggttcatacatccatcatagcctaaaatcttgtttccaagttctgcaactggtctgactggtacgtaaacaaagacatcatcaaatccttttccatcgacagatagtgcttttaatccatcgactggatcatccatctttgctgtgtttacataaattaattcaacacctttttccttggcttcttctacagagatcacctcattcgctcttgctaatttggcgtcatcaatgtctgtaacgatcactttggctggtttattctcgatggcaagggcgtagcttacagcaccaagtcccattggtccgcatccaccaagaattgcgatacttccacctgcttttgttcccattacatgctcataacggtctttaacgtgatagtttgttttataaccacaaatgacacagcacattggttctgcaacagaagattcaaagtaagaatctccttcatgagtccaaaggcatccagcttcgataatatcatttgggaaaatacagtaagttgctgctccaccgcactctgtataagagtatcctggagattcagcctgtccaggaattgctggctgctgtgcgaacttctgccctggtttgaatttatcctgccattttttaccgactttcacaatatctccggcaaattcgtgtccaatgatgatcgggtgatcagcaacatccgcaggaactcgcttatgatctgctccttgttttaccattttccatgtagacatacagatcgaatcactcatcaccttaacaaggatctcatcgtccttgatctctgggagttcaaattcttccagacggatatcgtcttttgcatataatcttacacctttaacttgcatatgctacctcctaaaatataaaatccatacaggtatattttagcacaaggaaattattttttaaactcgttttcttgatatttatctacaatatgattaaacattgtgcgaacagcaggcgccataaaattcggattcatagctgcaagtccgatgatcctgcttgcaggtggttttgttggataactatcaactttatatggaatatctgtcataaccagtttcggcatcagacagattccaaatcctttctcaacaagtgcgatcgttgataaatcatcaactacatgatagttcgattgtacttgcagcgaattctcttttaagaaattctggatatctgcatcggtactgtctcgttgtgttacaaattgatgatgtttcatttcttcaatatcaatataatttgtacttttatttgcttttgtaccactcggcagaacacagagtaattcgtcacgatataatggttcaatcggaatatcctttgcactggatacggataaaaatccgagatctacaactccgttcttgatccagtatacaacatcatcgtaagttccctgaaagacttcaatgtcaatctctgtatacttcttcttaaaagaatgtaagatctctggtagccagctggtacatacactggagaatactccaatctttacttttccttgttttaatccatttaattcagcaatttcctgctttaagctttcatcacagttcaatacagcatttacatatggtaatagctgttctccatagtttgtgagactgactcctgctttgcttcttgtcaatactgaaaatcctaattcattttccatcgatgagatggcatgactgatcgcagagggtgttaatcctaagatatccgctgctttatggaaactccctacatctgcgattgtcttaaaaacttggtatgtcaataatgtcattccataaaacttccttactttattattttatctatcacatttatataacagattttcccaacgtctgtcaacctctttctggaattcttcaattaaatgttcatttccaggtttaaataaatgtttaaatcttccctgtgctcttaagaaatcttcaataggaagttttttctttggctcgtaagttaaattccattttccatgatctacttcaaacattggccagtagcatgtttctactgcaagacgacagatttccataatatcttcagtattgtatctccatcctcttggacatggtgtcatgatatttaagaaacttgccccttctgtgtaaatcgctttttcagcctttttatgaagatcattaaagtttagtgtaaatgtactctggcctacatatgctacatcatgatctgcgatgatgcttgcaaggtctttacggttctgcattttaccaacagattcttttcctgtcggtgttgttgttgtatctgcaaacattggtgttgcagaagatctctggattcctgtattcatataagctccgttatcgtaacacacataaaccatgtcatgaccacgttccatagctcctgataaagactggaatccgatatcataagttccaccatctccaccaaatgcgatgaatttaaagttttcgtcttttggaagttttccacgtttttttaatgctttatatgctgtctcaactccacttaatgttgctcctgcattttcaaatgcattgtggatatagctgtcttcccatgcagaatatggatacatgaaagaagatacctcaagacatcctgtcgcatttgcgatcacagcatgatcttcttcatgtaaagcacgaagtaccgcacgaactccaattgtagcaccacatccggcacacatacgatgtcctggagctaaacgctcttttttactcatcatttcttttacattataactactcacagtattcctcctattaacgcaatccgatgtatttaaactgttcaagttttgttccattttcaatatgatcttcaagatcagcaaagatatcatatacttcctgtacggtaaagtctcttccggcaagtccgtaaatatagttgacggtatcgatcatcactttatttctaaataatccggcagttacttcacttccaagaggtccaccgtttccgttataactttctgtacggtccatgattgctaccgctttggcaccttttaaagctgtggctaattcatcggctgggaatggacggaacagacgcagtttgataacaccgacttttttaccttttgctcttaagtcatccactgcctgttttgctgttccagcagctgatccgatcaataacatgatgtaatcggcatcttttgttttgtattcttcaaataatccatagcttcttccagaaatctttttaaattcttttgcaaccttcaagactgcatctttcgcattttctaatgcgatttcttgatttttctttgcttccattgcatagcttgtcacagaatatggtccaactgcgattggttttccaggatttaataagaattcttccggttcatattcaccaacaaaatttctaacttcttcatcttctagtaattcaatattttcaaccgcatgacttgtgataaatccatcctgacagatcatgatcggtaaatggactccagcactttcggcgattggatatgcctgaatgaagttatcataggcttcctgattgttttccgcataaatctgaatccatccagtatctcttgcgcccattccatcagaatggtcacagttgatgttgatcggtccggataatgtgcggtttacgagagctaatgcgataggcatacggtttgatgctgcaagcaataattcttcccacatcaatgcaagtcctgcagaagatgttgctgttaaagttcttgcgccggcagcttctgatccgattgcggcactcattgcagaatgttcactttccacagggacaaattctgtgtcgatttctccatttgcaatatatgtagaaaccatctgtggaatctctgtggatggagtgattgggaatgccggcataacatccggattgatctggcggattgcgaaggataccgcctcatttcctgacatacgatcttttctagccatcttatcttccctccttcattgtgattgcatcaaatggacaggcttttgcacaaataccgcatcctttacagtggtcataatcaaattctactcgttcaccatcttttagaggaatactagagtctggacagaccatggaacagaccatacactgtctgcaaagatcctggtctaaaattggtgttcttgttctccattcccctgtatgaaactgttttgaagttccgccagcaaataacatcagtccttctgtcagatcctgatgaggtgtctgctcattgattttgcttatatctgttctcatattgttatatctccatttaaaatacgtttttataatacatcttttaattcttcataagttaattcaagtgcctgcatatttccatcgatgacttctggtttctttgcaaatttatgctgataagaagctcgcatttcagaaataaaagcatcttttttcataatgccactgactgcaacagctgctgcgagcattggagagtttggaaaatattttcccaaagcctgtacagagatttttcttgcatcgacagtataaacttttccttgatagccatttaacattggcttgatctcatcggctgattttggtgtatttacaatgatcgctccatcttcttttaatcctgctgtgacatcaacagagtgaagtaatgtctcatcaacaacaactactaatcctggtgtataaatgtttgaatgtacgcggatcacttcatcactgatcctgttatatgcagtaattggtgctcccatacgttctggcccgtattcagggaatccctgtacatattttccggttttaaatgctacgtcggcaagaagtaatgctgcggtcttggcaccctgtccgccacgaccatgccatctgatctctagtccattgttcatggtgtttctctccctttattttgataattatacttaaatgaattacattcatctataaattagatttttttcagtaacatcaactattatattacaaaatccgactttgtaaattgaaactttgaatagttttcattatatagttgaacaaaattcatttataaacaaaactacaagggaatacaacaaacaaaagttattgtattcccttgccgttttatattatttactatttttcttgattcgaggatcaaaacatctcatatcaatccacattcggctgatctttttatttgcctgatctccgaaatatgtcataacagcacttcttcgcataacatcctgtgtcggatattgggcatataactgtcctttggacatttcctcacttgttttcattacatagttgtaattatctccattttgttggaagaaataattcagatcataatcaacgcttttcttatcttcgcttccatacatatatttgatgtaatcatagatggtcttatcttctcctccagagatcacagatgtatatccgacatagtacatattccttacaacgttatccggtcttgaaatatagtttacaaaagcctgtgctgcctgctgcttttctttatcttttccaatcccagactttaacatacaccatccgtcaaaccacagattcgtactcgcttttggaacagcataacgtaatttgataccttcttcttccacctgctgcatagaatatacaccgtctccagaccattgaagattagctaccacctttccactgacaaggtcagcttttccactgtcagtttcaaaagaatatacattatccttgatctttgataggatcattcctgcattttggatactttgatcagaagtatcatttaacaaggatgataatctttctttgtagtttgactggttttgaaatttctttgttaaaatctctttctgtgtctgcataccacgaactgcaaaataacaatccctgacactatctttggcagttatctttttatagtatttttgatttaataatagaccccagtcttctgcatcttctctgggaacatactttggattatatacataaccaagtgttccccacatataaccggctgtataatcccctacagactgcccttgatattttaactgatccaaagattttttaatataaggagatactcctttcgcataataattgttggcatctgaagtatcccaaaattcatcagaatattttaatattttattttcagccataagtttcatcgtcatatattcggatgggcagatcaggtcataagtgtcaccgatcgtcaactgattatacatatcttcatttgttccaaaagttgaatattcaactttcacttttttatgatatgttttttcataccagttttcaaaatctttgatcatcgaatttctcccgatgatctttttcccattctctaattcgatttcttcatcatcgtcccagtcaccttcatccagatattcttcccagtttgcaattcttaagataatctcatcgttttttgaactcttttgtgtactacaggaacataaagccaggggaagcgtgattacaagtaaaattgaaaaaatgatagaaaatactttatatttcatgatcattctccttcctgcctgtatggttcataccgatcacaacaaagatcacgatcaaaaagatgatggttgatagtgcccatagagctgttttaacatcagtctgtgctccttttgtggcattaacaacatacgtgctgatcgtgtcaaacattgatggctttgtataagttgtgataaaataatcatctaatgttaatgtgatcgacatcataaatccagaaacgattccggaagttaactgtggtaatacagcctttcttaaggctccaaatggggagcacccaaggtctagagcagcttcatataactgagaatccatctgctttaggcgagggatcacagatagatatacaaacgggctgcaaagggatacaagcccgatcacaagcggaatataacttgctttatccatcttaaaaaatacgatcaataacacacagatagaaaaaccagttacaacatctgcatttacaactggaatctgattcatcagatggatcggtctctttagtttctttgaagaataaaaagcaccgatcgcaccaagagttccaaggattgttgaaataactgcaacgaccacagctaagatgagtgttccaaagatcatggatctaaggtcttctgaatgaaacagatagacataattcttcactgtaaaacttccagatctgccaatgatcgcagaatccataaaactgtagacagctaagagtaagattggcagatacatcagcaacagaaccattccaaggaaaacactttgtattgtttttttattcatatgcattgtcctccttgtctgaaaattctcctgtgatcgtacttaataataagattaagatcaagaggatcatggaaataacagatccattgttccagtcatacatgctgaaatagcttccaacaagacttcccataatatatgtgctgttatacatcatatcaagcacaacgtaattcgtcatagatggaagaaataccatcgtgatcccactgatgattccaggaatagacaatggtaggatcactcgtaaaaatacgcggtaagactttgcaccaaggtcttttgctgcttcaatataactatgatcgatcttcgcgatcgtattatagattggcaggatcataaatgggagaaaatcataagtcataccgatcacggtatttaggaatggatgaaatgcaagatttccttcgatcaatgttaagatttcttttaatgccgtgatacgcaaagtgaagttgatccacataggcattacaaataacattaataaaacattccctcgccggaattctccctttgcaagaagatacgcaactggatatgcgatcaaaaggcagacgatcgttgtcacaacagcaaccatcacactgtagattaaagttccgattgctttactgtctgtaaaaaacaatgtaaaattcgcaagagaaaactcacccgctccattggtaaatgcataatacagcaagatcaatactggacagacgacaaaaatgactagaaatagaaaatacggaatgcccagaatgctttttagtctatcatttttcattctgcatcctccgaaacactctcaaataccatggcatcttctggaactaccacactgacaaagtcaccgatattccataaatcttcatcatcaaccgaatattctactttattctcacttaaaactcgataattataatgatctcctttgtaaatgatcgagatgatatttccctgaaaatatccttcttccggatcatcacttaattttgcaagttttgatggaaaatacatttttaatcttgtaccttcaggatgtgcttttggctctttttccttcacaggaatacgaccatctgtaagttctaaccaaccatctttgtctattataccaatataatggttgactttgagatcctttggcatcgtatggatcgtatctgcagtaaaatcaaccccaacttttgttcctggtgttaactcgtgcaagatatgtgcttcaatttcatttttgtctgataaaacagccacttcataaaatttaccgcagaacagacatgagattacttctccagtaaattttcctttgtctggagttgttaaaacaacatcttctgggcggatgacaacatctagtcttgttccaggttcatggtcatcatgacatacaaaatcatgatgtgcaaaatggatcagatttccttcttttttcataccatcaaaaatattactttccccgataaaatcagcaacaaaggcattctgtggtttattataaatctcttctggtgttccaacctgctgaatctggccttttgacataacaacaatcttatcagacatcatcaatgcttcttcctgatcatgtgtgacaaagataaaggtgattcctaattccttatgcatattttttaactcgatctgcatctcctgacgcatcttataatcaagggcacttaacggctcatctaataataagatcctcggctcgtttacgatcgcacgtgcgatcgcaatacgttgctgctgtccgccagataaactgtcaatctttcttttctcaaatccttctaagtctacgatttcaagcacacgctttaccttttttttaatctcattcttcggtactttcttttcttttagtccaaaagaaatattatcgtagatatttaaatgtggaaacaatgcatatttttggaatacagtattaaactttctctcatttggaggaagctcactgatatcctttccattaaataagatttctccactcgttggtgtttcaaagcctgctaacattcttaagatggttgtctttccgcatccggaaggccctaaaaatgtaacaaactctccttcatttatcgtcagattaaaatcataaataaccggtacatctttcgtataacactttttgatgtgttttaattctatgatcggttgttttttctccattaattttttataccgttactgaaaacttataaaaagttataaacctttatgtttcattcctacttcaacgagtatgcttt

SEQ ID NO: 616 - DNA, 56573 bp, Unknown
  gut microbiota DNA sequence
atcccaagtcctatgacaacacaaagtatcacactgatgatcgtaatgatcactccagctacaccaaatactgtaaatggcattttactttggacacctagtccccaatacgcaagtatgattccgatagaagatagaataatgagattgcgaatccattttttgaggttattgagcatttgtgtctgaaattcaatttcttttaactgctgtgctcttgtttgtgttgtcataatatacttcctttcttagtattttaatcctgggttaaagaatccgatcataactccgataaatgctacaactactaagattaacattgtaacaactggagatacttttttctttgacattaaccaccaacagaagattacaaaagctgctgttaagaatcctggatatactccgtctaactgattctgaagatttaagaattcttttcctgcactgtttacaagatggaatgatgtttttactgatacccatgttgctgctacagatccaacaaccattgttcctaacataacgattgcttcacggatcgcggttgcttgctcaccaaccaggatatctacggcttttccacccagttcatatcctttgaagtataagaacttcattccaaatgccatgatcaagttccatgctacgatatagaagatcggtcctacgacagatccacctgttgataatcccagtgcgataccaagtaagataggaattaatgtacctacaactaaggaatcaccaatacctgctaaaggtcccataagaccggcacggataccattgatcgcttctgcatcgatatcttcatttccatttgcttttgcttcctcaagaccagctgtgatacctacgatgatagatccaacctgtggttctgtattaaagaaagctgtgtatgtattcattgcttctttctgttcttcttttgtatcatataactcttctaccaatggaagcattgcacacagataaccaaatgtctgcatatgttcctgagagaaacatgttaagtttccataagcccagttacggaatgatttatttaacgctttttttgatagttttttctctgccatattaaatatcctcctcgtcatcatcgtcaaaggaaccgccagaagctaaggctgcttcttttgctctgattcctaccattttaatgttgtagtaaataattgcgaacattgctgctacaactgttactgatacaaggtttaatcccatacttgctgctaatgtaaatccgaagaagaatggtataaagtcaactgcttttgttactacctgttttaataagatcgcaatacctacgcaaggaagtaagctacctactgtaaacagtgttttcattgcaattccatccattggtaatgttgttttgatcgcttctacaactggaactcctaatttacacattacaactgctggtaagaaactgcagatgatatgagaaatccatggaagaaccatatctacaacgtataatctcttgaattcacctttttcaacggcctgccatccaatgtgctgccatacaaggttgatcgttgctgttccatagaataatactgtaccgattgttcctaccattgctccaaatgatgttgccatggagataccttttgctgatgcaggatctaatccgtatgaatttaatgctaacattgccagtggaataccgatataagatacggcacgaacgtctgctgatacagttcctcctggtgtaaccaatgcgatatatacaacctgcattgccgcaccgactaaaacacctgcctgaatatctccaagtacgataccacagacaagacctgcaactaatggtcttcctaatgtgtagttaccaatggttgtacctcccataccaggcatactggataagcaggcaaaaatacctaaaatgattgcttgtaaccaactaattgtcataatagtttctcctctctattggttttttagttaaatccaaactgacctctgaatttgtcccatgttccgatggacgcttctttgatcagtgcaaattcgatttcataaccagctttgctgattgcttctaaagcttctgcttcttcctgtgtaatagattggttattaccaagtttgacagcttctggtctgtcattacatggtcctacgattactttctttacatcacttggaacaaatccatcatccactaagatcttcttcatctggattggatcttttgtgatcaggaagtaattgtctttgctgtctaatactttctggtttttctttttccatgcttcatatgtccaaacaaatgttttctttgtgctggcactcttgtatgccatcttaagtgcatctgttgttgctgctttgtcgttcactgcgatcagcccatcgcatggatactctagtgaccaacgtgttactgtttgaccatggatcatacggtcatcaattcttaaaaatgaaactgacatatttttttcctccttaaaatttaaatatcgtcttcttcatcatcgtttgctggtgtcataacaaattctttaactgcatcttttgcctcattgatcaagctgtcttttagcatgtctgtgtctacgccgtctttcattaatgttgctgtcaatgccattgccaggttcattccaccaaagatcactgtctgaccgatcagtcctttgtttgatacctgttcaattgcatttgtaagaggtgatccacccacaatgtcaccaagaagaatgatctcatcgtcttctgtgatcttgctgatcgcattgctaaatttctctgcaaattcatcagcactcattccgtcctctaatccgacgctgatcacgtcttctctttctccaccagctaacatcttaagtacactgtgaagtcctggtgcaaatgttccgtggctgactaatactacgtatttcatcctcttctcctttcttttttcctatctcttatttacaagcttattctaccaatcacgcaaaaaaaggacatctgtaaattgtcatgactttcaatttacaaatgtccctttttatgtgacaaatgtcatatttatgttttgtttgttttgatcttcttattattactgatttaaaagcttatcaatctcctgttttagtttcaagatattcgtgtcaaattcctcttcatctgtaagaatccttgtcatctcactgtcaatcttttggtaggcttcattgtatcttcggaattttggaatctgcaaggcattgttcatgagttcatctaacaatttcattttatctgtcatattctcacccatgcttttttctaatacctgctgtgcttgttttgaattcgtcacagcttttaatggtgagattccctgacgatactgaaagatcttttgctgtgtctttgtttcataacataatttctttaaaaactgccatgccatatctccttgcttggtctgattgctgattcccatcagcagattatctacctgtgtcttattctctccatctggtccggaagggagtctgatacaatcccatttgaaatcaaagtatttattgatcttccatggatatggtttatacgttctaaattctgaaaatgtcataggacgaaatgcaatatttccagaatcaaaatcatcagatgtcagatttcgaaaagatgatattttttcaatcttctttgtaaagaggattgcattttcaattggtttggatgacaagttgcattttgttccactttgattaaacaatgttccgccattgctcagagttgcatcattccatttataattatatacaccaaattggtctaaacggccatctccatcggtatctttggttactttttgacagatctcataaaaatcatcccaagtccagtgattccctggcattttgatatgctctttttttagtagtgtcttattgactagcatcaaagttggtacactttcatatggaagagcatattgcgttcccttataggttccagcatcataacttccttcataatagttgctttttttgaacgctttatcaatctttgtataggagtctaagttctttaacattcctacggatgaaaatgtgctaaaatcttctggcaagaccataaaaacatctggcagatctccttttagtgccttttgtgacagccattctgaataatcatctttcatcacaccactttcgtatttgatcgtgacattcggatattctttttcaaattctttgattacttgatcgatcatctgatagcaattatcatctggaacatcccacttgtttcctgcgaacattccaaaggttaaaacaattttttgttgtttgggatagatcacaaaaccaacagataataaacttatgaccaatccaacagcaatgattcgtttccaccatttttctagtttctgtctcatctatcttctcccgtatttggctgaacctgactgtacttcccagattgcaagctgggttctgtctcttaggtctagtttacttaagatcgtgctgagataatttcgtacagttccttcggaaaggcttagttccgtcgagatttctttatttgacatgcctcttccgactaatttaatgatctcccattctgcatctgtgatctcttctacattctgtgcatgaattgatgtatcataattgctttgtgccatttcagagaagaaatcgaccacctttgttgccacttctggattgatcatggccccgccgctatgtactgtattgatcgctttttctaattcatccatagaaattccttttaacagataaccacttgctccatgttttaatgcattgtatacatactcatcatcatcgaacgttgtcaaaataatgatcttgacatctggatattgttctttgatgatctgtgtacattgcactccatccatttctggcatacgcacatccattaaaataacatctggcttgtctttcctgacttcctgaatgacttctcttccgtccttggcagttgcagtaacttcgattccttctttcatctcaagtacgatctgtaaactttgtctgatcagttcctgatcatctgctatcattactttaatcatagtttttcaccccatctgatcggtattcttgctgtgactttaaatccattacttccatcatattctacagttccttttaacatcttgatcctctcttcgatatggatcaatccaaatcctgtatgaatctcttcacatccgattccattgtctttgatctctagattgagccacttatcttccttccataagtttacatcaatctgcttcgcttttccatgcctgatcgcatttgtaatactttcctgtactacacgatagatcatatcttcttcatcttgattgaatttcaagacctctacctgacaatcataattaatcttaacatctgatacctgcatcgtctcattgatcatcttttctaaagcttcttgcaatccactatgctctaaggcatctggtcttaatttattgaccgatcttcgaatatctttaattccttgccttgcaacctgtgatattttatttaactgttctttcgttgcatctacagaaaaatcgatcatcgcgatacatgcgtcaattcctgcagacagtccagtcatcgtatgccccagtgtgtcatgaatctctctggcaattcgatttcgttcccttgtctccgccattttctctgtcatctctgaatagtccttcagctgttcattcatttcttttaaacgtatattggctgtctgaagctgaaggtttaacaatccaatccttgcattctctttcatctgatttctcatcaaaatgatcatgtatgcaataaatgcgatcgcattcaatgcaactagtatatttcttgttccttggatcatcatactgactttcgccgggtatacactcaaaaattgttggaacgatatcatatctataaacattgatatgatatcgtagtctgagaataaatatatcattcccatgatgacaaagaaaattcccctagtgtgtttatctttgatatccgttacaatatctgcaatgacaagaagaatgattccattataatttacataaacaaatttaataatgatcagacataacaaaatctctgctgcatataagatcacagatacctgttgcctttttctttgttttcttcgaatttctataatgcctaacaataagaaaaaagcaataaatatcaacactgttgatgtcactggttcgtttgggagatatgtgatattctctaagaaattccttgctccaaaatcacaattgatcttatttaatgttaaaataaaaactgcagaaaggaaagataaaatgatgaaatttatgactcccatcagaatcttgatataatataaattttgattttttcgatccatatcatttcctctttactgccaacggctaatatcagtctgctctacattcttttttgttatcatttgaacagagattacctttttcttctctactttctccccttgcagaatctggtatgccgcattgaccgctgtgtctgccatctgtttgggagattgtgccgctgttcctgtcatcataccttctttgatcagctttttcccttctggcgaaccatcgattccgtatacaagaaccccttctcttgcacccttgctgtcaagagccgccaaagctcccatcgccgctgggtcatttaatcccatgacaatatctatgttctggtattcttcgataatcttatctaccttaggaagtgcacgttcaatctgtccttgggtatctgcagatgcaaggatcttatagtttttattgttcttgatcgtatctaaaaatccattgatacgatctaccgcagattttgctgcattatgtgttaacaagatgatattcgcctgatctttttgcttcatcatttccttggcacataaaacgcctgccttgtagttgtctgacacgatcgtcattgcgacgagatcatttctgtaaacctgtgagtcgataacgatcacaggaatcttcgctttctttgctgctacaagtcctggttctactgctttccagtctactggatttagaaaaatcgcatctacttttcgtttgaccaactgtttaatctgttcattctgcttcttctgatcgagtgctggatctaatgtgatcatctggttcccattcttctcaacctgcatccgaatctggttattaactatcttatagaattcattattcatcgtcatataagttgcaccgaataatttttttcttgtgttatactttttcaaatagtttgaaaatacacagacataaattccaataaaaaaagcaaaaactgtgattcctgctaaagcgacaatcctattggttagatttttttttgattgttggttcatattcgtttactcctcagttaacataaaatcatcgctgctcattaagtgtccgctatgtgcgaatcgagcgagagcgcgtttccagatagcttttatttctctacaaccaagccgttggactagcatcactaggcattcgtagatctccacgaggtgataccgccacactacctaccttaggtccgtctggcagacatgaacgtttaaactgctggctgaagaatctccagtaaaatttatccagccatttcttgatcgtttcatcatcatatacaccgtcaaatgttaattttgccatgcggtatagtttagcttttgggaatccaaatcgtaacatataatataagaagaaatcgtgcagttcgtatggtccgactaagtcttctgtcttctgtgagatgactccatcaactggtggcaataattctgggctgactggtgtgtctaggacatccatcagtacttctgataatttcttattctctgttgtctctgcatagtaaagtacaaggtaacgaactaatgtctttggtacggagcagtttactgcatacatagacatatgatccccgttgtatgttgcccatccgagtgccagttctgacatatctcctgttccgatgaccataccattgtactggtttgccatgtccatcagaatctgggttctttctcttgcctgagagttttcgtaagttacatcatggttattttcatcatgtccgatatctgcaaaatgctggcggactgctttttcgattcttacttctttgagtgtcgctcctaattctttgatcagggatacggcattctggtaagttctgtctgttgttccaaaacatggcattgtcacacagatcaggttttctcttggaatgtctaacagatcaaaggctcttgctgtaactaagactgctaatgtggaatccaatccaccggagattcctacgactgcgtgtttacagtttgtgtgctccagacgtttcttaagtcccatagactgtaaagataagatttcatcgcatcgtttatctctttcatcttgattatctggtacaaatggtgctttcgggaatgttcttgtgatcttgttttctttgacttctagtgaaaattcctgttcaaaataatcatctgtttggcctcctgggaaagaagtcatctttcttcgttctgctgccaatttctgcacatcgatatctgcatagataatctcatttgtaaatcgttttgcttctgctaaaactgaaccattttcacagatgagatggtgtccactgtatacaacatcctgtgtggattctccttctcctgcatcagcatagatataagccgctaacaatcttgctgactgatttgatacaaggcttcttcgataagattcttttgttgttgtctctacacttgcagatggattacagatcaccgttgctcctgccattgcgtgatatgtgcttggtggaagtggtacccagagatcttcacagatttcacatgctaccacaagttctggaatctctttgcatttgaataactgattcacggctacatttacataaccaaattcttctccaaaccaaagatcttcttctaatccttctccagatgtaaaatgacgtaattcataaaattctgaatagtttggtaaatgtgtttttggcacgattcctaaaatactgccatcactgatcacaaccgcacagttatataatttttgttttataacgatcggacatcctacaacaactaacatactcttattttcagttgctttcacaattcttaaaagctgatttttacattctgttaaaagtggctgctgcaagaataaatcaccacatgtatatccactgatcgttaattcagaaaataccagaatacttgctccttttttctctgtctcatcgatgatctttagaatctcttctgtattgtatgcaggatctgcgactttgatcttaggtgttgctgctgcaactttgataaatccatctttcattttgtttttcctcaataatcttaaataatctgatagggtcagtcttacgaaatagactgaccctgtatgctttcttattcttcttccatattacttaatttagctgcctgatctgcggctgttaagctgtcgatcagctcatccagatctccattcatgatggaatctaatttgtgaagtgtcagtttgattctatggtctgtgacacgtccctgtggatagttgtatgttctgatcttttcagaacggtctcccgttccgatctggctctttctcttcgctgcttcttcatcgtgtgctttctgctgctctaattcatacagacgggaacgtaatacttttaatgctttatccttattctttaactgggatttctcatcctgacaggatacaacgattcctgttgggatatgtgttaaacgtaccgcagagtctgttgtattgacacactgtccaccatttcctgatgcacggaatacatcaaatttacaatcattcatatcgatctcaacttccacatcttcaacttctggcatgatcgctactgtaattgtagatgtatggattcttccaccggactctgttgccgggattctctgtacacggtgtacaccgctctcgtacttgaatcttgagtatgcaccctgtccggataccatgaatacaagctccttaaatccaccgatcccactttcgttaaaacttaatgtatttactttccaacgtttgctttctgcataacttctgtacatacgggcaacgtcagctacgaatagtccagcttcatctccaccagcaccggcacgcatctcaacaatgatgttcttatcatccattggatcttttggaattaagaggatctttaactcttcttctaatctttctacatttgccttggattcattcagttcttccttggcaagttctttcatctcttcgtctgtttcttcttctaaaagcattaagctgtcttcgatattctgcttctgcgctttgtattctttgtatttttccacaatcggtgtcagatcattctgttctttcatcagatcacggaaacgattctggttacttgctacatctggatcgtttaattcctgtaatacagtgtccaggcgatctactaaaccttctaacttatcaaacatcttattctccttctcttgcaaatccaaagaccagccggtctaatcctgccaagtctttttttatctcaacacagtcaaaatcctgtgcttccatcaaattcttcactgcttctccttgatcatatccgatctcgaatgcaagcattccatctgggtttaagtaatttttcgcttctttgatgatcttcttataaaaataaagtccatcttctttcccgtcaagtgctaacatcggttcatggtctttcacttccggcattaactttccacattcttctgttgtaatatatggtggattggaaatgatcagatcatagcttcctgtgacattctcaaaaaggtcactttgaataaattttaccataggtgcgagattttcgccattagcttttgcgatttttaatgctttttcactgatatctgtcccaatacatacttctggatttaaaatcaatgccagactgatcgcaatacagccagatcctgtacagatatccagtatcgtatctggtttctttgactgttttaactgatcaagcacttcttccaatactgtttctgtatctgctcttgggatcagtacatctggtgttaccttaaatgtatatcccataaattcctgtgttcctaaaatatattgcagtggaacatgttcttttctcttctgaatcagttccttatatctttcttccgcttctttatcattgatctcatcggtaatcccaaacaggtagtcttcccttgatatatgaaaacattcggaaaacaaataccatgcatcaccggatgcattctcaatctgtacttcttctaattccttttgtccatagaggacccattctcttctattcatcttctttttgttcccctttatgaagattttctaaatattctctccaatcgaagacaccttccaccgatgcgatcgcaacttcgatcatggagtgatctggttctttcgttgtcagtctctgaagtgccagtcctggttttgaaaatatctgaacaagcgggtggtcactgcttcctgccagccggataaattcataggaaacaccagctaccaatggtaaaaataataatcttaatacgattcgtaaccagatggtatccactctgataaagaagaaaaataccatactgatgatcataacgataaaaataaaacttgttccacatcttttgtgtaatcttgaaaagttatccacattttcaggagttaaaggaacacctgcttctaaacagttgatcgttttatgttctgcaccatgatacatgaagactctcttgatgtcttccattcttgagatcaacacaatgtatccaagaaatatcgctattcggataataccttccataaataaaatcacatattcattcctgatcagctttccgagtgcttcggatgcgatgtatggaaggatcataaataatccgatggaaattgccagtgaaaataccagtacgattcccatgatgatcttctctgctttctctccaagaatcttttctaagagctgttctgtcctgctctctgtttgttcttcttcgtcttcgtaaaaagatgcagaataattcagtgtcttcatcccgatcaccatagattccaggaaatttgccattcctcgaaaaactggtaattgaaataatggatgtttctctgcgaagcttacgcattcttctactttcgtctctatcttgccattgggctttcgcacggatactgcataacgatccatattcttcatcattacgccttcgatcactgcctgcccgcctatacgaaccgccattgttgtctcctatatttctatgagatttttctcgttacattgaatttctcgttacataaaaaaaaggttgagatttcgataacctcaacctgatttcttacttttctacttaacaccatatttacgattgaacttatcaatacgtccacgagcctgagtagctttctgctgtcctgtgtagaatgaatgacattttgagcagatttctacgtggatatcttcctttgtagatcctgttacgaattcgttaccacagttgcatactacttttgcctgataataatttggatggattccttcacgcatgttctttcacctcttctaaaaaatttgttggattttgccaacatttacatactttgactttcgtcatttcttgttttataaacagcttttttattctatcacaatttatttgaaattgcaatcactttttttattttcttaataatgatcgtttggttagtgctacaaattctttgttgttttgggttcgtttaaataaatctaacatctgttccataaattcttccgaacggtttccggataattctttgtgaagtgctgtgacaacttctctttcatctttggtaagcagcagctcttctcttcttgttcctgatttggcaatatcaaccgctgggaagattcttttttctgccagacgacggtttaagactaattccatattacctgttcccttgaattcttcaaagatcacgtcgtccatcttgcttcctgtctctacgagtgctgtggcaaggatggtaagacttccgccttctctcatatttctggctgcgccgaaaaatttcttcggcatatagagagcggctggatcaagtccaccagttaatgttcttccgcttggcggtactgtaaggttgtaagctcttgcaagtcttgtgatactatctaataaaattacgacatcttctttatgttctacgagacgttttgcacgttctaataccatctctgacactctcttgtggtgttctggtaattcatcaaatgtggaataaataacttcaacgttctttccttcgatagattctttaaaatctgtgacctcttctggtcgttcatcgatcaataatacgattaatttgatatctttataattctggctgatactttgtgccatttgttttaacagtgttgtctttcctgtctttggaggcgatacgatcattcctcgctgcccttttccaacgggtgatagcaggtcaaccattcgcattggtatggatgatctctctgtttccattcctaatctttcgttagggaagattggtgtcagatcttcaaaatgctgtcttctcgctgccatttctggcttatatccattgacagattctacgaataataaggcactgaatttctcactctgggttttgatacggatcgctcctgttaagatgtctcctgtttttaaattgaatttgcggatctgagccggagatacatagatatcattctcccctggaagatagttttcacatcggatgaaaccatacccgtctggcataacttccagaatcccatgtgctttttctccgctgtccagactctttatattctttggaaattctttctgatgatgttttctttcttgatgctctgaataagattgttttggttcacgttgtatctgcggttcttccttttgttttgattgttcctgatcatagttttctaatacttcgatcagttcttgtttctttaaggtcgaaatgccttttatttttctttctttggcaatttcacgtaattcaattaccgactttttttcatatgtcattctatcttactccttttacctgggaaaatggatgaattatcctttaacgatcgatccagatttgtgttttctttattctagcatagtttttcagatatttccaatcatttgtcttcttagtttttttaagatctttttttgtattcttgaaacctgtacctgtgaaatatgaaagatcttcgcaatttcttgttgagtttttccttcaaaatatcggtaatagatcatttgctgttctttctgttccaaatgtttcatggcttcctttaacagaacatgatctaccactttctcagattcattttctccttttgataacttatccagcagagaaatctcactgccatccttctgatatgcactctgatgaatggattctacttcattgcttgcctctaaggatgttacgatctcttctcttgtgatcttcgtgatttcactgatttcttcgatcgttgcttccctttgatactgctggcaaaacttttctcttgctttcatgatcttgtatacattttcttttaaagatctgctaactttgatcataccatcatctcttaggaatctacgaatctctcctgtgatcatcggtactgcataagtcgaaaatttcacgtcataagacaggtcaaacttgtccacggctttcataagtccaatacttccaatctgaaacagatcctcagactcatatcctctgtttgtaaatcgtctcacaacactccagattaatccaacattattaagaatgatctgctctcgtgctgcttcgtttccttctttggtaagccgtaacagttccctcgtcttatccattcagcttgtcttgatctcctattttctttgtcatgatcactgtcgttccttctccttgttttgaaataacctctacttgatccataaatgcttccataaaagaaaatcccattccagtcctttcttcttctggttttgttgtaaacatcggttccatcgctttcttgacatctggaattccgataccctgatctttaatctctattcgcaggattccattctgatcggaaagatccatactgatctttccatctgggtcgtgatacgcatgtacaatacagtttgtcactgcttctgacactgcggtcttgatatcatccatttcttccatatccggatcaaatttcatgatataagcagccgtcacaattcttgcgattccttcattttctgagtcactgttaaattctaaatgcaacatttcttatcctcccatttctctatatttcttctatcagttgatgcaatcctgccatatgaatgatctttcttactgatgcactcatattgctgactttcaccgttcctcccatcgcctgtacctgacgatatcttcctaagatcactccaatccctgaactatcgataaatcctgaatttttaaaatcaaactcaatatctttgatcggatatgattttaaaatgatatcgcatttatgttttactttcttcgctaagtgatgatctagatcaccatccagataaatatataaaaccctgttttctatcttgtattctgttgccatattctgattgctccttcctgctctttgctgtgatacgttcctttccaagatcatcttgaatttcctgatagaaaataaaaaagaaagaagttcaaactttcgcttgttcttcttcctttatcttttgtttgtaaacttgtattctgtgtaatattaattataaacttttggcactctttttacccattgcatcaattcgactcttcgcattgatcgcctgagatgttcctgggaacttttcgatgatcgtctgatatgtcttcttcgcattcttctgatcggaagcaccttcataagctttggcaaggtaatcatatgcataacggtttgtatcgctgactttgatcgctttctttaaataagagatcgctgtcttgtagtcttttgcccagtatgcattctttcctttgctatataatccagttcctgcacttggatatacctttgctgtcagatctttgtaaatcgctttcatattctttgttgttagtttcttactgtcgatatctaataacgcatctgcagatcctgtataatcacgatcgctgtatttctgtaaggcacttaacagcagatcatagacaccgtctttcttgcttgttccaatgtactcgtctaattcatcttctgctttcttctgtgctgcctttgcttctttaactttcttctcgcttgctttcaattgtgtgtctttggcaaggatctgttctttataatcttctacctgtgtagagttcttatgactgaagcttgcacgtactgttggatagatcaaaactgctgccacgatcacaccgatcacaattcctgttaccatgtaaaacatcgggctctttccagcttcgttttcctgaattgaagaaatattaaatggattcttctttttctttggttcttctggctggctcacaacttttttcttctcttttttcttcttgtctttcttctctggctcagttgtctgtggctcttcttcgactacttttgtctcaaattctttgccatattccactgctgattcgttgtttggatcgatctttaagatcgtatcaaggaatgttcttgcattatcataattctctcccttgatggataataatgccattaaaagatatgcatctacaaaattaggaatagctgccacaacattctttaactgtaacatcgcaaggtcatcattcccttgcttagcgtagtttaatgcctgattatatttcttgatcatctggttggctttatataattctgtcttattcttcttgatctcttctaattctttcccatatatattctcttccgcttcttccaaatctgcacatggttgaaacttggctaattcttcgttaaagtctaacattctcttcctcctgatttataaactctttggccatgcctgccagataaaaagatccgacaacaaagcataccgttgtttcctgattcctgtctatcatcttacgaaaagcatcctgaaattctgcttcatcgattcttctcttatgaatccccactgtataaaaggcttcaatctctggaatcgtcttcagaatgttcttcatgtattcttcttcattctgatgagatgctgcaaataagatccgcttcttcattccatggtagtttgcctccacagtctgtacaaatccttgcattccttggatattgtgcgatacatccacaatgatccctggtgcgatctcttccatccttccgctgatcctgatctggctcagtgcttcatagatcttatcttcatcgagtcgtccacagataagttctgctgtctgcaatgctgctgcaagattggacttctgaaattctcctgcaatgttggtccgcacatctctttccttatcatacgcattggcatttaaaaaatcaatatattttcctgctttttctttaaaattaagattatcttcagaaatgtcataaattcgtgattttttctgccttgcttcttcagaaaggatttcttttaccttgggttcctgttctattgtcacaactggaattcctggcttaatgatccctgctttgtgtgttgcgatctcttccaatgtttgtcccagaaattccatatgatcttcgctgatcgaagtaatcacactgaccttcggacagataacattggtagcatcatatcttccacccattcctgtctcgatcatacagatatctggttgttcttcctgaaagatcaccatcgccatcagaaatactgcctcaaaaaatgatgggctgttctttccttctgttattccagtttcaatggcatgtcttaccttcaccgcagctgatgcaaatcgttcatcactgatctctttcgcacacagcttgattcgttcattgatcttcacaacatgtggcgaggtaaaggaagctgtcttctttccatgctgggtaaggagtgcttctaaaaatgcacagacggatccttttccattcgtccctgctacatggatcatatgcagctctttttgaggatttcccaatcgttctaaaaagtattttatatcttcgagagaagattttgtggcgaatcctgcgattttgtataaatattttacagactcttcataagtcatggtcatttcttctgttagcataattcaccactcagtactgctttcaatacctgaagtaccccatcttctttgtaagatggtgctacaaaattcgctgcttcttttacttcatctctggcattctccactgcaaaactgtgacttgcacgttttaacatctcgatatcatttaaattatctccaaatgccagtgtttcatctggtgtgattccgtattcttcctgaaaatgtcttaaggcacttcctttgttcgcacctttgttggcgcaatcaacccagcattttccggatactacaacattcatcttcttgccccatcgtttgatgaactcatccccaactacatcttcggcgcaattgtgatgaaaaatactcatcttacatacaccttctggattccctaaaacatcatctacaagatcacctctgtagccatagtctccgaccagatgctggtaaatcccgatattctccatatatgtcatgttatctttattgatcgcaatctcacatcctgggaactgtcttgcttcttcaatataagttcttacgatttctgggtcgatcacatctacatattgataatctttggaatgaatacaagttccattttctgaaataaaactgatgtcatcaagtactggcgtgaatactttctcgatacttgctctctgacggccgcttgccgctaacacgatcgttcctcttcgtttcagttctttgatcacgtcataatattccggattcagatccagtgtcccatctgccactaatgttccatcaatgtctgttgcgattagtttgatcatttgttttcctttcttttctccatctacatgctgtatcattatttcaaaaaggctgccatactttgtacagcaacctttgttttatttgtctttttccagatcgtatggtgtcacctgatatacataataattcagccagttataatacatagcatttgcatgacatctccatgacttcactggtttcttcgttggatcatcatctttgtaataattctttggtatatctggattcagtcctcgtttcacatcccttacatattcataatgcagtgacatcacatcatattctggatgtcctgtgacaaatacctgacttcctgtggaattcaaaataatgtatggtcctgtctcatctgattctgctacgatcgttaattctttattcttgcggatggcttctccgtcaactcctgtatttctagagtgtggcacgtagaacttatcatcaaatcctcgaataataggaagtttattatgtaatggatggtgttcataaacacctgaaatcttcttattcaagatatgtttcttgatcccatagtgataataaagtcctgcttgtgctgcccagcagatatacaaagttgatgtgacatgtgttttggaccattccatgatctcaacaacttcatcccagtaatcaacctcttcaaattcttttaattctactggtgctcctgtaatgatcagtccgtcaaaacgtttgtctttgatctctgagaaataattataaaatttctccatgtgtgactctgatacatgagtcggaacataagattctgtctgtaaaaatgtaatatctaactgtaatggtgtatttgataaacttctcagcaaatgaagttctgtgtctaatttgtttggcatcagatttaaaattgcaatctttaaaggcctgatatcctgtgtacatgccctttctttatccatcacaaatacattttcttcttctaaggctgccttcgccggcagatcgttgtctattcgaattggcattttatcaaatctccttctctttttttcgattgctttttaagctgacagcatttttcctgtcagatatttattataaaactcttacattttttatgcaatctatatttattatcgtccgatcagattaaggaaatcttcttcgctcagtattggaatgtttaattccatcgctttcttattctttgatgactgcgacattttgtcattgttgatcagatagtctgttttctttgacactgatcctgtgaccttgcctcccatctgctcaatctcttcctttagttgttttctattatcaaaatgatcaagtgatcctgtcacaacaaatgtttttccttctaagatctgttctgtcttactttcttctttcttctcaaactgcacatattgtaacagttgttctaagatcttctgattatgtggtgtatgaaaatatgataccatagcttctgcgatcatcggtccaatctgatcgatcgcaataaaatcctctgcatcggcttctctgatcgcattgaaatcttctttaaaatgtttgcagatcaattttgcattggaaagtcctacattcggaattcccagactataaataaagtttgccaatgcaggctgtttggaatcattgatcgcattgatcagattttggtaggatttttccccaaatccttctaattccagaatctcttctttgtgatcttttaaagtgaagatgtcataaatttcatttaatagtccaacatcgatcatcttctgtaatgttgcttcggatagtccatcaacattcattgcatctcttgatacaaaatgcgagaatgatttgatcttctttgcactgcaaaattcattggtgcagactaaggttctgattccattttcatcttcgatctttgtctcaccaccgcatgcaggacaagtatgcggaatctctatattgccgctctttgttttattctctgcgagctgtggaatgatcatattagctttgtatacaacgatctcatcgccgattcctaactgcagttcttccatcacactaatgttgtggagactggctctgctgacagtcgttccttctaattctactggttcaaaaattgccactggattgatcaatccggttcttgatgggctccattcaatctcagttaatgttgtctccgctgtctcatctgcccatttaaatgcgatggaatctcttgggaatttggctgttcttccaagactttttccatatgcaagatcatcatagactaataccagtccatctgatggcagatcaaattgttcgatcttctgtgagaattcctcaatctcatctcggatcgtatcttctgtgactctgatatgttctaccacatcaaatccaagacttgctgcccagtctaatttcttctcgaaggaattatcaaaatccataccttcaacatcactgacactgaacgcatagaaatgaacgtggcgtttggctgtgatctcattgtttaactgtctgacggaaccactgcataagtttcttgggttcttatactgactgtcaacatcttcgatttcttcgttcatcttatagaaatctgaatatggaatgatcgcttctccacgaatgaccaatgttccctgatatgcaatgtgtcttggaacattttcaaaaacccttgcgttgtttgttacaacttctccgacttccccatttccacgggtcacggctttgatgagttctccatgctcataggtcagaacgatcgttaaaccatcgagtttccatgacaggattccttcctggccgttcagccatgttgccagctgatctggctcctttgtcttgtctaatgatagcatcggagatggatgtgcttccttttccaatgctgtcatcaattcataccctacatggatcgttgggctgtttgataaaacagtgttcgtctttttctctagttctaaaagttcatcatacatcttatcgtattcgaggttgctcataacttctttattctgctggtaataagctttccctgcttcatttagtgtatgaatgagttctttcattctgtctaaatcattcactttttagctccttctttaactctcgtaattcatccggagttaattttcgatatcttccttctttcagatcgccgagtttaatgttcataacacggactctcttaagttttgtcacacggtatccaaaatgttcacacattcttcggatctgccggtttaatccctgtgtcaagatgatcctgaactcgtttggtccttcttttataactttgcatcttcttgttactgcattaatctcatctaatggtactggattcctcatatcatgaatgaattcattcgtaattcgtttattcactgttacttcgtattctttttcatgataatttcttgctttcatgatctgattggctgcttcaccatcattggtaagcaggatcaatccttgagaatccttatctaatcgtcctacaggatagatccttgttggatagttaatatagtcgataatattatctttctcttctttgcttgctgtgcatacaattcctcttggcttatgaaaagccagaaagatcagatcttcctgaatctttaccggctttccatcaaatgtcacgctctgccccggaagtactttggttccgcttactgcaacttctccatcgacttcgactctgccttcctcgacataagtatctgcctgtcttctggagcagattcctgcttgacttaaatatttatttatacgcactgcatcttctgttttacgttttgtctcttgcattgttacctttcccacttgtcacaaagggcgatgatctgatcagcaaatttgcccaggtctttgttcgttccaccctcattgtgctcaattacagatttcaaacgctcgctggctgtaagaagtctgatataagcactgctctgttttggtttcttctggatgcgttctcttgatccccattcagtccattcgcctgcaataaggtcaaacacatctccgctgtatggtgctctggctttgaatttgtattcatcttttaagcatgatgtaaatgcttcacagaccgcatcttctccatgaactacaaatacttcttctggtttcttctcgaaactattgacccattttaataacccgttcttgtctgcatgtccgcttaaaccttctaattgtacgatatctgctgccactttgattgcctcaccaaacagttttacttctttggctccttcgatcagtgatcttcccagagttccatatgcctgatatcctacaaatatgatcgtattctctgatctccacaggttatgttttaaatggtgtctgattcgtccagcttcacacattccggatgctgaaatgatcaccatcggttctgtttcaaagttgatctcctttgattcttctgtcgtaatggataaatgaagattggaaaatgtgatcggattaattccttgtttcactaattccatagcttcctcatcatatgtttcatcgatattcatattaaagatcttcgttgcttccactgccaatggactgtctacaacaactttgaaatctccatgattcttgatcctatcttcagccttgatctgacggatataatataacagctcctgtgttcttccaactgcaaatgatggaatcacgacattcccgcctcggtcaaaggtcctctggatcacatcggtcaattctgtcacataatcctgatgttttccatgataacggtcaccatacgtagattccataataacataatctgcttctctcgtatagctcggatctttgatcaatggctggttaaagtttccgatatctccagagaataccagtttcttttccacatctgcttcccttaaccatacttcaatactggaagatcctaacagatgtccgatatctgtaaatttgatcgtaatgccgtcagcaacttcaatctgtctgccatatgggcatggcacgaaatactgcatgacattgatcgcatcatccatcgtatagatcggtacaacttctggttttccagatcgccttgctttcctgttcttccactccgcttcaaattcctgaatgtgtgcactgtcttgcaacatgatctcacatagatcggttgttgctcttgtcgcatagatctttcctctgaacccttttgcatacaacagcgggatcagtcctgaatgatcgatatgtgcatgtgtcagcaggataaaatcaagattccctgcattcactggaagatcaacattctcgtatacatttaacccttgttccattccatagtcaacaataaatcttttgccgcaagcttccacataatggcaacttccggtcacttcatgatccgctccgataaacattaacttcatggcttatacctcctctgaaatatagattgggccagccggcacgatatcttttagatactcatgctcttttaatatctgtcctgcatcgtagtcaaaaaacacctgtgtcagctcgtcgattgaaatttcatcttcccatccctgtgcatccgttgtgtgtatgtctaatgtctcatcttgtggtatgtctgcacgttgaatggatatcttatgattcagacattgaaactggaatactccattctgatccttgatatatggatctttcaccaatatcctgaatgtaaaatcgttctttccttgcaagatctctccccaagcagtaaggttcgtgatccttgccatgatctttggtacttttttgctttgtataaaatcctttcctattgaatttcccttgaataaatttccttctgtgatataaatcttcttacctttgtgtcgttgtttgatctggttaatcatatgttctggctctaaagaatacgcccatcggatatatacttcatcttcttcaaaactttctgcaaatacgccttgcaacagatcgtcttcataataagctaaaaggcttccatctccactctggctttctttttccagtcgtctcaggtatggttcatccggaactgtatatatcttgtattgttccataaaccgctctaaaaaattctggatcgtctgataatcttctgccattatatgaacgatcttatgatttctatccgttgtatcatctgtatatgaaatgttatgatcatcgatcattgtttcttcccagtccatcacaaatcgaaactggaatggttcataatatgctttattcgcaggcatcagatacgtaaatggctgttgctgctcatgcatatcattgaaacacttcttaagcatctctgccatgatgcctcttcttctatattccttccacaccgcaactgctacaatataatttaatgtatatgtcttctttcctgctcttatgtgatatggatttaaatggagcattcctaagatcttgttgtcttcttctgccagtatcacctgattcgttgcatatatctcttcaaaataatattgtgcaaacggctctggatcttcaaaaatcttctgatacatgtcatatactggctgtttgtctttgtttttctgataaatgatctccatgctatttcctttattcttattttgtttcattcagcagacacactgcctgtgcactgatcccgagtccctctcctgtgaatcctaaatgttcttctgtcgttgctttgacattcacctgatctggatctactttgagggtcttactgatattttctttcattgttggaatataatttaataactttggtctctgtgcaatgactgtcgcatccacattcccaatctcgtatcctttttcctcgatcaatcttacaacttctgctaacaacttcatgctgtctgcattatgatatgcagggtctgtgtctggaaaatgctttccgatatctcctaatgctgctgccccaaggatcgcatctgtgatcgcatgcagcagaacatcagcatctgagtgtcctaataatcctttctcatatggtatatttactccgcctaagatcaagtctcttccttctactaactgatggacatcatatcccattcctacacgcatattcttgctctcctttttttgtttttattataacatgatttcactcttttatcatgatttttagcaagaaagaatcctactttgtaggattctccgccgcagtgcgatcctgcccagagggattttttatttcataggggatttcatcgaaatttcctatgaaataaaaaaaagacatattcatatcgaatatgtcttccgaaagtagcgatgagcagattcgaactgctgacactacgggtatgaaccgtatgctctagccaactgagctacatcgccatatgttatgaaattcatccatgtagttcatggatagtgggaccaataggactcgaacctatgaccctctgcttgtaaggcagatgctctcccagctgagctatgatcccttgtgtctctcaagctctcttgcctgacgacaaaatataatatactcttattttcgatgaatgtcaacactttttttaatttttttttgatatttttattttatagatagaaaccacgtaaaaaatggcttatttacgtggtttcttcataatttatttttttatattttttcgaatttcatcgaaattttctatgcaataaaaataatccccctaaaatcagaatgattcctcctatgaatgaaagctcatctgtccgtccacctgtctttggaagattcaatatagaatcattcataacattgtacgtcagatgatagaagtaataatcatttccctgtttgatcgctttacttgtatccacattctgtttatccacctctgcctgtgacatcgtcattggcagtgtaacgatgatttgttcttttaacagattctttccaaccgctgtctttgtctctgtgatcgtataagtatcaggtagcaatccatcaaaagtgacttctccagcagaatctgttttggccttcgctacttctgctccatcagataatgtgatcacaaattcgatatctcttaatgatttccccttagaatctttcttgataagttttacagatccttggatcatctgattcataaacttcgctccacctgtcaattgtgctttagctgtcgttccagttggtccaatatcgaacgtcacagtttctttctcctgatcgatcgttgcattgctgctgttgctcgtaatattgagtaatttgaaatacttgatcatacctccttcattacacgtataagtaccatattccagatcatcaaacgtcacagacagttcgatcagatctcccggatgatctttcatctgtttttcaacctctgcctttgtgaatttgactttcttctcataactgtgtttctttccatagacatcggttccagtcagtgtaaatataaaagtcggatccccaacatccatattcagattacctgggtccaatgcttttgtgatcgtaatgcttcctttcggccctgtacggtcatgtgtgtttgtgatcactgtaagatcctgatcattttcatccgtatcataggttggtctgtatccgatctcagattctcccgtgatcaatccttcttcgacttctttccatgtataattgacttttttcccattgactttcacaggaagtaccttactggacgctttccagttattcttcgcactgagcatcaatgtttcttccactttaccatcagccaacagattaactaaaacagatttgggacgtatgccatctttattcccatgatcattccatacctttttaacctttttcttcgtcgtatctggtgtatgcgtattcgtgatcatgatattcttcgttgttgtaccatcatcatctattgtctcataagtatcgacatatcctgtttttgcattacctgtcagcttatcatagacttcttctttcacttcatactcaaatggttcgccagctttgtcatacttatcgaggcaatgatacgttacatcatctgaccagttatttgtttcgtctaatgtaatagcattcttgtatttctcaccatttctatataattgagctttgatcgatatcggtctcagatcatctccattgtcaccatcttcccaaaccttttgtacattgatatcgacatattctgtattttcatggaagttcgtaaacgaaatcacatacatcgcatcattccagtgtgtactcgtcaaagtataaccttcgggaacatcttcacgaaactcccacttttcacgatcatccttcttgatatccgtaaacattgtccagttattatcttttgtcagtgtatacacctttacttcttttgttgtcttatgtgttgccttgatcgtaacaacatctggacgaatctttgctgcattgtcatgatcatcccatatcttcttcaatgcaatataatccagtttctggttgactaaagtatctgaatcatgcacatatgttgttgtatcattatccgtattattctcgacttttacatcatgaatgagattttctttcgtatcattgatcactttacccttaaatgttaatgtcttgtccgatttctcgtatccatctggtgtgtagatttcttctacctcatacatatcactgtctgttccatcctttgcatagatatcggtcggcaatccaataaactccagatattcaaactgatcatcctgtgatgtagtggtagcgatcgtatcacccttcttaaagatattttctcctttgctattaacgatatctgttttcgcttttaaggcaaatatggctcccgccagcttgtttccgtcttgatcggtcttgatcaggtgtatgccgtatttttgcagagtatcattagctttgacatgaacacttgctttctttgcaacctttaaggcgatatcttcctcttctggatccagaacctctaccgtagtcttgatcgttttctctggcagatctttatacgatccttggttgttaaaactgatattgatctcgtattttcctgatttttctgcatatgtcggtgtaaatgccacatctttatccgtcacttccacatcttctgctccatcgtcatcataaaggattctccagctaaagtcctctgccttgaatttatcaccttttaagaacctgttctttggcatggcaacgatctttaacggctgttcctcgataaacttatcttcttcgatctttaagatctgatccatgacatatgttgtcttaagaactggatttccatagaacatctggctgacatcttctacattggaggtgttgaaagatgaaagatcgagtgttttgatggaatccatggcataaaacatctgactcatatccacgactgcggatgtatcaatatttttaaaattaatctctgtaagattcctgcaatttttaaacattttagatgatattgcattcatgtagatgacctgtccggctctttgacttgagatataacaatcaccaccatcgttccaaaacacaatactgccatctttattctgagaaacatccgttgtcacagctccttctggtgcactcttccacgtgaaagtcacagattccgcatccttgatcttctggttcaatttttcgcctttttccaacacataaatacctgtacttacattattgtcttcatttccaaacggatcttccttgtctggtactttatcatcatcacgaatatcattgatacttcctgcggttgtatcccatgtcagttctacttcatgtttttcctgatctttgatatagcctgtcggagacttgatctcttttatgtaatactttcctaaatagaagttagtagtttcttttccatccatatcctttcttgtaaaatggatttccttctcttttgtcgttgtcttttgatcgatcagttcgtccttcttccagacgagcattccgtcatctttcttgatattctcatccgcatacagcccatagactgctcctgcgatctgatcattgtcatagataaaactctgagaatccttgtcataatctgttaagatatctcccgtcttactgaacgtaatttctccatagactggcgtattcatctggtcaaacctgcagcttccatttccagcgttatcgtacgtgatcttgatgcttgtggattccccgcttaactcaaaagatttttcttctgcgtcatccatgttgtagcctgctggcgcagcagtttccttgatcgtatattttccatatggaagatagcactctgcagttccacctccactcgttcctgtagtcaaagttgccacaatatcctgatcttcatcatagatttcatagactgcatcatttaacagcttctttgtctctgatgaacgtttgactagttcgatcctgatcttattttcatcatctttatacggaccaaacgtgactgtcttatgaacatcagacttgatcaagaccacatcttcatcttccatcatttcatgctttggatcacccttgatctgatgcaatgtataaacaccgatcgctaacgagattgaagttgcttctcctttttcatcagttatcagagtatcgaccacttctccatgcggatcaatgatccgaaattccgccccagattccggtacatacttatctttatttacggacatttgctttttgatcgaaatctttgcggattttgtataatcgtcttttaaaacgaattcatacactttgacttcatcctcgatcgatgctttcatttctgtggaatactgcggtagcgcaaggtcatagccttcgacacctctggtctgcacgactataaaccctgtcttctttacgaaatcttttaggagaatcgctgcctttccttcggaatctgtgactaatgttccaagaatcgcatctctattatcttttttcagtttttcaatgtaatgaagcctgtcctgtgacgttgccaatgtctgatccttgaaatctttcaccatagattcatccagtacaacaaactcagcccctggttctggtttagactttccattcttgaccatcgtttttctgacccggatcttatctccattataataattatccagctcaaattttttaaatttcttatcgccatctttgatcgttacatcaaaatcatcagcaatcttataattatcacttccttttgtctgatgaaccgtgtagatgccaggatctaactttccagattgagctgcaccattttcatccgtgatcaatgtttctatgactttctttgtcgactgatcgatgatctggaattctgccttatattcttctttttttgtataagttccagtttccttatcactgatccttgtaacctttgtcaacatgatccctgcatgttgctttggatcgtttgattcaaccttatagatcattttagatccatcaatgcttacccatttgtccggtaccatatcatatccatcggtcgttttcgtctgatgaatacggtaagctccataaggaagtaaatctgtttctgcgatccctttgtcattcgttgtgatcgtctgttttaagttattcttggaatcataaacctcaaaaactgcctgtgcttctggaacattttccccgccaaacgtctttacaacctgtattgtcccttcatattgctgttccttcagatactgggatgtatttttattgaccgtgactgatatatcattaccagataacttatatcccaacggagcatacttctcatgtaaacggtaatatcccggatacagatctgtcacttttgcataaccatccgcatcagttaccatctgtgtcacaagtgttcctgctttatagacaacactcttgttatcggagcctgtgatatcatggtcagcatatagctcatagacagcattctgcaagtttgcttcaactcctagatcccctcgtttattctttacagttccctgtttaaagatttccagatcactcttttgaaattcattggtatagttaaatgtgaatgatctgactccaccctgttccactttgctctgatctgtctgatctgggatcaggtgtccgaatggggattttgtttccctgaccatccaagtgtggaccgaggcactctttaaggctgaaatcttctgctctgcaagtttttgtgcttcctgcattgccacagcatatgcttttgccgaagaatcgtaccagccattatctgtcgcttctttttgctgactttttgaaagatcgttccacttctttacataagtctttttcattgatgtcacactataacttaccgttctttgaacagtataagaagcttctccattgtcatcggttgttacacttccttgataattcccatccatatagatctgaaatactgctccagaaagccctgctcttgtttccgcatctttctttttgatcttgatccttacattatctgggctggttcctgactttgttgcactcgttttcgctttttcaatatctggcggtgtatgacgaaatccgaacaaaacctgatgggaatccagtttcttctttttcacacatttcttcactgtataatagtagatcgttccttctggatcctgatcactgatcattttacagaacttttttgcatctttctgcgaataacctctgtccacattttttcctgcctgataaacggtattttgcttattcgctccatgtccacatgcccagatgtatgcctgacacaatgacagatcttttgtattcttgccgcttgacctgaaataccagtttaatgcttttgcaattccctttttttcataagttgctgcattgatcgtcttgtattttaaggtatctccagaacacatggtctttccagagtttaagcaaaacactctgtatccgtcagctgtcatactccacagaccttctgatgcaggacgatcgatctctgagatcttattacttgataatgcctggctcatcaccagtttggcttctcctgtgaaagccttgacgtctctattcttcaggaacagtgattctcctgaaccactcagatacattgtcatgatcatcaggagggtaagaatacttaccgatatctttttacagatcgtcttcatttgtttcaaactttcttcctcctttttacttgtaacggtttgtgaaatatcctggctgcccttccttgtcgatccttccatacttagaatctacgtggtctctcgaaaatccagttccattctgcccttccagttcgatcgagccattaaacatgccgtcatcatgaataatgttgtgtgtgtcaaatgatccatctgttttcttccagacagcatacaattcacaagtctgtccagcatcgcagagagtattgactgcctgtctgtcggtatattttgctttgatcgcattcggatcttcactccatccaaggaaggtatatcccggccgttcaaatgtatttgctggcaggatatcatcctgtccatattttaattccacagtctttttgctgcctgatgcaccatttccatcaaatgttacttcataagagttcttggaccagacagcataaagtgtcataccctccgtgttactccatgtgatcatctctcctggagaataccgtgctctcaccgcatgtttatctgtattccatccaacaaaggcatagccttttttcgtgtatccattctcagcaaagctgtaattttgatcgtacgtggctgtcccatcattcacatgtccagaatcttctccatttccatcatagtttacagtgtatgtattcgctgtccactgggctgtctctgtataattaccacataccagccagcctgtattggacatccattttgttccttcatccagccatccttccaaggtataacctcttcttgataccgttggaaacgaaaaataatctccatccgtaaaattccatgttacatctgcaccatctccaccatttccattgtaataaatgctgcggcttggcttttccagattcagatttatagaacaccagtcataagttttccatccatctctgtcagcggaggccactccgaccaatccagtactgacatggatatttactgatttccaatgttcttgagtatcatgataggaattttcccaaaatccatcatttcctccgcaataaagcgttatatccttgctcggatctgaaaatactggtttatccaccgttacccattcccaggatcgatgctgttcatgggccggtaacagataccagactttgatcgttaaaagtgtatagttgttgttactgttcttctctgaatatatcgtctgtttattcactgtaagcttataatctccgcctccaccggaatacgtcgttaccgtatatggatgtctggaattattaaatgtcccaccactgacatttttatttttttcatattcatcactatgaatatacattgtcagactatcacttttcccatttggtccattgatgttcactgttaaatgtccatctttaaaatgtttgtttcctcctgtattatatgattgataagcatgtgccttcttcatctgataccatgccagaacggaaacaaatgaaaccatgaccactaataccactatgatctttcgttttctttccaggatcttttttgcattcttcatcacatcctcctctccatctatttttatctatcttccttttgtttcctgatcttctgtccatgattcctcatacagtacaccacataccggtatcttccatgtcctcggtacggatgacaggttaaaagtgtgaccatatctttccctttttgaatcagaatcttgtccatatcatatggatcgatcactttaatctttgtaacccggtaatccagtctttcccatggatttctaatgatcacctgatcgcctgtttttaactgttcgatgtcccgaaaatacggaattccccgatatccccgatgtgcagcgatcacgcagttgctgtctttttgtcctactggcagggatgtctgtcccatgatcgctgctccttttctcatattttccatcgtcgctcccagatataatggaagtttctgtttcatcttcggtatcttaatgtaaccgaaggtattcttttcgtttcttaagacgatcggtgcactgcggtaactgaatacatcctttagtcctgcttgtttttctttgaatatcttcctgttatagcggactgctttttgatacagtagatcatcctgttttcttttgcttctcctctgtgtcaattctttcaccgtctgatcggactgtttttgtttcagatatgatatgatctccggataaagcagtaacgtgatccctatcaccagaaaaaagattccaacaatatttatgatcttttgtttcacccatatctcctttctccgctttttcttttcatcttttcatatacttttctggctgcgatcaatacacaaatgatcaatagtcctgcaaagatggcccgtttgtaaacttccatccattgcgaatgatgatttcttgctcttatctcttcctcttttgcatgataagctgtacgaactcctcggactaataaacgcttgtcattaactccatagggtgtgcaagtaaccaatgttacatgatcttttccttccatgatctgaagttcctttgtatcttgtggttccacgactgtgatctgatccacacggtaagcaagctttttatccaatacatgtataaaaaagaaatctccctttttcatctctgtcagatctgtaaagatttttgcagaactaagcccagtatgtccagtcaacaccgcatgggtatcttttcctccaatcggaaaggaagatgtagccagatgtccgatcccatgttccaaaactgtcccacttgtcccatgatagatcggcagattgactgaaatacaaggaatctttaaatatcccatgatcgatgatccatcaatatttaatattctgttataatgaaccgtctctccatctaagcgtttttccttaaacggatcagtcaactgtattgaagatcgtagcaattccccattatactgtttcgcttcatccattactttttttatgatcgcctgatccattccggctgccttttcctgataactttccactgtcgaacctgcactcttttcaaacagataattgcttgtaaatggataaaacaacagcaaaaaacctgtcagaacgatcagaatcggtatgatcttttgtttcattttatctttgtgatcgtcttctgtttttgttcaagatcaagatcccacatccagcaacaacaacccctgcaatgatcagaagatagtttcctgccccacctgtcattggcagcatgaactgcttctgatttgtgatctgcatattgatatatgcatttccagaatcatcgtgttttgtcatcgttgcctttgtctcatccacagtcgcactcgctgctgtagtctgaaccgtcacatcattctttaataccgcaccattaggaactccatcatttgctgtggaatctgcatcagacttactctggatccctgtgatgtttacttcggttggtgtgatatctgcttttgtctctttgaccttaacgatcacttctttctttaacagagagtatcctgcatcggagtgtgtttctgtaaatccatattcatctccttcgattcctttgatcacaagttttccatcagaagacggactaaactgagtcgcatcagcttcttttgcagactttcctgttacctgataaacacctgctctatctgctcttgctaccagatagtaattatctgtcttattttttacaacgaatttaacctttgttgcatctcccttgctgtcagaaaatttctttgtcagatcatatccgtaagagtatacgatacatttgtcttttaaaatatcataataattcgtatttgttctcttccacgtaagggatacatcgtttggatttcctttatcaccaagaataacgctgtcatctgtgttcaccttagctgtatagtatacaacaatatatttatcagaatatttcttattcaactccttaagtcctgcttttgtcatctcgatcttcattgcaggatcgtctccagattttccgtatgttgctgcaaactttggatccgtgtcggaactcttccatacagccaatgcaccactcttctcaacattgttcacatttgttctgtccgctgcatccttagtttcatagattgcgatcacggcatctttcccatatgtcattccatttgccattgtatcgttaaatgtataagttgacaggtaggttgttgatgatgtgatatgtggcaattttgaaatgaactgataatccagtctttctgctttagatgctgtcacggtactctgatatttatattcatttcttgcagaagtaaaatctgccagtctgtctgtattggcagttgttacattgtcctgatctggattattgcgtactcttttgtcaagtgttggatttccagtttcattctttggataacagatcacatcatagaaccagtcatctcccttagaatccgtggatggcaactgtacaaaccatggatttgttgtgtaagttacattttctggtgcctttgtctcaacgatcaggtaaagacccagtggcaatttgtctttacttgtcacaccattagcattagtctcatccatggctgtcccattctttcccatgtaatcttctaatttatctttcgttaccgtattatcttctaatgccttggcaagtttctcattgatctgctggcttgtgaaatatgtcttacttccttctgttttagctgcatcagaagatgtcaaatccaaaatctgctgtattgtggttggaagttcatagatcatctgaatctttccattctcactctgctgttcaacatttccaactcgcaggtaactaaattccacacctttgatcgcatatttttccaaggctgcttccgcagcagcgtcctgttttcctgttggtgtaaactgactggtgttaacaccggcctgttttgctgctgtcatgtcatatttgtggatcgttatagatccggttttgcttgtatcgaccacatctgttgatgccgctttgatattaacgataggtgcaagcatcattgctgcagataatacagcaatcgttatttttttgatcatattttgaatcttcatttttctttcctcctattttttagaatagaaaaagcacagaaatcattgatcatactcaatgattctgtgcttttctttatgtgatatatatattatttatatattaaatttgttttgtcaggtgcgatcatgatcgtattccaaaaagaatccttgactgcctctgtctgaatctcatctactactgtgtcaaggtcgacatcacttgttagcttcttgctcgcatccattacggaaactttatcgttgattcctaaggatgtgatcgtaacaaactgttcttcactaactagtgttcctttctttagtggaaccgctaactgataattcttctgcaatactgacttgatctcattatacattgctttaaattctttgcttctatatttcttctcagccttcagctgctttgccttcttatcagccttcgcagatatcttttgatcagaataaatctcccagcatggacctcctgctgatgctgacttcgtctgtgcgatcacttcttttagtggatatttgtactgtgtacgctgtctgcttccaacatctgcaaccgttacctgatcattatcatcgatcgcaaccaatacgataaaatgacctttcttcgtaaaatatcctggtcccatcagtgctactactggatgcttcttcttcaatgcatctctaaccttgctgacatcacttccaagtccatgacattccagtttatactgttgtgccagtgctgggaccatctcatgacttgctccagcactactgtaatagccattcttatatgcccatactgttgtatcaactggagttacccatttattcgtcagcgaactgatacaaactgccatagcgcttggtccgcatccactgcttttgatctgatatccattgtcattccatgctgcatctgcctgattaaaataaataaatccctgtatcgtctctttcttatctttcatctcaagactatggtcattatatacttttggaatgatagatttcttgtctttcttcttgttttttttgtcttttttgtctttcttcttgtcttgatcagactttgtcttttgtttctttgtatgtgttgctactgtatgtttctttgtatgtgttgctgaagccgttgtatgtgtcgttgccgctgtatgcgtatgcgttgttgcttccgttgtcggctttgcctgagtcgtctgtgttgttgtctctgtcgttgcttcactttctgtcgtttgggcagaagaatctgtcttggtctcagtctgttcactgcttatttgctctcttgtgactggctgatctgctctgaccacagacactgatccaagcatcaaaaacgtatacagagctactacagctgctgttttacgtgtttttctcatctttcattgttccccctaactatttaaacatacttattataccactttggataccctcgtcaataaaaatgaatagtcatgatccatgttcacattttttcacatcttatgcttcaaagactaatttttcaattgcatatgcaacaccatcttcattatttgtctttgtcacaaagtctgcgatctctttcagatcaggttgtccattttccataacaacaccggttcctacagctttgatcatcatcgtatcatttcctgcatctccacatgccatcacttcatccatagatagtccaatttgctctgccagatgtaaaagtccatctcctttatcacatccaatctgatttatttcaatgttatttcccagagaacttgatacactcgcaatatttttctcgattaattcttgtcttgcagtttcccgctcttccatatcatcaaaaaatacactgatcttctcaattcccagcggatgctcttcaatgtactttcgcagatcatccagcggtagtcttgtatctctcacaagttttaatacatgatctgatacaccatactctgcaagatggtcaaaatagcatcgttccatatacccttgcccattctgataaatatcacgtgtacaatgatatttttccaaaatatcaaacaacgaaaataccgtttcttttggtaaatgatttgtatatatgatcttatcttctttctgatcataaacagttgccccgttacagcaaactgcatatcgaacgcctggaatatctcttaaaaattctggaattgctttaaaaatacgtcctgttgctggaactatataaacaccccttctgatcgcttcttttagaacttcttctgtgtgttttgaaatctgtttctcgctgtctaagagtgtattatctaaatccattgctactaattttatcttactcatgctattcctccacaaaaaaataattttgaatgttgatctgaagacttttatatccctgatactcattgatcactggataatatgtacatgtgatatactttgatgttcccattttctctcgaaattcatcttcatcctcaaaaatcatgccatcaatcctagttccctgactactctttaatgctaattttatcacatttttattttttccaaaaacattcacacgttccacttttaactttctgtgcgcaaataatggttttttattttcttttccaaatggctctaaaacagctaactgacggatcagatccatggtgatataatcaactggcatatcaatatcaatctgtactttctttgcaaaatcttttttctcaagggtacagttctcgttgatctttttgcggaattcctgtaatttttctttttccaaagaacatcctgctgccattggatgtcccccaaactttgtgaacacctctttgactttcatcatctcttcaaacatggaatatccttcgatggaacgtccagaacctttgattccttcttttgcatctgttaagacaaatactggatgatttaagcggtccttgatccttcctgctatgatacctgcaatactttcatgacattctggaagatataatacaagcactttatctccttttgcttcatattcgaacgcctgccccagtgcctcttttacaccattttctgtcatggttttccgaagatcatttagttcttttaattcttctgctgtctgttttgccttctcttcatcttcttccagaaatagattcaatgctttttcggcagattccaaacgtccgctcgcattgatacatggtccaacaataaatcctagtgcataagactgtatctgtttatccatcagatcatgcacattcagcaatgctttcaacccgatattttgtgtatctttgattcggcgtaatccttctttaacaaagattctgttttctcctgtcagatctaccacatcacaaacagtcgcgatcgcaagcatggataacaactcttccaattggctttcatcttcttccattgcctgataaaatgccctcataaactgaaaagccactcctgctccacaaagtaacggatacggataattgcatgcttcctgctttggattgatcactacatctgctggtggaagaacctcttttctcactcctgcttcatcggtatcaaatggcacatcatgatgatccgtaatgatcattgtcagtccatgttctttgccatatgcaactgcatctgctgctgcaatcccattatcacaggtaaggatcgtatcaatctggtcttccactgctttttcaatgatattttcattaattccatagccgtctttcatgcggtctggaatctgaaaatcaatctttccaccaagatcatgaatcgctttccacaaaatataatttgagacaactccatctacatcataatctgaaataatacggatcgttttcccttcttgtaccttttgcttcaaaatctcaactccttctttgacgcctttcatcaaaaaaggatctgaaatatctgaaagttctccatacagatactgctgtatttgttcatccccaaccacatccctgttgcggatcagccgtgcgatcactggatctatgttaaatttttctccaatctgattaaaatcagcctttttcttatacagataccactgttccatcatcttactccatttttcataaaaaagagcatccagtatttactgaatactctttttgaatgttttattttcttttctttttcttctttttcttgcggtttggatttgctgtgatcttctctggctgtgcctgactggctgcctgattttctttgactgcatctgatccaattcgcgtcttcatcatataccaaagtggtccagttaagaatacagaagagaatgctcctccgatgacaccaaccatcaatgctaatgcaaattctcttagggaggatactccgcagataaataacgctaacaccataacaaatgttgtcaaacttgtattgatcgtacgaaccaatgtacttgaaatactctgatttacaagtgctttaatatcatctcttgtccggatcgtctgaagcttcagattctcacggatacggtcaaagataacgatcgttgagttgatagaatatccaatgatcgttaacatacatgcgataaatgttccaccaacagataatcttccaacagaatatgctgcaaatacgaccagtacgtcattgatcaatgcgatgatcgcactggatccaaacttcacgtctttaaatcgaatcgcaatgtagatcagcatacagatcgctgagatcacaacggaaataaatgcatctctttgcatttcattactgatcgttgaactgatattctctgttgttacagattttactttataatctttctttaatgtattttcgatctgttttctctggctcagattcaattctacactttttacaaccatctgattgtttgcttttactttctgactctgaacagaggttgacttgctgactttctcgtaagctttcacaacctgtttttccagagaatcattgactttctggtcatccttgaatgtgatcgtagatgctgtaccacctgagaattccagatcataattcaagattgatccaatcttgcttcgattcattggaagtgcagcaagtccgatcaaaatgatcacacctgcaactgcaacgtatttcttacctgtacggacaaaatctcttgttttgatcgttcttggttttccataccatttcttgtcgcgaagtccaaaatgatatgccgcatatacaaggaatcggctgatcacaagtgctgtaaacatagagatcaatacactcattccaagtgtctgagcaaatcctttgaccgttcctgatcctttaaaccataaaactaatactgcgatcaatgttgtaacgttaccatcgatgatcgctgatgctgcctttccgaatccagatttgatcgctgctcctgtactctttcctgccccgatctcttcctgaattctggcataaatgataacgtttgcatcaactgccataccaataccgaggatgatacctgcaagtcccggcaatgtcagtgtcgcattaaatccattcagtgctaataacatcatcagcatatagatcgcaagtgccacacacgcaatcacaccaggcactgcataaaatgcgatcatgatcaagcataccagtacaaatccgatgactcccgctttgaccgttgtctggatcgcattcactcctaatttcgcagatactacgttagaacgtaattcgtttaatttcactggtaaggaaccgattcgaattgatgaagctaaattctctgctgcttcataactttccataccatcgatcgtacattctccttttgtgatcgcttcctgtacatttggggcactgatcacctgattatcatagataatataaattggttttccaatattggcttttgtagctttcgcaaatgcctttgttcccttagcatcaaattcaagtgcaactaaatattctttcttaccagttgtctgattctgattagttacagctttggctttcttaacattttgacctgtcaatacagtatctaatgttgtctgtgtcgttgtttttccattcttctttacttttacctgtttctggacagcaaaagaaagtgttcctggtttaccaagctcatctaaaatcttgtttgcatctgttactccaggaatctcgatattgatacgatcttttccttcctgataaacttctgcttctgtactgtacccttctacacgcttctgaagtttgtatacagtatctttcatatcactatcagatacattcttgccatctacttcatatgtaatactaactccacctgcaaggtctaatccaagttcgatattgcttgctcgaccaatcttcttctttgtgattcccttggttgtgataaatgctccaaatacacacaaagcgatcagtaaaataagccctgcaatatacttgccactgctattacgcttcttcattctccgtctccccttctaatgccaatgctgcctttaccattaatgcacattctaccctcttgcgctctaatttacatccgatctcataagttccatcgatcgtaccgttaaagttataagagtttgcactgcatccaccactgcaatagaatcttgcaaaacattttttacattcttctttggagtatacattacatgccttgaattctttgacgatctcatctttcttgactccttcgtaaacattacccattaagaagtcttcttctcctacaaactgatggcatggatataaatctccccatggagtcactgcaagatattctgttcctgaaccacatccggataaacgttttgcaacacatggccctcctgttaagtcgatcataaagtggaagaaggtaaatccttttccttccttctctcttttgatcatctcttttgcaagaagatcatattcatccatcagaattggaagatcctcttctgtgatcgcataatctgctgtatccggtgccacaacaggttctacagaaatctgttcgaatcctgcatctgctaaatgcataacgtcttttgaaaaatctaagttatgatgtgtaaaagttcctcttacataatatttctgctggtttctgctatctgcaaatttcttgaatttgtcgataacaaaatcatagcttccttttccattacggaatggtctcatgtaatcgtgaacttcttttcttccatccacacttaatacaacgttatccatctctttattggcaaattccatgatatcatcgtttagtaatacaccatttgttgtcaatgtaaaacggaacttcttatcatgtgtttcttccaaagaacgtccatatgcaacgatctctttcactacatcaaagttcatcaaaggctctccaccaaagaaatcaacttccagatttctacggtttcctgaattctctacaagaaaatctaatgctttcttaccgacttcagcactcattaatgcacgtcttcccttgtattctccttcttctgcgaaacagtatcggcaggcaaggttacaatcatgtgcaatatgaagacagagtgcctttacaactgttggtctatctttgaatccacaaatgtattcttcataacagtcttctgtaaataatacacctgcatcttttaattctgtaacttctccataagattctttgacatctttctcatcccaggatgataattctttgatgatctcttctaatgtatgatcctcatataaagcaatcacctcatatgtcaggtcatcaaccacatggacagatccacttgctacatcaaggaccatgttatatccattatttttatactggtgaaccattgtttctttctccctttatctgttattttctttcatcgaaaaaatgaggcggcccacaaggaacgcctcaagcacaaagtctttgttcgatttgactatttgctgtgttcgcaggtctggttacctactgtacaagatgttttacatgctgactggcaagatgtctggcattcaccacatccaccttttttcactgtgttctgtaatgttttatttgtcagagttttaatatgtttcatcttatcgtcctcctgattctcataaaataacttgctatattgtatcatattcattttcaaatagcaagcattccacctaaagttcctcctgcaatacataagaaacatgctgtgatcctttctgtggaaaacagaacgatatttttttgaaaaatccatgagatcaaagtcaagatcataaagtataacattcctgctgcaaatccccataaaaacttcttttttccgatcttacttccgatcagcatgccagcaaaaacagatgcaagaatatatgtaagtgtgaccccaagattcgcgatcttcattcctgcattgctttgatagatgataaatgcaagaagacacaataaaattcctgtggcaatgtaggcaaataccagactttgtatcatatagagtccctttttccccatgtccataacaattgctcctttttctatttaatctatgactggtattttgaatctatgcctttttgtgataaactgacattaaaaatacgaaaggagttttcctatgatcgatcttcatatacattctacttgttccgatggaacttttacaccaaaacagattgttcaaaaagtgatagcaaaaggattatatggattttctctgacagatcatgatactgtcgatggaattccggaaattcttgctatggatcttccagatgatctgaaattcattcctggaattgaaatttcatgtgatgcacttcatcgtgagattcatgtattaggatacggaatcaactataaggatcagcagttaaatcaaacgctcaacatgctccgtgacaaacggtttcagagaaatcttaatatgatcgaactctttcaaaaagacggttatccgatcacgcttgaaaaactgcaaaatggtgatcctcatactgtgatcacacgagctcactttgcaagaactttgatcgcagaaggcatttgttcttccatggatcaggctttttccaaatatcttggtgaaaagtgtaaatattatgttccaaaaccattttttgatccaaaagattgcttaagattaatccttgatgctggcggaattccggttcttgcacatccatttttatataaattttcaaatgaagataccaaacatctcattcatgatctgaaagaagaagggctcgcaggaatcgaagtttatcattcttcccatcatatcggccagatcacaaaacttcgccaatggcagaaagaatatgatcttcttgcaactggaggatcagacttccatggaacgaataaaccagatattgaaatcggaaccggacgcggaccgttatttgtcccagatcatttgattgatgatctgatgaattaatattaagaaacaaaaaagaatctgaaatacagatactattctctgtctcagattcttttcttttgatcaaatattcatcttattcttcagatgatgatgcgttcgctttttccattgcctggattgctgatttctccattggaatacggcaatgtttgtcgttaccaaattcaacaatgattgttgtttcatcaactttatctacaacaactccgtaaaatccgcttgttgtcaacacgctgtctccaacttccaaagtttccatcatctgttttaattcttcttcttttttcttctgtggtctgatcgttaaaaagtacattaatccaaaacaaacaaccaacatcagaattgtcattgtaacctgatccattttcttcctccatctttctaataagattactggttcatcatgccatcgatcttacgtttcttgtattccttataattgccttcttcgattgcctgacgaatctcactcatcattgtattataaaaatacaagttatgcaagacacataatctcattcctagcatttcttttgcttttaaaagatgtcggatataggctctgctgtaacttctacaggctgggcactggcatccttcttcgatcggacgatggtccagttcgtattttttattgaacatattaagttttccctgattcgtatatacatgtccatgacggccatttcttgttggatatacacaatcaaagaaatcaactccacggtcaacagcttctaaaatattcaccggtgttccaacccccatcaggtaagttggtttatcttctggcagatatggcactgtcttttcaaggatattgtacatctcttcatgtgtttctccaaccgcaagtccacctaatgcatatccatctagatccatcttggaaatctctttggcgtgttcgattcggatatcttcaaatgttccaccctgattgatcccaaataacatctgatgtggattgactgtatcttccagagaatttaagcggtccatctcttttttgcatcgtctcaaccatcttgttgtacgatcaacagaattctgcatatattctcttgttgcaggatgtggcggacattcgtcaaatgccatcgcgatcgttgatcctaagtttgactggatctgcatactttcttctggtcccatgaaaatctttcttccatcaatatgagaagcaaaagaaacgccttcttctttgatcttacgaagcttcgccaatgaaaacacctgaaatccgccagaatctgtaaggatcgggcggtcccagtgcataaacttatgcagtcctccaaattccttgatcagcttatctcctgttcttacatgcagatgatatgtattagataactccacctgtgttccaatatctttgagatcatctgtactgactgcacctttgatcgctgccacagtcccgacattcataaatactggtgtttcgatcacaccatggaccgttgttaaacggcctctttttgctcttccgtcttttttgattaattcatacattcttattcaccataaattttcttaatattatccattgttgcaccaagattctttaaaactccatcaagaatcgtaacagctgccattgattctaccacaactacagctcttggcacgatcattggatcatgacggccatgaatttcaatctctacattatcaagatcacgattgactgtcttctgtgtctgtgcgatcgatggtgtcggtttgatggctgcacggaatacgatcgcacttccatcactcattcctccaagaactcctccagaatgatttgtctctttttctaccttcccatcaacacagataaaatcatcattattctctgaccctcgcaggttggcagcctcaaatccatctccgatctcgaagccttttactgatccaatggacataatggctttcgaaagttctgcatccagtttatcaaaaacggtttccccgattccaactggcattcctgtgatctgacattcaatgataccaccgatggaatccatctctttgatcatctggtctgctttctcttgtacaagttttgctgcctctttatctggcatgttaaatggattgttattcatctccgcaaagtcaaaatgatccttagatacttcaattccggcgatcgcttttgcataagctttgatctcaattcccagttctttcaaaactttcgctgctacagctcctgctgctacacgtccgatcgtctctcgtccagaagatctgccgccaccgcggtaatctctgaatccatatttcatatcaaatgtaaaatctgcatgtcctggacggtaaatatctttgatattgctgtaatctttagacctctgatccttgttatatacaaccatggagatcggagtccctgttgttcttccttcgaagataccagaaagaatctcaacctgatctccttcttttctctgtgttgtatactttgactgccctggttttctgcggtctagatatttctgaacatcttctctctccagaggtaatccagccggacatccatctaccacgacacctacgcctgcaccatgagtttccccccatgttgtaattcgaaaatttgtgccaaaacctgatcctgccatatatgttccttcctataatttgatatttgcaagtaagtcaccaagacttgttccagctgcatcttctgtgtattccacaccagtttcttctgctttcttagctgcttctttatcatcttctaatgctttgatacttaaacttacttttccatttgcaactttaatgatcttaactgtaacagcatctccttctttcacaacttcttctggagattttactctcttctggcttaactgtgaaatatgaactaatccactgattccatcaccgatatcaacaaatgctccatatggcatgatattttcaactgtaccttctacaactgtaccaacttttaattcattgatcttattctcgcgttcttttctttctttttccttctcaacagcttttgcagataagacaagtctctgttcttctggttctactgtgatgatctttgcttccacatctttctgtaaccatacgttcagatcttctacatattttgttgataataaagatgctggaataaatccacggattccttcgacataaacgataactccaccatttacaacaccaccaactgtcaatgccagaacatccccatcttctttcatctgctctaaacggttccatactgcgtcttcatttgttgatgctttatttaaagattcttctaactgtgcttcgaaatcttctcttgtttcttttacttcttctgccataatatccattcctccatttgattgaactatatacgtaacctttattataacatagaatgaaaaagattcaagaatgcctggatttcctataactacaaaacatttttacagatacgaaaatgcttgttcctatgagaaataaaatccataaattggggtatttttgttttttttcatctttttttgatggtattttatcttgttttaccacaatttgtttcactgcttttggaaggacttttgtgatcttaaatgtgatcctttgatcagttttatttcctgcctgatccactgctttcagatgaagaacatgctttccaggagccaattctttccatgtgatcttatgatgttccagtttttgttcttttccatccaaaataaccttctcccactgatctgttttattttccagaaggatgctgatctgttttccatattcacattcagatttctgatcaagcccttctattttgatcaccggtttttgtgtgtcataaaaaaactgtatttcttcacttgttttttcatttccggcactgtcttttacatgcagactgacactgcatttcccattttctgtaataggatcttttatataaactttatcttctttccattgatattcctttttttgcccattcacaagaaatgccattacctgcactggttccagactttcaatgcgaaatcctggcttcagattttttgttgatatctgtttttcctttaaatcctcctgcagaaaatgaatctgtatgcctttttgattgacagtaaattttctgctgcacctattttgatttcctgcaagatcttcagttttcacatcaatggtataatatccatcctttttgatcataacggaatccatcttctttccgttaagataaatatatgtcttatctggattcagattttgatctttcacatctacttgaatttttacaggctttgaatatgatcttccattgtcaattccttgaattttaatccttggtttttgtgtatcaatgataaacgacttttcctgtatgatcatcttatttcctgccagatcttctgcccgaacagacaatgtctgttttccatcctttaaaaatataacttctgtttcataatgatcaccttccaacttccatggctttacctgtttccccgatgttcttaagatcatatttccctttttcagattttcatccttaactatgatctgagctttctggtattttaaaatttctgatcttggattttgatagcgaacaaaaatctctggattatctgtatccacaaaacaagtcgtttggtagagttgttctgatcgatttccagattcatctttcgtatagatgtcaagctgatatcttccatccctcctgattctaggaatctgatcgattcctgtcagtatctcttttgtcttcaaatctgtaagctgcgcataaagatgcacctgtggtccttctttttccttcagatcatatgagaaaacaggaattttcgaataccatccaccaataggttcctgatcacattggatctttgcaagttctggttgttgtttccatactctcactggaatctgactgatcactccttctcttccagccttcgaaactgccctgatataaacaagatcatcaaaatctttgctgatctctaacttgttatttttcatctgcttccattcatcttgtcctattttatattcataaaattgaatatcagaaactgctttggctccataagcttccaataccacattctttttgctccatgctcctggagtatacgctcccgctgtgatcttggctgttgttggattatttaattcgaccataacctgccttatttcttcatatccatttttatgaacaatatgaaccttataaatcccttcttcctgaaaactgatctgtgtactttgttcgtaatcccagatcggatttattttctgttgattcacgaaaactgtaatatcctttggtgctgtcccattttttagaaatatttccatcactgtactgcttcgaaatgcaggatcattcccttctccttccagagtaatatcccaagggatttcccaatctcccttcgtatcgaccggtaaaaccataaaaagaagaagtactgtgattcccatgatgatatatatcttatattttctgatcataacccaagtttcctcctcaattcctctgctcttttgcttgtcattcctgtccgttttctaccttccctatagaccctttgtgcctgtgtcattttattgttcctgcataaataaatactatactccacataggcatccataacttttggatatttctttagaaatcgttcaaactccctgctgatatctggctgttttgattccagataaacaagctttctttcatacaatttccatgcagaatctcctctaagattttctttgaaaacccggtctgtttcctctaaaaactttctatcatctcctttttctgcttctctttcatataaattgatccggtcttcttccactaatttctgatattcttccttttgtggatatttttgtatctgttctaacattttttctgcttctttccatacattctctgacagttttgctgtatttactgtataaaaatgaagataaaaatatgccgaccagaaatcatgcacatcggtctgacaatcctgtacgatcttcataagtttttccgcacttatatcatttctcctgtcatctaaaacatctaaaagcaccaaatacgatgacacattctttttcatccctctacatctttcaagatacactcgtgccaattgtgtattcttttgtatctgatccgttccataaaaataagccattgccttttttatctctctttgagactttttctgtacaatgacttctttctctctttgctcttccctctgtatctgattccagagattctggatacaaaaaacagcaatcaccaccatgaaccctttcttcatacaacagattctcaatattctctcaaaatctgcctgaatctgccttatgttgtgatatctttttgcatcgtcatcgatcagacatttttctatgatcttttggacagcatctgttgctttcaataaagattccattgtttttcctaaactatatatatcaaaataaatgtctgctctttcttctgtctttgcctgtttttttgatgcatagtttttggttccatatccacttaatttttctcccgcaaacaatgccgctccaaaatcgatcaagtatatatttccagattgatcaagcatgatattttccggtttcagatccatatgaatgattccttgttcatgaatcttattcagcactttgcagattttgatcatccacaataaacttttctttttataaagttttccacagactctgccatatcgttttaacgaatttccaagaatatattccatcaccagaaaaagttccttttcctttcctgcaaaaaataattccggcacacctttggtatgttttaatttttgcaagatcaccctctccctgtcccactgtttttgatccttcacgatcttcacagcaacctcttttccggtcttttgatccagtgcaagaaaaactttacccattccgccttctccaagtatttttcggacttgataacgttggtgataaatctttcctatttcttgttcggaactttgacgatcacacaggacagattgtctaattctcctcttctttttactttctgaaaacatttctgcacccattctttgatctgttcttttgattcctctacctgatagatttcttcttcctcaagcaacccataaaagccatcagtacataataaaaactccattcctggatttaatctgcctttgtaacaatcaatccggatatcttttgtcacacctacacactggatcaaaatatgtcttctcggatctttttttgcctgttcttttgtgagatggccagcacgcagttccaactctgccagagtgtgatctgtcgttacaaatttacggtccctgtcaaaccagtaagttctcgaatcaccgacatttaaaacaaaaaattcatgttcttcaacaaacaataaggttaatgtgcttcccatggattttgtttcttccatccgacgactcattaacaaaagattctggttgatcctgcggatcagatcgatcagattctgctcgatcatatcaattcccatagtttctaatccatcaaacaacgtttcgtcaaaccattgttttaatacttccacgatataatgactggcaatctctccttttttcaaacctcccatgccgtcacagacgactgcgagcagataaagctttccgttcttttccttctgacgcaacagataagcatcctgattggatggtctcccattcccaatatctgtcattccaattgtatctatcataaattcctcctaaatggaaaaaagctcataaagataaatctttacaagcttctttcactgttttgttgtatttgttaatagtttattcctcgatatcttcgatatcttcttccgccgcttcgtcgtctcctccgtcaatctcctgcttcaggatttcgatatctccacgaagcttctcaatcagattaaacaggtcaatatactctgcctgtgggtaatccatatgttcttcaaaatacttctctcccacctgacggtacagatcatttaaatctctcttggcgactcttagatcattgtgtctttttgcggaatctgcgacttctttagctttctgcgccgctgctttccctgtggtctgaatcgtttcttccagacgtccgaaaaaatcttttgccatatacgtcactcccaacatttttctttcattgtaccttatcctcagtgtttcgtaaaggctttgtccctagaattactagtgttttttcttctttttccaatatataaaacttccacctaaagatgctgccaacaatgcaaaaatccatttctcatcgaaggaatctcctgtttttggtgtgctcgctgcatcccttgtttctggtgatcttttatattcagaagtattggatcgatctgctttatttcccgttgtcactgttgatttcgattcttttttgatcttcactaaacgtactgcactgactggtttgacaaaatctgcttttcctgtcgctgtattttttaatgtctttccagaaagtgatgcttcttttagttttacctgatacgatacttttatgaattcatcataagataaattctttcctgtctcaatgacatacttattttctcctgcagtgatcgtgcactgtctggtaatatctgacccatctggtgcataaatcttaatgctgttcttgatcactttagctccatttcttgaaagctgatcttcgatcacaatattttttgcgatcgcatctttgatcgtctgcgtaacaaccagctgatactcgcagatatcaccaactttatatgttgttttatcaaccttcttggtgatcatcaatgctggctgtacagcttccattactaccacttgatcatctctgactttatccgcatcatcactatagctttccgcaatgtttttgatatctcctgtgatcatcttcttaaatgctgtctgatatattaccagaagttcatc

SEQ ID NO: 617 - DNA, 769 bp, Unknown
  gut microbiota DNA sequence
cattcatccataagaataataataatgaaactacaactcctgcaaatattaatgagccaacaaataatttatttgaaattgagtagatacctgatatagattgttgtaatgcagggtaatttgatgaacttttaatcaaattatattctctccaatttatatctaatttcccaagatcttttattacactatcaagattcttatcaccttttacaaagaatgttgcatcttggtatacagctgtatcttctgtattaccataaactttagcagctgtatgaacatcagtgattaatgtattttcgtatagttcttgtgctgcacttactccaccgctattatgcccatcgaatagacctttaatttctacttctactgtttcatctgcacctttctcattatcagcatcaaataaattagattttatttttatcttatctccaactttaagattatttttttcagctaaatctttatgcattaagattttatttttatcttcattttctaaatgctttccttctactaatttatatgcttctgatacaaattttgtttcttttgatgagtcgttaaccccagttaacataactgttcttttaaaattcttcgctctttcaggtgattgattcgcaagagtctcttgagtttcaataatatcataatcaactaaatctgcaacactgtttattctttttacataggagtctatactatctgtttgagatatctttttaatatcttcaccttttacatttcccccacctct

SEQ ID NO: 618 - DNA, 40594 bp, Unknown
  gut microbiota DNA sequence
acaaatttgacatattttgttttttatattatcaacaaatcttatcaatttatttaaattgtatacaaaaacacacatcacaaaagtgatgtgtgccataaaaaagtcaaatcctattcaattccaaaaacaaagaaatcaaattattttaactgagcagcaacctcagccgcaaagtcttcttctttcttttcaataccttcaccagtttcaaaacgaacgaatcctttgattgtaacattagctccgtttgctttagcaacctgttctacgtattttccaactgcctgttttccgtcttcagctttaacataagcctgatctaacagacatacttcttttaattctttgttcagacgtccaacgatcatcttttcgatgatgttttctggtttgtctgggttttcgttcatagcctgaacttttaagatttctgtttcatgctcgatgtaatctttagaaacttcatctctgcttgtgtattttggagaaatagctgcaacctgcattgctacgtttttagccatctctttgatctcgtcgttaactacgtctgtagcaacttctactaatacaccgatcttaccaccagcgtggatgtaagatgcaacaaatccgtctgctgcagatactttagcgaatctacggatgtttaagttctctccgataacggcgatcttaccatctaatgcttctttaacagtttttccagcttctgctttagaatcttctgctaagaatccttcgatgtctgctgctgctgttgtaagagcctgatcagctacttctgctacgtatgctttgaatgtatcattcttagctacgaagtctgtttcagagttaacttcaacgatagctgcttcttttgcatcatcagataatgctactgcaacaagtccttcagctgcgatacgtccagctttctttgctgcttttgcaagaccgttttctcttaaaaattcaactgctgcgtccatgtctccttctgtctttgtaagagctttcttacaatccatcattccggcaccagtcatttctcttaattcttttaccattgctgctgtgatagccatgattcttttcctcctaaaatgaaaatgtgaataaattattcagcgtcttctgcaacttcttcagagtctgcatcgattccctggtttgcttcgataactgcatcagccatagcagatgtgatcagttttactgcacggatcgcatcatcgtttcctgggatgatataatctaattcttcaggatcgctgtttgtatctgcgattccaacaagaggaattcctaaagtatgtgcttcctgtacacagatgctttctttcttagggtctacaacgaagatcatgtctggaagtccacccatttcttcgattccacctaagttcttctgtaatttgtctttttctttgttaagttctaaaacttctctctttggaagtacgtcaaatgttccgtcttcttccatctctttgatctttttcagtctagcgattctagattcgattgtcttgaagttagtcatcattccacctaaccatctctggtttacgtagaacattccgcaacgttctgcttcagcctgaatagaatcctgagcctgtttctttgttcctacgaacagaatctttccaccctgtgctacacaatcttttactgcgttgtaagcatcgtcaaccattcctacagatttctgtaagtcgatgatatggataccattacgctctgtgtagatgtatggtgccattttagggttccatcttcttgtctgatgtccgaaatgtacacctgcttcaagtaactgtttcattgaaataacgctcattttaaatctcctttagtttttgcttccgctattttcatcgttctgacaaacctcttgggcacttaccagaattccaatagcgtgtttatttttacctatgacagtatatcaaaccttgtccttctttgcaagaactttttctttaattccaaaagaattaatcaagctttgtgatctcgtcaaatataaagtcattgactactttaatatatgttcccttcataccagaggatcttgtctcaacaactccggcactttctagtttccttagtgcgtttacgacaacagatcttgtgatcccgaatctatctgcgatcttacttgcaactaagactccttcattgccttctaattcttctaagatatggatcactgctttgtgttctgtgaaggataacgtactgatcgcggaatcaacgattcctttctttcttcgttcctgttccacttcttcgcttacagatcttaacatttcaagtccgacaacggttgttccatattccgctaagataatatcatcaatggaataattttctctctggcggtacataaataatgttccgaatctctctcctgcgatatcgatcggtgcgatgatcgcatagtaatcatcaacgtctgactcaaatcccagtgtggaaaggctgacattttcattggtggaaagaatcgttaatagtctttcatttaatgaaaaatcaacataatctttaacatttcctgagatcagctgatgaagcacttcgatgtggtctgcttcatttttacctaagatctttccttttttactgatgacaaggacgtttgaattcattacttctgtcagaactttacagatatcgttaaatacaactttctgtgaattgttattatgaagtaatttattgatctttcttgttttatctagtaattgtatactactcatctatattttttctccttattttgacactgactccccagaagtctctttctcttttgcatcttctggcatgctgcatacgaatccacattccttgctagagcatacaagcttcttacctttttcgatcatatagcttccgcatttttcacatttgactgtggatggtttctgccatgacataaattcacattccggattattttcacatccgtaatattttcttccttttttcgttttctttaagacaacttctccgccgcacattgggcatggaattccgactttttcaaaatgtggttttgtatttctgcattctgggaatccagggcatgcaaggaatttcccatatggtccatacttcacgaccatatttcttccacattcatcgcagataacatctgtgacttcgtcttcgatcttgatcttctctaattctttttctgcattcttcactgcgatctcaaagtctgggtagaagttttcaatgacggatttccaatggactttaccttcttctaccatatcaagcagaccttccatcatcgctgtgaagttcacatcgacgatacttgcaaatgctttcttcatcatgttgttgactgcttctccaagctctgtgacgtataagttcttcttttctttgacaacataacgtcttgctgtgatcgttgagattgttggtgcgtaagtacttggtcgtccgattccaaactcttctagtgtcttaactaaagatgcttctgtataatgagctggtggctgtgtaaaatgctgttttggttctaaattattcaatgtaagtttggtatcttcatcaatggattttaacattacatttccttcggatttctcattgttaatgttatatacagataggaatccatcgaaggcgatcttgcttgcggatgcattaaaacgataatctccggcagcgatctttacagatgtattctcgtatttggctggtgccatacggcttgccatgaaacggttccagatcagctggtataaacggaactgatctcttgatagttcatctttgatgcttgctggtgagtttgtcatgtaggttggtcggatggcttcatgtgcatcctgtactttcttgtcgtctttcttggcgacagttcctgctccaacgaactcggctccataagcttccttgatatattctttcgctgctgcatcggcttctacagagatacgtgtggagtctgtacgtaagtatgtgatcagaccgacagtcccctgtcctttgatattgacaccttcatataactgctgtgcgatacgcattgttttctgtggtgcgaagtttaacttactggatgcatcctgctgaagagtacttgtcgtaaatggaagtgggctcttctttaatcgttctgtgactttcactccttcgacggtaaattcttttccttttaaataggataagatctcattcatctcttcttcgctgtggatctcgatcttctgttctttattgccaatcagtttggcttctaatggctttttgcttcctttgacatctaataaggcttctaatgaccagtattcctgtggaataaacaggttaatctcttcttctctgtcacagatcaggcgtaaggctacggactgaactcgtccagcacttaaccctcgtttgatctttgcccagaggatcggactgatctggtatcctacgattcggtccagaacacgtcttgcctgctgtgcatcgactaagttcatatcgatgtctcttgcgtgtttaatggagtctttgacagctgtttttgtgatctcattaaatgtgattcggctgtagtttttgttctctagttttaatgcgtaatataaatgccatgagatggcttctccttcacggtccgggtcagtcgcgaggtatactttgtctgctttttttaccgctttacgaagagctgctaatacttcacccttcccacggatcgtaatgtactttggttcaaagtcattctcgatatctattcctaaggtactctttggcagatcgcgaacatgcccgttggacgcgatcacttcgtaattcctgcccaggaactttttgattgttttggctttcgccggtgattcgacgataactagatattttggcatatagtattaccccttgtttacatttttttgatatataagttctgatggatctgtttgatatatcctttcgcttctaattgaaataaagcttggatcacttcttcataagaatcttgggatgtacttaagatctcatcaatatatttcggtttcaaactcaacatatcatacacccttttttctgcctttgcaagagattttgcactatgctttggaaattttcgtgaaaatcccgtgaattctgaaaattctgttaaaatatcgtcgacattttcaactaattttgctccttgtttgatcaatccatgacacccttgacaatgtttgtctgtgatcattccaggaatcgcgaacacttctttgttctgatcaagcccgcaatccgccgtgatcagcgatccgctccttgctctggcttctgtgacgaggattccatcacttaatccactgatgattcggttcctttctggaaaatgccatttgagcggttcactgcctggtgggtactcagaaataactgtctgattcgcatacatgtcataaaataactgaaaattttcttttgggtaaatgagatcgatcccacatcctaaaaccccaacagcctgtccttttttgtcgattatttcacggtgaaccgtcccatctacgccccttgcgagtccacttacaatctgtacgccttgctgagccagctcttttgcgaacttttttgagatttcgaatccataagttgtcggatatcttgatccaacgatcgctattgacagttctttttcttcatatggctgacctttttgaaaaatcccatacggagcatcgtagatcttcctcaatcgattcgggtaagcagcttctttttgaatgataaaacggatattttcacgatgcaaggcttcatagcctttctgaatcgctgtttcatctcttgaatgaacgaaacgatcgtactcaagttgtgtcatgtgttcttttaagatttcggggttgatcttatagagttcttttgggtgaatgaagatatccatcaattctttttgcttcttgatcggcaatcggactttgccgcatagccagtaccaatataatttatcttccatattcaagcacctctttgataaattctgtatttctgaaggtcatggcttccatcaggtggatcggtttaatctctgattcattttccataagcatgatcgtcagtgctacttttaaaatcttatccattcctcgccttgtgatcttgccagatcgataggcgatatctaaaatctctttgcattctttggataaatgaaggagcttgtttaactgtatgtggcttaaatggctggtatcactgcattgatagttttttaataactttttttctctttggatggttgtttcgatgcgttctttgatctgatgggatgtttcttgactctctttttgtatcttctgtgtatcagcctcttttttacttagacataggaccatgtcaaaacggtctaagatcggaccggacaatttctttagataacgctttttttcataataagtacatcggcagatcccatcttccaatccataaccacaaggacatggattcatggtggcaatcagttgaaagtctgccggaaacttgtggtagatcccatttctggtgatatcgatcgttccatcttccaatggctgtctgagtgcttcgatacattctgttttaaattccataaattcgtccagaaataaaatgccatgatgtgctaatgtgatctctcctgccgtcggcgtcttgccgcctccaaggaatgcggctttcgggatcattggatgtggctggcgaaatggtctggtatcatcttctaaataccgtggaattccagtggcatcataaattgcctgaacttccatcttctcttcttttgatagttgtgggagaatggtcgggatccttctggctgccattgtttttcctgaacctggggaaccaatgatcaatagatgatgtcttccagtgaccgcgatctccatcgctctttttaaatgttgttgtccgatgatgtcactgaagtcttcttctgactcttccttttgataagttgttgcacttctgcaacttttttgatgatatgttccatgaaaatagtccaggacatcctgtaaactgtccataaataccacttcgatatcttcgatccctcttagagaattctcatcttcacttgccgcaaagaacttgtgaatgccttgttttcttgcttctaaaacgattggaagacagttccctacacctctgatcttgccgtttagtcctaattcccccatgatacagatgtcatctaacttgcttgcatcgattaaattcaggcatcctaaaaaggccacggcgattgggaaatcgaacgcggttccgttctttcttatattggctggggataaattaacggtgatcttcatcgacggtaagggatggccgatggagcgcagtgctgatgcaacccgctcttttgcttccatggattctttggaaagatagcctaccattgtaaaatatggcaggccgtttctgatttctacttctacgtggatgagctttccactcactccactgacgattcctgtgattacttcctgataaataatactcaactccttctcttctcaaaaaggaagctggtttcaaaatgatatggttagtttatcacaaaagtaatatttttacaatcttgtttattcaaaacaattgtgattattttaataatttctttaattcactcataaatgtgttcacatctttgaattcacggtaaatggctgcaaatcttacgtatgcaacttcattcaaatcctttaatttgtccatgaccatctctccgatcacggatgtttcgacttctcttgttcccatgttatagatctttgtctcaatctcatcgatcgctgcttcgatctgccccatggatactgggagtttgtgacaggattgtacgattccattccggatcttgtttcgatcgtagagttgtcgtgtcttgtctttcttgatgacactcaacggttctgtctctatcttctcataagttgtaaaacgttttccgcattcgtcacattgtcttcttctacggatcgcattgttgtcttctgccggtctggaatctacgactctggaattctcacttccacaatatgggcatctcatcttcttgtacctccgtgtttttactgcttgaagtatatcattttttttgtagaaaagaaagcttttcttttatttcaggcattctttttcgttgatatcgactagaatcgtatctctgccaatccttacaatgcatttgtaggggattttgtaaactttattcttgccaacgcatatgagcatcttcgttgttttgggaacgatcagataacagatcttacccgtatggatttcaaattcgaggtctaggacaaggcctaaacattctcctgtattacaattgatcacatctttttgccgaagttcgagaaatttcatgtcaggaatcctttttcttcctattataatagtattctttttttccatgaatagaagcagaaaaaagcaggagattctgatctctcgaatctcctgcttctttattattataatgatataaagaaagattaagcttctttttttggtgctggtttcttaggaactaatttctttcctgtaatgattccttttggacatttacctgcacataatccacaacctacacatttatcgtaatcgatctgtgcgatgttgttttcaactttgattgctccaagacggcatactttttcgcatgctttacatccgatacatcctgctttacatacagacataacgtttttaccgaattctttagagctgcactgtactcttgttttcttgttttctggtacaaggtcgatcaatgcttttggacatgtttctgcacattttccacatcctacacatgcttcttcatcgatgtgagcgattccgttcacgatagagatcgcattttctggacatactgctgcacagcttccaaatcccatacatccaaattcgcatccttttggtcctgcacctggtacgttcatcgcttcgatacagctctgaactcctgagtactggtatttgtcagatgctttttcgcaagttccggcacattttacgaatgcgactttcttcacgaattctcctgcttctacacccatgatcgcactgatcttctcagctgcagctgctccaccaactggacagccgttcactggtgcttctccatttgcgattgcttttgcaagtccatcacaacctgcgtatccacaaccaccacagttatttcctggaagttctgcacggatggctacttccttctcgtctacaggaactttaaatttctctgaggcaattcccagtaagattgcgataagcagaccggttcctccgacaacaaccatggcaagtaaaattgctgatatattcatcttctttacctcctaaataagtcctgagaatccgaagaatgcgattgccattaatcctgctgttaacagtgtgataggcattcctttgaaagattctgggatgttgttgtattccatcttttcacggataccagcaaggataacaatagcgatcaggaatcctaaagagataccgataccattgactacgctggcgatgaaactatagtcgttctgtacgtttgttaatgctgtaccaagaactgcacagtttgttgtgatcagtggaaggaatactcccagagattcatataatgctggcatagatttctttaataccatttctacgaactgtactaatgctgcgattaccaggataaatacgatcgtatttaagtatgttaaatctgttggtactaataaaaatgtataaattaaatttgtaactgctgatgcgatagtaataacgaagagaacggctgcacccattccggctgctgtctcaactttcttagaaactccaaggaaaggacataaaccaaggaactggcttaatacgacgttatttaccagcgctgaaccgatggcaattaacagtaaacttttcatcttaatcctccttatttgtcatctacagttgtatcaaaaaagcttctggaaccgcaagcgctgtttccgcagtgagaacaatctccgcatccaccacttgttgcttctccggcttttttaggttttttgctcttaactttattctggatcgctactaagcatgcaagtacgaagaatgctccaggtgccaggataaagattgtgattggttcgtatgcagatggcattacctgcattccgaagatctgacctgctcctaataattcacggaatgctcctaaaattgttaaggctacagtaaatccaagtcccattccaagtccgtcaaagaaggagttgattggtccgttctttgctgcaaaggattctgcacgtccaaggatgatacagtttactacgatcagtgggatgtataatcctaatgcgtcgttaactgctggaacatatccctgtaataggaactgcacgattgttaccagagatgcgataactacgatatatcctggaatacgtacacgatcagggatgacatttcttaatgctgaaatgatcatgttagaaaacattaatacggctgttgttgaaagtcccattcctgcaccgttgatcgcagatgttgttactgctaatgtaggacacatacctaacattaagacgaaggtagggttttcttttacgataccattaatcaatcgttccattggatttggtttcatgtttaattacctcccttcaggctctttgaatatgcaacacagctgttaactgcacttgtgacagcacggcttgtgatcgttgcaccactgatggcatctactttagaatcatcgttcttaccagatccatcttttacaacttcaaatttgtctgcttttttgtttttaaagttactcttgaattctggttctttggctttcatacctaaaccagctgtttcgctgatggataatgtttcataaccattgactgttccatcatctctaacacctacagataaagatacatctccaccgtatccttctgggtttgttacagagaatacgtatccaagttcttttccgtttttgtcaactgcttttacaacttcagaaatcgtgttctgtccaagatcatttttctttaagacagctgctacgtctttctggtctaattttactgtatcgaatttcgctgcatctttgaatacggctttgtaagcttcctgttttgtcttttcttcctgtgcggcgatcggtgcttttgttacattatatacgatacctaaaaggagtcctgcaattaatgtgatcacacataatttgatacaatccattacgagattcttattcattgctcttacctcctttttttacgattccaaatggagttggtactgtcactctctcgatcagtggaactaataagtttgcaatgatgattgagtaagatacaccttctgccattggtccgaacagacggaataatccagttaaaataccaagaacgatcgcatagatgatctttccgttctttgtaattggagatgttacgtagtctgttgccatgaagatcgcacctaacattaatccaccactgaagatctgtgctgccatgtaagatagatcaaatccatgaccaccgaagatcagtacgaagattgctacaactgcaacgtaaacacatgggatgatcggagagatgactttcttaaatactaagtatactccaccgatgatcagtaataatgcagatgtttcaccaattgttccaggaacgaatcctaagaatgatttcataacatccacgctttttccctgttccataacagcaagtggtgttgctgttgttacaccatcatatgtaaatgttgtcattcttgctgcaaatgagatcattaagaaacatcttgcaccaagggctgggttcataaagttctgtcccaatccaccgaatacctgttttacaacgatgatcgcgaagattccaccaaggatcggcatccagaatggtgctcctgatggtaagtttaatgcaagtaacagtccggttaatgccgcacttaagtcacctacagtaattggctgtttcataagtttctggtaaatatactcaacgacaacacaggtagcaacagaaattgcaactgtcagtgccgcagatgctccaaagatatagataccaaaaattgtagcgggtagtaatgcgatgataacatctaacataatcttttgtgttgagccgttatctcttacatgagggttggctgacacatgatataatgtttcgctcatatgtatctctcctttatttctttctacggttagctaatacctgtttacgacctgtctttatggactgtgcaaggttacgttttgctggacatacaaatgaacaagatccacactcaacgcattctgctccataaagtttctcaaactcgtcaaactgattatgatctgctaatacagataattttgctggcatcagcttctgtggacagacgcttacacatcttccacaacgaatacaattgcttggttggttcgcagcaacttcatcttttgtgaatgctaagaagcatgagaatgttttgacagctggtacatctgttgtaaacattgccatacccatcataggtccaccagaaatgatcttctcaggctgtgttttaaatccaccggctgcttcgatcagttcctgtacgtttgttcctgtacgtactttaaagttgcttggattcttgatcgcatctccagtaactgtcacaacacgttcgtataatggtttaccatctttgacagcttctttgatcgctacgatcgtagctacgttatctacgatgcatcctgcatctgctggtaacatgctggagttgatgcttcttcctgttgttgcataaatcaaagaacgttctgcaccctgtgggtattttgtctttaatgtagcaacgctgattcttgcatcaccttttactaatgcttctactttagcaattgcatcttttttattatcttcaataccaatgataccttttgcttttgggaacatatcaagtacgatatttaatccttcaattaaaagttctggtgtctccattaagatgcggtagtcacctgtgatataaggttcacactccgctccatttacgatgatatattcgatcgcatctggatcttttggcgctaatttcacatgtgttgggaatccggctccaccaagtcctacgattccagcttctttgatcgctgctaaaacatcatctttagacatctgatcataaggttttgcctcaaaggcagcctctttgaattctccatcattctcaattacgatagagttaacttttgctccggctggagtcattcttggctcgatcgcctttacagttcctgaaacagagctgaaaatattcgcggatacaaatcctccagcttctgccaccttctggcctactaacacctggtctcccttgctaacgattggctgtgcaggagcaccgatgtgctgacctaaaggtaaaacaacatctccttttggcaggtattcggtgattggtgaattctttgcaaattctttaccatctgccggatgaacaccgccgctaaatgtaaacaatgccattttaagccttcctttcttctttacatttttttccattgcgaaaaaaaagagttctcataaaatgaaaactcctttgaacacaagacttataataccatagtcttttttatttttcaatgtttttttaacaatttctttgcatttgcatacaaaattctatgtttttcttcagattttcttaagattctgaaataatttacaattctggcttttatattctattatttgcggatctgtccatttccataaataataaatttgctggttgtcagtgcatctaatcccattggtcctctagcatgaatcttctgggtactgattccgatctctgctccaaatccaaattcaaatccatcagtaaatcttgtggatgcattaacataaacggctgctgcatcgatctgatttaagaattcctgtgcattctggtaagaatccgtgacaattgcttccgaatgccccgtattataatgattgatatgtgccactgcttcgtcaaagctatcgacagttttcacagaaatgatagaatctaagtattctgttccccagtcttcttctgttgcagggatgacctggtcatttaaagcacaaactctctcatctccacgtacctgtactcctttttctaataaagcatcgatgatcgctggaccgtaactctccaagatgttcttatgtaatactaaagattcacatgtattacatgttccaagtctctgtgtctttgcattgatgatgatgttaactgccatgtctttctgggcaaattcatctacgtatacatgacaatttcctgttcctgtctcgatcactggcactgtagaattctttacaacactttgaatgagtcctgcaccacctcttggaatcagaacatctaagtattcatttaactgcatcatctttgtagctgtctcacggcttgtatctgtcagcagctgaatgctgtattttggcatattgcaggattctagtgcactctggatcacatttgtgatcgcaagatttgaattgatcgcatcacttccaccacgaagaaggcatgcatttcctgtcttaaaacatagtgcaaatgcatctgccgttacgtttggtcttgattcgtagatgataccgacaactcctaatggtaccgttttcttaccgatcaaaagtccattcggtgttttctgcatatgttctacagaaccaattggatcatgtagttcagctacctgacgaagtccttctgccattgcttcgatacggtcaggattcagggataaacgatcgatcaacgcctcgctcatatcattgctttttgcattctctacatctttataattctcacttaagatatattcctgattctgtaccagacatttggctgcttctcttaatacttcattcttatcttcaatccctgcttttccaagaattatcgatgcttcttttgcctgttttcctagttgttccaacattatgaatgcctccttttcggtgcggtttgcatctatcatcaatatgttctatctaatctgctctagtttaatccttttggttttaatggagtaatcgatccatcttcatttttaatacttacattattaagctgcgctcttaagtttgcacgaacagactggatgtattcatgtcttaactttctctgttcttctttctgttctggtgttaacccaatggatttatccagattgtataattcattaattctttgaatatctttttctttcatctgtaatatttcctttctatataatacattattttatcttattatgccttaaaatatgggcgttctgttaaatatttcttgaaatcaaagtctggtcgtttgtgtgctaagaataatgttccgatctcttctcctgcaacaactttattgacattatttaaattattgctgtttacgatcaccatatctgctccagcatctgttacgatattggctgctgcgatctttgtttccattccgccagttccgaccttagttacagctccttttgccattcttccgatcttttcatctaagactggtacttcaggaatcagtttggccagtggattcttgtgtggatcatccgtataaagtccgtcaatatctgtcaggaggatcaatagatcaccttgtacaaccgctgttacgacagcagataaggtatcattgtcaccaaactcgatctcttctgtcgataccgtatcgttttcatttacgatcggaatcacgccgagttttagtaattcttcaaatgtattcttggcgttatatcttctctcgtcattgagcatcgtctcttttgtgatcagaatctgtgcagatccctgattgtattcagcaaacagtttctggtagatcatcattaactgtccctgtcctacagcagaacatgcctgcttcatcggaagggatgtcggacggttttctaatcccagggctttaaatcctacaccgatcgctcctgaagataccaggatcacgtcttttccgctgttatgtaagtctgttaaaacacggactaatttctctaatcggaataaattgatgtttcctgttgctttatggatcaaagaagatgtacctactttgacgacaattctttgtttatcttttagtttttcacgattattcattttacattcactccttgaaaggtattttacactgtaacgagggcttgtgcaaccttaattccatccattgccgcagaagtgatgccgccagcaaaacctgctccctctccgcatgggtagattcctttgatattgctctcaaatccttgatttctctcgattcttaacggagaagatgttcttgcttcaattccgcacaaaatcgtatcttctcgattaaatcctttgatctttgtatcaaaatattgcattccttccgaaatcgcttcactgaccggttctggaagacagtttcttaagtttccaaaacttgtcaatcctttggtattcggtgtgatctcgccaaaggattctgtaatctttccttctctgaaatcttttaatgtctgaaccgggattcttccttttccttcgctaaaagctttttcttcccatttctgctgaaatcttacgcctgctaatgcgtcatttccatcaaaatcctctggtgtaacacttgcgatgatcgcactgttggaattctttgctgctcgatcgtgattgctcattccattgaccgtcaatcgttctggctctgaagacgcgttgaccacgaaacctcccggacacatacagaaggaatacacacttcttccattgtttgcatgatatgttagtttgtatgatgcagctggaagatcatattgatctgctccctttccatactgcgaatggtcgatcatctcacgcgggtgttccacacgaagtccaatcgcaaaagctttaggattcatttccagatcacgatctgataagaccttaaatgtatctctggcactgtgtcccggtgctaagatcgctgcttctgttttaatttcttctttatcattgatgatcagccctgttaattttccatcctggatcacgaaatctgtcactttcgcctcaaaacggacatctccgccaagagatctgatctcttctctgatccctgcaacgacatttcttaaaagatccgttccgatatgtggtttattttcatataagatctcttctggtgcaccatgttctacaaaagtttctaaaacgaatctattccttccgaatttgtcttttactaaggtatttaattttccgtctgaaaatgttcctgctcctccttctccaaattgtacattagattcaggattcagttcaccactctcccagaaatgttctacatctttcatacggtttgtgacatctttccctcgttctaagacgatcggatgtaatccggctcttgcaagcatcagtgctgcaaacagacctgccggtcccattccgatcacaaccggtggatatttaaattcccgctgattttctggaaattcaaacttcttttcttttactgtcatgatattacgattcttgttctttttgaggaatttctcttcttgacccttacctaatgtcacatcaactgcatacacataagataattcttcttttttcctcgcatcaatagaccgttttacaatcttgtattgtttatattctgtattatgtaatgctttttttatcttcttctcaagtgctgcctctttgtgatcgatcggcagcttgatctggttgattcttatcattgtcttcctatctggcttgcagcgatgtatccagatgtaaatgcccactgaagattataccctccgcatgttccatcgacatctagtaattcaccgacaacataaagcccttctaataactttgattctaatgttccttgtatgatttcttttgtggatacgcctccggctgttacctgtgccatatcatatcctttatatcctttgatctcaacttcaaagtgttggatcatatctaagatcctgttaagatctttcctggatatctgagcaaccggttttcttggatcaatctttaatctcagtaagattgcatataccagttttttatttaaaaatccctggaagaattcttcgactgtcttataattgcagctctttaagaatacttctgttgtttcttctaaggttaccatctgtggcatgagatttaaatagatttttacttttttctttcttcttaatgcttcgatcgcaaaatgactgatctggaaaatcgggatccctgaaaccccatattttgtaaactgaacttctccatgttctttggcgatcaattcattattcgcgtaaacgctgacattactgacatttcgaactccagaggtgtcttttaaatattttccttctgcttctaatcctaccaaagacgggaatgtatccgtgatcttatgatgaaagtctttggcaagcttgtatccacttccgttgcttcctaagtttggctgtgcacatccaccagttgcaaggatcagattgcttgactgaaaacatttgtcatttccatagacataaaatgtggacttacgtttctctgctttcgtgacttcaaattctgtcagaatatccacgtgcagatgctttaatttctgtgtcaatgtatcaacaacagttgctgcctgcaaagatgcaggataataatatccattttgctctgtcacaagcattccgagagattcaaagaactgaatgagatcttctaatccaaattcctcgatcatcggataggcaaaggaaggtctctgccctctgtagcaattctcgtccatgtaagcatttgacagattgcatcttccatttcccgttgctaatattttctttcctaatttatccatccgttcaagcaagagaactttcttatgatgactagctgctgtgatcgctgccatcataccagaagcccctgctccaacgatgatcacatcatatttcattcgttatttttctccaaatttttattttaactactgtatgattccagaaaatgatatacttcttctctgttttcaaagataaaattctctttcagcatatttttgatgtctgctggcagattctctttcttcatatctgtatattcaaaaacttctttggtcttattattgatcacagccagacttccatcaagaatcttcagactgtacgttgccttaaccttcttgactgctttggtctgttttttttcagctgttgttgttatctgagaacgaacttccttgaggttgtccttcttttcatttgctgagaatgcaagataacacatacagatgcacaaaactgtgatcacaaccatatatatcatcaaaaatcgattgatcttcttcataatgcaaccctcctttggctatattgttaccaaagataagggaatttatacaaaaagcccaaatcatagcagatctggactttttcttccttttataaatggaagcccttacgatccttacagcaaatgtaatttctttgctaatctgacgatcagatttccttttggaatcttagtaagttcttcttctgtaaatactcttaacttaatgatcgctgcaaaatagatcagtgctccaactggcactgcaatgatcacgcagaccgcaaagcatactcgcccgaatggaagaacgctttgaaccgcatactgaatcagaaaacagacaacacccatcactgctgcacttaatgcaggcttgataaatgtctttgtgatctcctgatgaaaacctgtgtatttcttgatggagtgtgcatttaacagacacatcacaagggaaaatgccatagtcgcaaataccaatccatatgttttacaatctgtgtatgttaataaaagccataatacaacgatattgaccacaacggaaatcgcagaatgtctgactggcactctcatctttcccattccctgtaagataccatttgtcaacgttgacaggcagtagaaaataacggaaactgcaccgatccgaagcatggcagctcctaatcccttagcatatgttgcaccgaagatcaatccattgatcgaactattcaacacacctagtccaaccgcacatgggatcgcgatcatcatcgtaaaacgtatcgccatctggatactgtcgttcatatcgtccttcttgcctaacgcataagctgcagaaacatttggcacgatcgcattagaaagtgcagatgccatcgcaactggaacgttgatcagcacgttatactgaccgctgaacaaaccataaaattctgaaactactttcgccgtaattccttttcctactaagatattactaaagatcgtctggtcgatcgttgcactacagttatagatcgctgtactaaagataaccggtgtgatcgttaataataaaatctttaagatattcccataagattcaatatattttgtacggtcatgtttcatctgaatcttgacctttggctggtatgcacgataaatgatagagcagaagatcaatcctgttaaaacaccgactcctgtaccgatcgcactacctgctgccccatgtcttgcgatctcatatgtgatcttgttagatggcagatatggtaagatcagtacatatgccatcaaaatactaaagatcgcattcaagatctgctcaatgatctgggaaatggatgttggcaccattgtattatgtccttgaaaatatcctctaagtactccaagaatcccagagaaaaagatcgttggggaaatgacctgaagggcaagtgctgcacctttttgatgtccgacaaaggttggtgctccaaaatatgcgatcatggacgcgataccaccaacgacaactgcataaactaatgctccatagaagattctctgagcattgatatattctttcttcgcaagtcttgcagaaattgatttggataccgcaagtggaatactaaaggatgcgatcagcagaataatgttatagatattatacgcataagaatagtaccccataccttctttgccgatgatcccaaacagtggactacgatataataatccgatcacacggcagacaatggatgctgcggctaagatcattccttgcattaaaaatgagtttttgctgcttttactcatactaaacctctttcatctcttgtatatttcgtctttgtcaaaatctcttcctgacgtttttccatatcttttcgttcttcctcttccatatggtcatatccaaacagatgtaacatactgtgagcgatcaaaaaggcatattctctctccctgctgtgtccataattctcggcctgttcccataccttgtccatggagatcacgatatctccaagcagaaattcaccactctccggatcaaatgccatcggatcttcttcaatctttgagaaatccgctggttcttcgtattctgccattggaaaagacagtacgtctgttggtcggtcgatctctctttgttctttgttgatcgcatgaatcgtttcattatcggttagcattaaattcacttcgcactcataagggcagtccacataatcaattgctgcctcgatcacttcatgtgcgatcttttcataagggatattgatctccccttcgtattcattctcgattataatactcataacattcctatcttctgttctttttgttattgttattcttattctttttcgcagatctggctgcttcatattgatcatatgctgcaacgatcttctgtactaatggatgtctgacaacgtccttattggtaagctcacagaccccgatctccttaacttttcttaacactcttagagattcttctaatcctgaaatactgtcaaatggcaagtctttctgtgttaagtcacccgtgatgatcgctttggacccaaatccaatacgtgttaagaacatcttcatctgagcaggtgtcgtattctgtgcctcatctaagataatgtatgcattatccagtgtacgtcctctcatgtaagctaatggagcgacttcaatcaagcctttctccatattcttcataaatgcgtcagccccaaggatctcatataatgcatcatataatggtcttaaatatggatcaactttactctgtagatctccaggcaagaaacctagcttctctcctgcctcaattgctggtcttgttaaaatgatacggctgacttcatcattcttaaatgctgtgatcgccattgccattgcaagatatgtcttaccagttcctgcaggaccgactccaaatgtgatcatcttattcttgatcgcatcgacgtatttttgctgtcctaaagtctttggtttgactgctttaccctggatcgtatgacagatgacatctttatcaagctccaaaagacttggagatttctcttccattgataacgataacgcatagtttacattctgctctgtgatcacatttcctcgtttggataattcgagtagttcatcgatcacggagattgcatgattaactgcctgctgtgttccaatacattttaaatggtcacctctcaagatcagactcacatgcagtgttttttcgattttcttcatataggcatcaaactgcccgaatacattcccgccatgttctgccggaaaattcatttctatttcaactggattcatctaattctcagtctccttctttgtgtatattccttatgtattctaccatctgttacaaagtttttcaacctgagtggcaaaatccatatggcctgattcataacttttatttattgctgcgctgttgttggtgtgatcatttcttcttgtttctttgttaatttcttgatatttcggatctttccgacactttcttctttgatgatcgatgcattaacttcatatcggttgttcttttttttataatttccttcacagtgaacgatctttgctcctgcttttgctttcttcataagatatcgttccagctgtttttttaattttaactgtgcttctttttttgtcaagattttcttctttggcctgtatctttcagttatctgcatcgtgatcccaatgggcagataaaaagatttccctatctttaatgatcttctctttgtcacaacatttgtatgattctgtcttttcttttctggaaaatcgaattgatactgtccaaaatataaatttttgatgctctttttcttgcctgtgatcagcttttcgtaatattccatgggaattgaattgttgtacacctctttagtacgcatcacaatctctccgtccgctttgatcttatccgtctgtgtcacggtaaaatcatcactgtagtaatagatcaatccagaaattaaagttgttccgcttttgacactgtccccaacacttacaagcggtgttccacttttgaccgccatttttgtaatgatccctgatttatttgccacgatatcacatggtttctttggattctgctttgttttacgatctaaagtttcttttatctcaatatgcagtcttgttccctgaatcgaacaggatgcccacgcaatctcagcataatcttccctcagatggtcttccaatgcatcacagtcaatctggtattttaatgttccaatatggtagtagttatccgtaacatactttaatatatcactttctgaatatacttttcctccagaaactgtaatctcccataaaaactgactcagcgaaaggatcattaaaccgcacaaacacatggaaaaaaataatattttacgttttttatgttcttttaagaaatatggcagtcctttttgcccttgtaacgcaagatcaacatttgctttctctgctaatgcttccaacatttgataagaacttcgtctgataaaaaacacatagccgtctgatactggttttaattcccacaatacaagatgattttttgcacagagattcaaaaaacgctctgtctgatatcctttgacttgaaaatacagccttccaaatataaagtgcagaattttaagcatttctcatgctcctttcaaagaatatcatacatattccagccttttgatctttcctttgatcttcattgattcctgtgagtaaaaatcaacctccagatcacatccacagatatttaatacgacatgattcccctgaatggagatcttattctcatcatatgatacgatccccctgtaattttctatgtatgcttcacagtttcctgtcaaggttataatgaaatctccaaacaccacatctcttggaagagaaagtcctttagcaatcacttcttttggtttcttcttcatgcaaaactccttttgtggcatttggtttaatatatgccgaaaaaaagcaccatatacctgttcccaggtaaatgatgcttatcttttcaatcaagtaaaaattatttagattttctcttacgagccgcttcagactttttcttacgtcttacgcttggcttttcgtaatgttctcttttacgaatctcctgctgaattcctgcttttgcacagtttctcttgaatctgcgaagagcgctatctaaagattcattttctttaacgattacgtttgacattctattcccgacctcccctccagtcttgtacttgtgcataggactgtttgggttttaattttttgcactagattagtatatcacattttagatttttgtcaactatgaaatttgactttctaaaatttcttttacttttgctactgcttctggaattccggctggattctttcctccggcctgagccatatttggacgtcctccaccgccgcctccaacgcatccggcgatcgctttgatcaggtttccagcgtgtgctcctgctttctgtgcctcgtctgttaccatggcaactaagaatacttttccgtctttctgggaagcaaggacaatgacaccttctcctaatttctcttttaagttatctccaagttcacgaagtccattcatatcaacgtcttctatagaagttgcaagaagtttcactccttttacttcttctacctgatccataacatctcccagagcgtcttttgcaagtttgctctttaaggattcgttttcgctctttaattcttttacttctgcaagaagtgattcaattcttgtcagcagtgttgctggtgtagcttttaatgctttggctgcttcttttaattcttcttcctgcttatggtagtagttaaatactccctgatctgtcactgcttcgattcttcgaactcctgatgcaacaccagtttcagataaaatcttgaatgctgtgatcgctcctgtattcttcacatgagtaccaccacataattctacagagaaatctcccatggatacaacacgtacttcgtctccgtatttctctccaaacagtgccatagctcctgttttcttagcttcttccatagacataacttttgtcacaactggaagatcctgagcgatcttttcgttgacgatcttctcaactcttgcgatctcatcatcagataatggtgagaaatgtgtaaagtcgaatcttaaatgttccgcattatttaaagatcctgcctgctctacatgagttccaagcacttctcttaatgctttctgtaataaatgagttgcactatggttctttgcacctaatgctctgttcttctcattcactgtaaagactgctttgtctcctacgttgaatgttccttcgactacatgtccaacatgtccaaacttaccaccggataatttaatgacatcttctacttcaaaagatgcatctccgctgatgatcacacctttatctgcttcctgaccaccacttgtagcatagaatgctgtctggtcagcgacgatcgttcctttgtctcctttgttcagagttgaaacaacttctgtctctgttgtcatagctgtgatctcaccttcacaagtaagttcatcatatccaacgaattttgttgtcatggctggatctaactgttcgtatacagttgcatctgcacccatgtagtttgttgtctttcttgcagctctggcagtctctctctgaacctgcatttctttttcaaagccttctttatctacagtaaatcccttttcttctaagatctcgatcgtcagatctaatgggaatccatatgtgtcatataatttgaacgcatctgcaccagcaagctctttgctgcctttctcgttcatagctttttccatatctgctaagatagacagtccctgatcgatcgtcttgttgaactgtttttcttcctgagataaatgattgaagataaattctgctttctcttctaattctggatatccatctttagattcacagatcacgactttactgatatctgttaagaacagatgatcgatccctaataatcttccatgtcttgctgcgcggcgaatcagacggcgaagaacatatccacgtccttcgttagatggtgtgataccatcagataacataaatgtagcagaacgaatatggtctgtgatcacacggatcgatacgtctgtctcgtggtctgtaccataagtaactcctgcaactttacagatttcatcgcggatcgctttgatagaatctacgtcgaagatagaatctacttcctgtacaacgactgcaagacgttccagtcccatacctgtatcaatgttcttattctctaattctgtataatggttgtgcccatcattctcaaactgtgtaaatacgttgttccatacttccatataacggtcgcagtcacatcctaccgtacagtctgggcttccgcatccgtatttctctccacggtcatagtagatctctgaacatggtccacaaggtcctgccccatgctcccagaagttgtcttcttttccaaaacggaagattttctctggtgcgattccgatctctttctcccagatctcgaatgcttcatcatcatcttcgtatacagatggatataatctgtcaggatctaatccgatcacttttgttaaaaattcccaagaccatgcgatcgcttcatgtttgaagtaatctccaaaagagaagtttcctaacatctcaaagaatgtaccatgtcttgctgtcttaccaacattctcaatatctcctgtacggatacacttctgacatgttgtcactcttgttcttggtggtacttcctgtcctgtgaaataaggtttcagtggtgccataccagcgttaatcagtaataaactgttatcgttctttggcacgagtgaaaaactctttaatgctaaatgtcctttactttcgaaaaactcaagatacatcttcctgagttcgttgactccatatgctctcaacgtttcatcctcctagtgtcgtttcattatatttaagaagaccttgcctttacggctttttagctgcatgagcctgtattctcatgcagctaaatgatcttctcttaatcatgtatgatcttatgattctttcttctttgccttcgcacgaccgactccgaaataaattcctgccgcagagcatgcaaaaagaatcgcaaacttcaatacataagagactaattctgataaaaatgctgtcataatcttgcctccttatcttataaagtcgattataccaaatcgaacttagaaacacaaatattttctcacaaagattacgttcttaatcttctttttctaataaatctgtgtagaagcaagaataatttcctgtatggcaggcagccccgatctgttttaccttagcaagtaaggtgtctctgtcgcagtcaatatataaatctttgacatactgataatgtccggatgtctcccctttgatccataattcatcacggcttcggctgtaataagtcataatccctgtctcgatcgtcttatcatatgcttcttttgtcatatatgcgaccatcaaaacttcatttgtcttatgatcctgtacaacaacggttaacattccgtcgctgtttaatttgaattcatcaaaactcatcttgctatttaatggttttgcctcattactcatcttataaggctcctttcgtggaaagtacatctgtgatccttggatccatgctggttgcttcatccaaagcttttgcaaatgctttaaatgctgcttcgatcatatgatgattattctctccatgtaatttcttcaaatgaagattcatcatgctgccgtaagatactgcataaaagaattctcttaccatctctgtgtcaaattctccaacgcgatcaaccgtaaaatcacaatccatcacaaaatatggtcttccagacagatcgatcgcacataacattaatgtctcatccattggaagcataaatgatccataacgtttgatccctttcttatctccaacggcctgtttgatcgcttctccaagtacgattccgacatcttcgatcgtatgatggcagtctacatagagatctccctcaacttccacatcaagatcaaaaaatccgtgacgtgcaaatgcatttaacatatggtcaaaaaaaccgattcctgtatggatatttccatttccatttccatcaagatcaatggaaagtttgatctttgtctcacttgtatttctctcaattgatgcacttctactcatatttttatccttcctggttatcttcaaatcttactttcatggaattagcatgtgctgtcagctgttcctgcttcgcaaagaattcgatgtctttgtgtactggctctaaggcttctcttgaatagtagatgacacttgatttcttgatgaaatcatcaacacttaatggagagaagaattttgctgttccatttgttggaagtacgtggtttggtcctgcaaaataatctcctaaaggttcacagctgtatgctccgataaagatcgctcctgcattcttgatccttgtcataacatcaaatggatttgctgtcatgatctccatatgttcagacgcaatagcgtttgccgtatcaattgcttctttcatatcgcttgcaacaagaatatatccgaaggaatctaaagatttctccatgatctcttttcttgataactgatttaagaatccgtcaatctcatcagatactttacgtgctaattcttcgcttgttgtaacaaggatcgcacttgccatctcatcatgttctgcctgggaaagtaagtctgctgccacatatcttggattcgctgtttcatcagctaacactaagatctcacttggtcctgcaatggaatcgatacttacgtttccataaactgctttcttggcaagagccacaaaaatgttaccaggtcctacgatcttgtctacttttggaatagactctgttccaaatgccatcgctgcaattgcctgtgctccaccgactttatatacttttgttgctccagcttctttcgctgcaactaatgtatttgctgtaacttttccgtcttttccaggaggtgttgtcatgatgatatttttcactcctgcaacgtgtgctggaacaatgttcattaaaacagaagatggataaactgcttttccacctggtacatagacaccacaagtttccattggtgttactttctgtccaagcattactccgtcttctcttgtctcaaaccagctcttctgaatctgtttttcatggaaatcacgaatattcttgatcgctttgcggataactttgatcaattcatcgtccacttcttcgtaagcttccttaatttcttcttctgtaactaaaatattgtctgcgttgatctccgctttatcaaactgtgctgtataatcaaagacagctttatctccattatctctgacatttttgatgatcgcatcgactttatcctgaaaatccccatagtttgtaggacttctctttaataaatctgataaaatatttgcaatggaatctttgttaacttttactattctcatatttctctcctccggcctattctttttcatccaagatcttctttagtgcaacgatgatcttgctgattcgttcctgttccatcttctggcttacctgattcactaccattcttgctgataatgggcaaacttcttctaagacttccaatccattttcttttaaggttgttcctgtctcaacgatatcgacgatcacctctgataatccaacgatcggcgcaagttcaaccgatccgtttaatttaacgatctctaccgtctgtaatttctgattattgaaatattctttggcgatatgtgggtatttggatgccacacggataatctcattactgtttaaatatttcttcgcttcttttggtccacacacacacatcttgcaagctccaaatttcaagtctaatacttcgtatagatttcttccttcttcaaggatcgtatcttttccaacaacaccgatatcagctgctccatattccacgtaagttggcacgtcacttgctttggataagaaaaattttaattttaattcttcgtttacgaagattaattttcttgttttctcgtctttcatttcctcgcatgtgatcccgatctcttctaataaagccatcgctttctttgcaaggcgccctttcgccagggcaaatgtaatatatctcatggtcttttgtttcccttcttttgctcgatttgttgattagatgaaataaagaattccaccgaggcgatgctctttagcaaatctttcatagtctgatttgctgcacagatcattctttctctctaagatgactttctttccttcttttcttaattcttctgctcgaaggatcgcatctttcattgttgcttctttataaatgatcattgtatccatatgatctgcttccatatgaattccctgacggcttaatgccatcatcagctcatctaatacgatcgcaaatccaactgatggggctttctttccgaactgttcgatcagattatcatatcgtccaccttttagaactgcatctcctgttccataagtataacctttgaaaatgattcctgtgtaataattatgcttatttaacattccaagatcaaaacttacatactgctctttgccgtataattttaagatatcatatacatcgcgaagtcttttgatcgctttcttagactgttcattctcaaccattgcttctgcctgatctaagatcgctacatctccattcagttcgttaaaatgtaaaaatacatctttgatcttatcagacagatctaatgtctctacatattccattaatccaaaataattcttatttaagatcagctctcgaagctgtgttttgacttcttcatctttgatcgtctgtgttaatccgttgaagaattcaacttctccgatagaaagtctgaaatcagtcaatccagctgccagaaaacaatcaattgccattgcaatagattctgtatctgcctgtacagacgcatcattgactaattctgcacctaactgacatgtttcttttaacttcaactgatagcttgagttatttaaaaatacatttcctgcataagataaacggattcccatattctcttcattaaaatactttgcgatacagcgtgcaatggatggtgtgacatccggacgaagaactaaggtatttccttctctatcgaagaatttaaacatttcccttgcggatacggttcctttttcactgttaaatacatcaaagaattcaaatcctggagttctgatcccttcatatccgtaagatgcaaagactttgtttaattttgccttcagcttacttcgctgtccatattctgttccatatacatctctgacaccttctggtgtgtggactctctttttattcatatttttgccgctccttgatactttatcgaattaaagtgctacttaggtagcacatcaaattatctgtattttaccaatccttaacttatttgtcaacctcgttcactctaattcatcttttgatatgttacatgaaattcctacaactgagaaacaacttcttcgatcacctgatccatgatctctaccggatcatatacaaggtccacgctgcaatattcacaaatatcctctaatgctccaaaaatccatggatttcttgctttgatcgtcttcattcttccattctgctgcacaaaactgataaagaatcctaatgttctgctgatctcatcatcaccctcttctaaaatatccattgtgatcacaccgccatcggtattatcatatgccataaataaaagtggattctttggacgctccccttcttcttccccttctaccataactggaagataagtaaaatctaaaatcacttcaagatcgatctgtttttgatcctttaattcatcttttaattcctgatcttctaacatcactgacggaaattctttttcagcttctggtatctcttttacaaacatttcccaagtatcattttcagtattataacggcgaacgattccttctgcctgttcgatctctggatttaattctccctgtcttactgcttccactgccatatacaggttctcataagtttctataagaagtgcaacttcatcttcatctaactgatatggtttgtaacctttcttataagaaacaaagtaaatccagtcactgatcgtcttaaaacgaatatctaattcatcgataacttttctttgttcatctggcacattcatcatgcttccccagaagcatgtaagacttgtatgttcatccatcagatactgtgctggaagatccccttcttcacttccaaggatcatatagaaatctcctaagccttcaactccatcaaagactgcaattcctctttctccgctgaattttcccatcacactgcaaaatacaggttcttctctgtcttttagctgaatggttacaagttgtgtgtcaccaaggtaattccaaggctctaatttgtctagttttaatgtaatgtcgtataactgcttccatgcattctttgacgcttcttttctcaatgacttgtcctccatagattattttattgtacacttaatattcattataataagaaatgattttaattacaacaaaatcccgactatctttctatgatttgtgaatttgatcgttttttctttatactttttcgaatttctgatataattgtttgacggatttatcttattattttaaattagataactgattttattaccaggaggtatttatcatggcattcgacggatttgtcatttcaaatattatatcagaacttaataaacagatcatcggtggcagaatctataagatttatcagccagaggccgacgagatcacgcttgtgatcaaaaaagagagattgacaacaagacttcatctctcagccagtgcttctcttcctcttgtctatttatcgaaagaaggaaaagcaaaccctatgcaggctccaaacttctgcatgctgcttcgtaaacatatcagtagtggaaggatcatttcgatcacacagcctgactttgagcgtattatcgaaattaagattgagcatctggatgagcttggagatgtctgtcagaaacgtctgatcgttgaaatcatgggaaaacacagtaatatcatttttgtaaacagtgatgatgtgatcttagatagtatcaagcacatctctgcaaatatcagttctgtcagagaggttttacctggacgtacttacacatttccaccgtctaaagggaaacatcctttagcaagtctgactacggagaatttttatcagcatatcatcaccaaaccactgaatctttgtaaagcactttatacttccatcacaggtatgagtcctttgatcgcaaatgaactttgttatcgtgctgggctcgatgggaatgcatctactgattctttgaccgatgatagtgctgctggattatatggccagcttgtaaaattaaatgctcttgtagaagatgaggcatatcagccaaatatcatttattctggggaagaacctaaggaattttcttgtattcctttaacttcttatcctgactgtacagagaaaacatatgattctatttttgacgtgctgatcgggtattattctgagaaggaaaaatatacaagaatgaagcagaaatcttctgaccttcgtaagatcgtgcagactgctcttgagaggacaagcaagaaatatgatctacagcttcgtcagttaaaggataccgagaagcgtgagaaattcaaagtttatggagaacttacacagacatatggatatggactagagccaaatgcaaaatctttaacttgcatgaattattacacaaacgaagagattacgatccctcttgatccaacaaagactcctttggagaattccaaaaagttttttgcaaaatataataagctaaaacgtacttatgaagctctttctgagcttgtcgtggagacaaaagctgatcttgatcatctcgattcgatttctactgctctttctttatccgaagatgagaaagacctgcagctgatcaaagatgaactttctgattatggttatataaagagccatgggaagaaaaagggaaagaaacaggcaaaatccaaaccattacattttgtctcttctgatggtttccatatgtatgttgggaaaaataactatcagaatgatgaattaagttttaagtttgcaaatggcggggactggtggttccatgcaaagaatatggctgggtcccatgttattgtacgaaaggaacaagcggagactcttccagatgctacctttgaagaagctggccgccttgcagcttattattccaaggggcgtcaggcaccgaaggttgagattgattatgttcagagaaaagaactaagaaagccgccaaaggcaaaacctggatttgtcatttatcatacaaactattctatgatgtgtgttccgaatattgatggaattgaaattgttgaatagacagttgtatttataatgccaaaagaggcgaccgaaatattttcggccgcctcttttcatatgattatatgagttaagaaaaaaggttgttaatttgatttttggttgattttattgatattatttcgactacattgcttcgtagattgctacgacatcatctaaaatcttttcatctgtgattccagatacttcttttaatgctgcttttactccgtttgctttgatcttatcctgtaattctacgctctgtggatcttcagcattatcatattttaatgctgctgccattcctgctaataatgcatccactggaagaccatattctaatgctgtcattgttggttttgttaaacgatctgttgcacttaattttcttaatggttctctacctacacgagctgtatcatctacaaggtatgggtttttgaaacgatttaagatcttgtcgatgtatttaaagtgagcatctttgtcaaatccatatttgttgactaatgccataccactctgctgcattgctttttttacagttttaaagatttcttcatcagcaatactttcatcgattgttttgaatcctttgtagtttccaagatatgctgtgatgcagtgtcctgtgtttaatgtaaataattttctttcaatatatgccattaagttatctgcaagattcattccttcgatctgtggaacagctcccttaaaggatgcttcttcgacattccattcataatagttttctacaacgacgtcgattggattatctaaacgtactggaggcacgattctgtctacagagcagtctgggaatcctacatatttgtctgcatatgctttttcttcgtcatttaagtttccataaacagcttcttttaactgagaacttgctttgactgcattttcgcaagcaatgatgtttaagtattcttcagaaccattttcttttcttgctttgattccttctgcgatagatggagcaatgattggaagaattcttactccaacggctgttgtgatgatctcagcctcttttacttcatcgatcagttcaggttttgttgaatttactccgctgatatctgtgatcacgatctcgctgctttctacgtcttttacaaaaattgtatatttcttatcttcgttgatcttatcaatgatttcctgatttacatctgcgaatactacatgatatcctgctttgcttaacagtccaccgataaatccacgtccaatatttcctgctccaaactgaattgctttcttcattttcttcactcctaaaattaaaatataaatctataagtatatatcttaggtatttaataagcgagaagaatttcccgcttattaaattgacctttttttgtttaaatcttatttaaacatttccatgatttcgtcaacattttctgttgtttttaactgttctaatctttcaggatcttcgatgatctcagagatcttagctaataatccaagatgttcatcaccgattccagcaataccaaagactaactgagctttttctccatcaaagtctacaccttctggatactgaagcattacgataccagttttctgtactttcttcttggcatctcctgttccgtgaggaattgctacacctaatcccatgtatgttgtaactgtttcttcacgttttaccatagcgtcaatataaccttcttcaacatatccaagttcatttaacagttttcctgctgctttgatcgcttcgaatttgtcgactggttttaatcctgttttgattccttcttctacaaggatctttgcatttccagtaactactggtgtttcaacttcttcaacagctgcagctgtctgtgctgatgcatcaacttttgctgtcatctgttcatataatccatctaagtttggatcctgtaagaagttattgatgataactaactgtgcctgtggtgcagattttctggctctgtctgctaagactgcctgaacaactgcgatatcacaatccgctgggatgttatctactgatgtattgatcactgtaagatctgggcgctgtgctttcacacgatttctgaattttgtagctcccattgcagatgatcccattcctgcgtcacatgcaaatacgatcttcttaactttatctgcgtctttcttctctcctgggtcaactgtgattcctttagattctgctttctttgctgccatatcgtcctgtgcatcttcaagactcttaccatctgacatacgaatgataggtgatgcgatcaagaatgatactacagttgcgatcagtacacctaagatcgttaatggaatctggctctttggtgacattgataaataagcgatgattgatcctggtgaagatggtccaataagtccgcattttgtaaatgtgaagaatgtgatcgcacaaatgttaccaacgatcggagcgatgatcacgattgggttcatcaggatatatgggaagtaaatctcatgaataccaccgaagaaatgaatgatgatcgcacctggtgcagatgattttgttactttgtctttagagaatactgcatatgctaataatactccaagtcctggtcctgggtttgcctctaacatgtacatgatagatttaccagcttcttttgcctgttcaataccaattggtgtaaagataccatggttgatcgcgttatttaagaataatactttggcaggttcgataaagattgctgctaaaggtattaattttgcttttacaagtacgttaactcctgctgttaacactgctaatacggttgacataaatggtccgatgataaagtatccaatgatcgctacgatcattcctaaaataccaacagagaagttattgatcaacatctcaaatccggctggcatatgtccgtccattgctttatcaaatttcttgatgacccatcctgcaaatggtcccataaccatggctcccattaacattggctgtccatcaaatccaccaactccggcgatacaacccatgactgcgattgcacccataactcctccacggtctccaccgacctgtttaccacctgtgtaggcgattagcattggtaataagaatgttaacatgtatggctgaattgatgctaacttcgcatttggaatccatccatctgcgataaataatgctgtaatgaatccccatgcaatgaatgctccgatattaggcattaccattgcacttaaaaatttaccgaatttttgtaatccatttttcatttacaatatcctccttttgtttttatcttctcttcattttattttcgtaatagttaccaagacttgtttcaagttctgcctcgactgcatttctgtttttgtcaaataagtaagtgatgatctggtctttctcggctaatgctccgcttatttcactcataacttcgcgataaaccttacttccatctccctgtggaacaagcatcaagatcgcacccttgattggctgcccatcttcaatgatctcatcatttaaatagacaaaaccaaatctgcaatgtctgatgccttttgtttcacaatgtaaaaataatgcattcatactcggaataaatgtgcttgcgatattctcgcgtttgtttaatgcaaaagtaatctctgttgctgtcgtttcatttcttgcaaataattctcctgcatattcgatcaattgtttcttattcttaatgttttcacctgttgatattttaatgttatctaatacctgtaagatctcttctccaagaagtgtcatatactcgatgtcttctcttccaatccttttgactggttttacagtctttatgggattttttcttttcttcttgtcgatatttttgatcatggcattgatcattttcttatctgtctctgttaaaatagagttcacatagacatttggaaatgtcagatttaattttgctgtggaaacgataaaatcaattccttcttcgatcagctcctcttctttgatctctgctgtcgagatgatcttttgtaccatcagctgcggaaattctttcttcagatgaacggctagcatatgggatgtcccaactccatgtgggcaggcaacataaacagataacttttcttctttatctttttgctgttcaaccgctacacagaagtataatgcgataaaccccatctccccttccgggagtttttttatatgtaattcttcttttaagaactcacacgctttgatcgttgccacataaactttggaatatttttcttctaaaaaatcaatgtattgattttccgtaaatacaccttgtttcattcgattgatcgctggtttcatatgattacataatccatcgatcaacactgcattctcaaaaaattccatttctaaaagtatttccatctcagcaatgatccgcatgaccaactgcctgactttaaaactttcttcatcgatcttattctcacttttgtttttccagatcttcgctgccaaaagctgcattgctatgttatatacttctccttgtgagagctgatgtccttcaaagttgcttaacttgcctcccagccattttgcaatctgatattctggtaaatgagtgatcgatctgacgtctttctcttctttgatctcatgtcccattcttaccctgttttgtgtgatcaataaatacaagcttaaatgcctaatggaatggtcagtatattctatatctaacactccctgcatatttttaatgatatctcttgtatcatctaacacttcttgcgtaagattcggaaacattcgttctttgagttttttttctttatcaaacaatacttttaaggaatgtcctcttaacttttgtctcaataccattgtcactgcctgacggtaatcttcctcttttccttcccagtaaattcccattcccggtcttcggtaaagagtcagattatagtgatcaagccatgtttcaacctcttccagatcgttgcttaatgttgcatccgaaatatgaaaaagggatgtaaagtaaaaatatttgagtggttcgttgatcgttaacagttcaagtaatatgatcatctggcgatctgctttactgtatactggcttgttctcatccatatctacgagttctttaatatagtttcttgtttctgtatcttcatccacatacatcccgattcttggtttcttgactagtttaaagtcattctcctcaaaccattcgttgatgcgaggcatttctcttaatacggttcttgaacttaatttcagtttttctgatattgcctgtattgtaattggatcgtcagcattaaaagctgctaacatctcaatgataagtttctgtctttttgttaatccggatttcttagacactctgtatcatcccctttcacgtattattatatatacaatgggtggtttagacaagcaattgatatgatggttttgacgacattcaatagtgacattttgttgtcagtatttatagtctgtcagtattatttcatgacaagttttgattgtaatagtgttgcatgtatgagtcagaaagaagataagaagaattatttataagaaaaaaggatgacactccgcatttttgaaagcgttttttacaaatcgctgatccgcgcctgttccttcgataactgatatgtaatgacctttgtcaatagtaaattaacagaaatcacaacaaatttttattttattg

SEQ ID NO: 619 - DNA, 65843 bp, Unknown
  gut microbiota DNA sequence
cttgtggtatttcgtatctgatgaatgatgcactgttgtatctctgtctgtggaaatacagcttcgattgtctgtggaaatcctgtcagtccatccacacatgtgatcaaaatatcttcaacgccacgatttttcagcccattgatgatagaaagccaaaatttagcactttcattatcacccacatacattccaaggacttcttttttaccatccatgttgaccccaagagcgatataaacagcacgttttacaattcggccttcacttcgcacatgatagtggattgcatccatataaacaactgcatagacttcttccaaaggtctttcctgccattcttttacgatcggaaggatcttatctgtaatcctgctgatcgtactgtctgatatatcaatgtcgtagagttctttcatgtgagattcaatatctccggtcgtcatgccttttgcatacatggagagaatcttttcctccatgtcctgggtaacagtattctgatattttttgattaatctgggttcatattcgccattacgatcacgaggaacagcgatttccatatccccataactggtatgcatggttttcccagaatgaccattgcgactgttattggtatctttattacgataatcatatctggaatagcctagttcctcattaagttcttcatccagagcaccttcaaggatcactgacatcatatcacgcatgattgcattaacatctgttccattttttacactgatatcattgtcctttaaatatccttgcattaattgtcttaatgctgctttttgtggtgtgtctccttttcttcttcccataaaaaaacctccaaactgagtaatattatcttacatcagtttgaaggtttacacaaactttgggatactccctcccttggacccactctcgttcagattcgcacgtagcggacactaaattcgacagcgacgatgaatcgtcactgctcattaagtgccgacgagctcatatggtccaagggaaacaatctattttttatatatttaaattttgtttattgataagctgtaggtatgagtgactgctcatgagtattggattttaactttagttttataataaaataaagattttaaatgcttgttctcattcccagggtacaatgttctaaaagtttttcactatttatgatttcaatttgtctccttgataagagaagctctcgccattgttacaagatctgctttgtctgcttgtaaaacactttctgcaatttcaacatcattgattcttcctactgcgatcactggaatatctaccacttttttgatctctgctgcattttctacatatgctgctcttggaacaacagatggtggaatgatcacgattcctcgatttctaatccacctgggacatattcaaccgctgacattctgtataaaactgaataatcttttccgcatttttccttaatattctcaatgatctccattgcaaatcttgcacggtttcggatcgttcctccgtattcgtcacttctcttattggaaaatggagaggcaaatgctccaatcagatatccatgtgccccatgaacttcaactgcatcaaatccagcttcttttgctcttcttgcgcaatctccgaattgctcaaccagttcatgaatttcttctactgtcatttctcttggtgtctctggcattgttggatcttttaacgcggaaggtccgattggctgttctcctgtgatcgcactgcttgtctctcttcctgcatgataaatctgtgctgcgatctttccacctgcttcatgaattcttcttgttaactccttatggctttcaatctgtccatcttcccataatccaggaagctttttaaatccacctgcagttggtgtcactgcataatcttctgtgatgatcagtccccatccaccttttgctttatgttcatgataggcaataaatttctctgttgccattccatcctcagaacaatagtttgttaccattgctgatacgaccatactgtttttaagctccatctgattgattttaaacggttcaaatactttcattttactgctgctccttcctttcatatccgctatccttttgataactttactatagtctgattcctggaattgttctccctcatatgagggagaaacgaaaaaaagtagttataccaaacatttttgtttcatacaactacttttgtttatattattcatttttctaataaattaaaattctttttttagcataattccttcagctattttcaatgacaggaaccaaatgacaatggaaattatatatatagaagcccatagtgtaatattttttaaatacatttgattcatcacgatgtcaatcagctcaatccctgccgtttcaaacattttgaaaaagaagataacaacaaaaacaatccctccgatcatagctgctaacgcgattcttcccttctctgcttcatattttaatagaaaaggaagggccattgattgaaaaatcaatagcattggaatattgagtaagactgtcatcacaatttcttctgacctcattaacaatgtaccttttgctgctgtaacgatgactactaacaatatacctccaatgactgttatcattccccaaaagaggctaaacagatatttttctcttgtatattcttttctgctaaatggaagcgtaaataaaaacgcattgccattatcaaatgtatcgtaactgatcgtactgattgctgtcatgattgtaatcacagacgtataggtaattgcaaatgatatttgatccgtagcgattaagattcctgctgcaactagccagatcactgccagatttttttgttgtgatgagattaatctgatgtcttttgtccataatcctttcatcttctacaccccctgtatcattaatgtaatgatctgatcgatcgttcctttttctaccacgatctttggataattctccagataaaattgtttctgatctgtaagacatgcatatccataggattctttcttcatttttattatatattgtggatctagtgtttttgactgttcttcatcaacctttaagatcgcataattacttaataaccggtctgtttcttcgtgcaagatgatatttccttcattgatcatataaatattatcacataaggtttcaagatctgttgatatatgagaacttacaagaatcgaacgttcttcatcttcttccatataatctcttaacatatcaagcatctcattccttgccatgacatcaagccctgccgttggttcatctaagattaatagttttgctttgtggcagattgctgtaattaactttaattttgctttcattccaacagaaaactgttctagttttttgtctgttggcaactgatatttctctatatagtttgtaaataactgttcatcaaatgcttcatatgtattttttagaatatccttgatgtcttttactgtaagatatctgctaaaaccagaatcagaaagtacgacaccgatctgttccttatcctctggttttatatccttgacattccttccaaaaatctgaatatctcctccatctatgtaaatcaatccaagcactgcctttaaagttgtgctttttccagatccattcggacctacaaacccagtgatcatcccctcttttacttccatggaacagttgagggtgaaattcttatattgtttctttaatttatcaatttttaacataccttatccctccaatattaactcaaacaaggttttgatatcttcatcactgatgccaaaacgccttccttttagaattgcttgttctaagtcctgttctacttccttcttttgctcttccatcatcaactccgtgttcgccgctgtcacatagctgccttttccatgaatcgttactgtaaagccttctctttccagttcatcgtaagctttctttaccgttaaagcactgatctttaattcctttgacaatgcccgaacagatggcagctggtcattctgctttaattcttgctttcgaatcattgttttgatctggtctatgatctgctcatagattggaaccatggatgatgtgttgattatgatcttcattttgtatcatcctcctttacttataaacagtgtataacagtatcgaactgttgtcaactgttatatggtgtttgttttaaaacaaataaaaaatagagttattgcattatcataataaaagttcaaaaagaactatagataacgcaataactccatttttatgtttaaattttatataatttaataatattcttctacatatttatcagcaacttctttatccaaagaaaagtcctccatgatattttttattgtatcttctcttgatgcttccatcttcttataaattttaattgcaccctctactcttccttctatccttcctttctctcttcctctttcttctaattcttctaaggccttgcacatattcaactcaactccttcctgttctaatttcaatgaatcatcaattaatttctgcgtttctgtaattgaacctattaccattccaagttctggtgatattgttttttctttttattccatttttaattcattgtcgatataatttttaacaattcttgcaattaattgatactatcttcaaatatttataaaaacaaaaatagagattggagtacaaaataccatcaatggcattcatttttcatacttcaatctctatttctatttttatgaatattcaatacacttctgtattacaatctaatttttctcatccatcaatccaaactgtatcgtcacacaagtagcaatgatcaatccaaacatataaaatgaatattttaacacattaagtggtgacacatctgcgagtgccgtgatcattaacatacctccatcatgtggcatcaatgagataaatgcacaggcaaaaatatctaccagactggcaagtctctttggtgcaatcttgtatttttcaccgatttcttttgcgatcggacaagtaacaataatagcgatcgtgttatttaccattgccgcggaaagaattcctgacatcagcccgattccatattctgcaccgcgtctgttcttgatcttgccactgatcgctcctaccagccactcaactccgccatattcgcgaacaataccaatgattccagataccaagatcgcaaccatactgatactaaacatatcactcataccatttccaattgcctgaatccagtcaaagaatccgcagcttcccacacaaagtccgataatacctgcagagaggattcctacaaaaagtacaactgcaacgttaatccccatcaatgctgctccaagaacaataagatatggaaggacttcaatgatattgtaacttcctgccttgattgctccacttccagtacctccgaccactgaataaaggatcattgccacgattgcagccggtaatgcgataaagaagttcatcttaaacttatctttcatctcagaaccgcatccttctgctgctgagatcgttgtatcagagatcatggaaaggttatctccaaaataagaacctccgatcactgctgctccaacgatcgcaacatttaagtgtgctccctgtgccacattgatcgcgattggtgccattgctgcaatggttcccatggatgttcctattgatgtagagataaaacagcacattaaaaatacacctggaatcaaaaatgttactggtatcacatgaagacatagattaacaacagaatcttttcctcccattgccgctgctgctccctgaaatccccctgccatcagatagatcaaaacgatcatcataactccagaatttcccatgtttgtcgtcataatgtttaatttatcttttacatccatacttctgtttaaaagaagtgctaccgcacatcctgccaaaagtgcgacatgacgtggaaattttccaaatgggtcgtctgctcccatcaaggtaaatgtaattccacatcctacataacatactagaaatacgatcagtggaagaaaggccacagatcctagatttttcttttgtttctccatttcttttcctctcaatcttaatatatatccagataaatctgtcttatttctctgccagatgcttatccagtgcattttttaactgtgtcagtgcctgctcaaccgtcactcgtggacacgcaacgttgaaacgctcaaactgtgctgtctctggtccaaagatgattccagaatccagccacaattttgcttcttctaacattaaatgttctaattcttcattgctgaatccatatcctgagaaatcaacccataccagataagttccttctggctgtaccatggttgcttttgggaaattttcttttacaaactgattcatatattgtacattctcatagatatattctaccagctcatctacccagtctgcaccttttgtatagcacactttcacagcaagctgtcccattaagcttccctgactgtaagctgcctgtgtattagcccattgatatttttttcttaattcttcgtttggaataatgatatttgctggctgtaatcctgcaacattaaatgtctttcctggcgagctgtaaagtgcaatgatctcatgaaattttttatccagattcatacagcttgtaaactcatgtcctggaaaaataaaatcacaatgcatctcatcaaccatccagattacgttgtattttaaacagatttctgcgactttttccatttcttctcttgtccagactcttcctactggattgtgtgggttgcagaagatcagtgcttttacattttcttctttgatcatttgttccattttttcaaaatcaatggaataacgattgttttcataacgaagctgacagtttaccagttttcttccatcatttttgataacttcactaaatggatagtacactggctgcataaccatcatggcatctccttcttcggtaaatgccttaacacttgttccaagtgcataaacgattcctgctccaagtgttacccattctggtttgatcgtatatccgtatcttgttgaaaaccagtggttcattgcatcaaaatattcatctaagggatccgtatatccaaaaatcccatgatcaattcttttatgaaattcatcaagaatctcatctggcagacgaaaatccatatctgctacccaaagaggaagcaggtcatctcttccttttctcttcattccaaaatcgtatttcaaacaatctgttccatgtctgtcgattacttcgtcaaaattgtattttcccattttctactcctgtgttgttttttctgtctttttatactggaacatataatatttcatttttaccaccacagatcatgccaagtgttgcactctgtgcattcgatagatcatattttttccttgtgatctctttcatcgatggtgcttcttccataacagttttttctaagtttcctccaccaatacttccaataattccatcttttgtgacaagcatcatacttccaacacctcgtggagatgaaccggatttctttgtgataatacacagcactcctgattcttttgtctcaaaaagttctttactcatcgtactttctgtttcgtgatttttgattgcgatcatctctgctgcgatactgattgcaatctcttctggcgttcttgcaccgatctttaatccgattggtgcatggatcgtgctgatctgttcttcactgtatccttcttctttcattatctcgaaggtttttgcaacttttcctttgcttccgatcattccaagatagagatatggtcttcgtaataccgtttctgcacataatctgtcatttgcatgtccacgtgtgacaaccacataaaatgcgttatcttgttctggcaaaatatcttctatgtcatgaaaatctctgcagtaaacttcatctgcttgtgacagtttctctggatctgcaaattcctctctgtcatcgatcataatcgtgtagaaatctaaaaatttcgcaatccggagtaactggatcgctacatgtccagccccgaagataactaatttcggctgaatcttaaaccaatcgtccttgatctgtgcgacatctttttcttcctgtaagaatcgagcgatcactctttgatatagtgtatctgcctgtcctggatatactttgatttttgtatctttatattgctctctcaatggtcctagatatcctttcttcagtaatttttgtaaatgcagcggtgtaaggatcgtatcttctttaatctctaaatccttatccgctaatgaaagtctgtgaacaaccttgctggctagtttcccaagtgctgacattccgatcacaatatgaatctcatcgatattttcagggatcactggttcataatccgctggaatctttgccggcattcccctggaaccatcggcttctatcagcgtgatatctgcttcttttactgcagtttcatagaaatcttctggtaatggtccgattttttgtactaacgcattttctggcgtcgcaggcattcccgccatacaatatccggtttcatttaattgctttcgaatatcttctatattttcagggatcacggtatcggattcctttttcatatgagttgtcgttgtgacaaagactttctttccaagacttctataatactgtgctaacttatgaactctcgttgtttttccaccggaacctgcaactgcaatgatcatatctttttcctctttattcttctgcaagagtcttaactgcatttattatctggttgatttctttcattgttgtctcatgtccaaaactgaatcttaccattccctgctctatcgtaccgaaatgttcatgtaccaatggtgcacaatgagcacctgaccttgtctgtatctggaaacgtcccattaattcatcactgacacttccagaatcatattcttccagattgatcgaacaaatggcggtttgttttgtcagatccaattgattttcatgataaattttaattccttggatcttctgaatttttttataaaatatttcaataagattcatttcctgttcacgtatcttatcaattccatatgtattgataaaatcaatcgctgccccaagtcctacgattccaatcccatttaatgttcctgcttccaatgcctgtggcagcactcctggctgtgttttcgaaaatgataagattcctgttccacctgtttttaacggacggatctctacaccttttctaatacagatccccccgataccctgcggtcccatcaagcctttatgtccggtaaaacataatatatcgatattatcttccttcatggagattggaatcactccagcactttgagcggtatcaacgacaaataaaattcctttttctctacaaagttttccaacactttggatatcaaacatttcacctgtcacattggatgcatgcgtcatcacgatcatcttggtatcttttgtgatcgcctgtttgatatcccccacatctggtgaagtgatcgttaagcaaactccttgtcgttccatctcatataatggacgaagaacgctgttgtgctccataaacgttgtgatcacatgatcaccatgatttaagcttcctttgatcactgtgtttaagctttctgtaattccactggtaaatacaacttgttctgctccatagccgtcaaaaaactgatctactttcgtacgaacttcgtaaatctttcttgcagcatccagagaactttcgttgacacctcttccgctgttgccaagtgccaatgcgttcataattgcatctttgacacactctggtttcgtgatatgcgttgctgcataatctgcataaattgtttctgccttttgtttctcattggtatgaatatgtataggaacatttggttcttcctgctgatcagaaagattatttttcaaatataataatgcttccaaaacaccacctgcaatgcatctggctttatctgaaattgtaaagcagttatcgtattcttcagctctcggatcgatatcagcgatcttaaatccttttgtcaccggatatccatcacgaattaaacctctcagtaatccatccatacttgcaactacatcaacaatcgtgccttctggcgtttctatctttgctaataactggcctttgcttaccatatctgtgatatgacagatatttcttaagatccctttagctggggaatggatcactcgttcttttccaaagcccttgatcactcctggaattcctgtgttcgggatcgcactgccttctttgatgatccttccaagcctgtgtccacgcatcgtctcgatcacaacatcgacatcttccccggctgtaaatccaggtcctaaagcaatcgtgatcggtgccatatctcttgttgtaccaagatttctcttcgcaagaatggcatcaacaactgcgatcggatgcaactgtttgatcatctctccttttggatcgatcattaatgccggattccctgctttcatgatctgttctgcttctttgatatcatatacaagatggcaggtcatatcctcaacctgccacttttcttcataaactgcttctgaaaatgcaacatttctacgaattgcagatggatgtgcaatttctaagatcaatacatgaaaaccactttttaccaatttataaattgtacctgtggcgatatctccaccgcctcttacaatgattaaatctttcatagatattcctcaaggtttgatcacttttcctgctttttccatcatttctacgatatcatacatatttgtgatggaaccaaccgctaatttatctgtaatatcatagaaatttaagcatgttccgcaagtatatatttcgaccccttctgcttctaatgtttttaaatcttctaaagaatcagaatcttcgcatgtaagatatgctcctgaattataaaataatacctttgatggaagtttatcctgttttgttactgcaaataaaaacgctttgatcaatgtctgaccaagagctttctctccttgtcccatctcgttggatgatacagcgatgataaaatcatcctttgcagatggttcacagacaatctcttcttcctcatctgctggtgtataattctctgccatgatctcaatcttaaattcattgtctgagatcttctcgcttttaacttcgcagtttttaccttctgcaaatcttgtaacattctggacagctggttcattatctaccagaacgattaattttgtctctccatccattgattctaatgctttctttgtgtgtacaaccggaatcggacaagcattccctctttcatcaatctgtttcatacttaacctccaatttaaatttctacctgaaataccccttgtgggatgatttcatgttctgacataaattgtaccacagattcttcattttctaaaggggtcatccatgccattccacatcctgctgtgatctcttttggtactgggatcaatcttcctgcgatctgattttttttgcaagcactttccataccgatcgcctgtgttgttgtctcaaatgtgatcactgtttttaattctttttttctcatgatattttatgattctcctgaatttccaaagttttttataaaagaacgttttactgcttcagcaacttctttctgaaagttttcataacgattcagaatatcttcgccttctggtgtaaggtgtgaacctcccccttgctttccgccggattttcgttctactaatttgactccaaggtctgcttccgcacgatttaagatcttccatgctttgcttgcagccattcccatggatttatatgcagcagataaagaacctttctctcttgttaatgataataactgtgcaactccttttccaaaatctggttcttccataaaaactctgaccctgaaatcaaaacgttttggtaaatatgatttcatgtctaccacccttttccgaatccacagtttggataagtacaaactttacatccaagacataatccgccttctccaaggtgtgcaagttcttctgcacttactttatcatctgccatgatccttggcagaataagatcaaaaacagttctctttgaatacataacacatcctggaagtcccatgatcggaattatctgatctccttttttataatatgcaagtaaaaacattgctcctggcaaaaccggtgctccataagatatgatatcggctcctgtattcttgatcgcaagtggtgtcttgtcatctggatcaacactcattcctcctgtgcataataccatttctgccccattttcgatagcttctaagattgtttttgttaaaagttcattgtcatctggcaactgttttgtactggtcacttctgcaccgtattctttgatcttttctgccacaactggagtaaatgtatcctcaattctatgataatacacttcatttcctgtagctaagatcacggcttttttcttcttataaggcagaagagacaggattggtgtatccccaaccctgtctttgacttcctgcatcttatctttttcaatgaccagtggaatgattctcgtacctgctagtttgtcccctgctttgactggagtatttccagatcttgccgcgatcatcatctgtccgaaagaattgacggtaaatagtttttctttgtcgatctttaagagtccgtcatattcggcagataattcgatcttaccttccttaacttctgactctttcattccttcattcttgcacagatcacaaaggatcctcgctgcatcattttcatgaagcatatcgtctccggcttcccagacgtataaatgatcttttccaagggataacaacactgggatatcttcttctttgactacatgacctttcctgaatcttgcgtcttttgtaacacctttgatgatctgtgtgatatcatgacatagcacagttcctacagcatcttttgtatccactaatttcattgtttttcaccttctacttcttatttattaattgtaaatccataagatctgaagacttttaatactttttcactctgtaagaattttacgaatttatcagctgcatctttatttttacttttctttaatgctgcaactggataaataactggcgtttttaaagcatctgatggtgcttctgcaagaacttttacatccttgttacttgctgcatctgttgcatatacaacaccgcaagaagcacttccttttgctacccaatttaaaacttctgttacatttgttccaaagcttgcttttttcttcacatcattccagttctttaagtttgtaaagatttcctgtgcatactgtccagctggaacgctcttaggatctcctaatgctattgtatcagcttttgtgatatctttaaaggatgaaacttttgcatcaccttttttaggagcgatcagtacaactttgttttctaataattctacaacatcccccttgctgatatattttcctttgacaagattgttcatctgttcagtcgctgctgacataaatacatccgctgccattccattttcaatctggctctgtaattttcctgaactatcataacttccttctactttaattcctttattttctttttcgaacattggaattaatttctctgtgtagcatttttcaagactagctgcagctgcaagtgtgatggttgttgtttcttctttctttactgcctctgttgtggatttagagctgtccttactgcttccacatgctgttaccccaagaaccatagctactgctagtaacactgctaaaaatttctttttcatttgtaacttcctcactttcttaaaaatgctatgtaaaatttcatagtaatgtggctttttccatatgacctctttgaatatggtattttttgtcacatagattttctacttccttactgctgtggctcaccaagatcgctggtttatccaacattgccagcatattggataattcatcttgcatctgttctcttaagtattcatccaacgctgaaaatggctcatccatcaagatgacttccggttcacacacaagcatccttgctaacgctgttcgctgtttttgccctcctgaaatctgtcttggatatctttttgctaattcttcgatatgaaatcgtttcatcatatcatttgtcttttgttcgatttcatccttcggaaatccttttgctcttaatcctattttgatattctcttcaatcgtcatattaggaaacagtgcatatccctgaaataaatatccaatctttcgtttttgtggtggtagatcgatctttttctcggaatcataaagtattttcccatctagtacaattctcccactatctgcagtttccacgcctgcgatacattttaaagtaatgctttttccacttccagaaggtcccataagccctgtacaacctgtttctacattaagttctgactctaatgtaaattcttttagtttctttttgatctttacttcaagactcatacatctctccttacgcttcctgtttcttcttttccatgatcaggtaaatattcatggctgctacgattgcaaaacaaatgatcacgatcacaagtacatactgatatgctgcatccatatttcccgctgcaacttcagagtatactgcaagtggcagagttcttgttcttcccggaatatttccagcaatcattgctgttgctccgaattcaccaagtcctctggcaaatgcaagcactccaccagaaatgatccctggcagtgcatttgggatcataactcgaaagaaaatgctccactcactcattccaagtgttcttgccgcaaaaatcagatcttcatcaatctgttccagggcacctcttgcagaacggtacatcaatggaaatgacatcacaactgccgcaaggatcgttgcgccccatgaaaatgcaatcttgatcccaagataattttcaaataattttcctactggtccatatgatccgaaaaatacaagcaagaaaaaccctgcaacagttggtggtaatactaatggcatcgtaaagatcccatcccagaagattcttgttgcgtctgatttacgatataagatccatcttgctgctaatagtcctaaaataaaggtaaataaaatcgcgatcgttgccgttttcatcgatatgatgatcggtgatatatccatacattgtctcctctcttagtttcttccgcaatcttctgtgttttcccttaaagtatctaatccatgtggcagctgatcaatgataaaagaaagactctcttccactgcctttttgcttccaggaagattaatgatcaatgttttctttcttattacactgacacctcttgataacatggctcgttttgtgatcgtcatagaacctgctctgatcgcttctgagattcccggcacattgcggtctgcaacagctaaagttgcttctggtgtacgatctcttggagaaagccctgtcccaccggttgtaataattaaatcaacctgccggctgtcgcttaaacggatcagatgttttttgatctgagcttcttcatccggaagaaggatttcttctacgatcttaaatccatgttcttttaagatttctgctgctcttggaccgcttgtatccactcgttctcctctggagcctttatcactcaatgtcatgactgctgccatgtatggcatatctttctctgggtaaatgacctcaatcttatctccgactttgatcgttccgctttctaatacttttgcaaaaataccttctcttggcatgatacagtccccaacacgtttatatatctcacaatgactatggcattctttcccaatctgagtgatctcaaactttgcatcattacagatcagttttgttcccactggaagtttcttaaaatcaatgccgtaagcaagaatattttccccaaaatcaccctcgatcacggaagcacctttttcattgaattcatccacaatatccgcgctcaaaaaactaacctgacgatgccattttcctgcatgggcatctccttctaatccaaagtctttgatcacattgacttcgttgatatttttcttcacggttcctcgtttttcactgatacagactgcttttatgattccttccatacaaaatcaccactctttccacctgttttctctactaaatgtatctctgacataaccatatgtttgtcaattgccttgcacatatcataaatcgttaataaagcaatctgtactcctgtcagtgcctccatctcaacgcctgttttccctgttgttttgacaagacagactgctttgatctctttggtttcttctagcatttcaaaatcaactttacactttgtaagcatcagaagatggcacatcgggatcagttcaaatgtcttctttgccgccatgatccctgcgatccttgcagttcctaagacatctccttttgccatacttccttctttgactttttcaaagatctcatcattaactttgatctttccttgtgcgatcgctgttcttgttgtttcttttttcttcgtcacatcgaccatgaccgcattcccatgctggtcaaaatgtgaaaattctcccatttatcttatcctccaattgtatacatcttgctgtttgacggcatttcttcaaaatgatgtgcctgtggttttttataaatgatttcttttaaaacctgtttgatctcttcgtctgacgtttcagcctttcttaacagatctcttaaatttcctgcttcttcataataaagacatggtttgatcccaccgatagaagtcaaacgaatacggttgcatgtatcacaaaagtttccatgcaatgcctcgatccatccgatcattcccttatatccttccattgtttcataaactgctggcccatttcccattctttgttcggttttgtgaaatctgatcccttgatcttttaggttctttctgatttcatttcttgttaatgctatcgttgtcttcttatttccaagcggcatttgttcaataaatcgtatacagattttatgatctttcatatagtctataaatttttgaacatcctccatcgtcgtccattctgtcaacacaacatttatctttatatttaatcctatattgaccgctttattaattactgatatgacctgtttgtatccatcgaatcctgtgatctttttatatttctcctgatccataaaatcaagacttatattgatcccatccactcctgcctctgctaatttcactaaatcttttgataataagattgcattggttgttaacgtaactttattaactccatccgttttctttaattcacggataaaatctgaacaaccttttcgtaccaacggttcgccacctgtgatcttaaatttgtcaattccaagcgttgtaagaatcttacatactcttaggatctcctcatatcttaaaatctccccatgtgacaacatttcttcatgatcagggcggcaataggtacaatataaattacaacgatccgtgatcgatattcttgcataatcaatggttctttgaaattgatctttcatctctttctcctatcgttattctcaaccaagaataacgcctgcctaaaatcagacaggaaaaaccatgttttaacattcttcctgtctgttcgttcttctattctaatatgattgatttttcttctttttcttctatgtacccaattattttagcacatggaattgtattttgtaaatcctctaataaattttttgcatcattttcgctaactgcgatcatcaatcctccagatgtctgtggatcatataaaatatcttccaatgctctatttatttttttagtttttgaaacaccttcacttgcatatttacgatttctataagcaccttccgggatcattccaaggtctgccatagaaagagcttctttgtgatatggaatctcttctgtcataaaatgaatcgttacatcactgccctgtgccatctcataaccatgtccaagtaatccaaacccagtaacatccgtacaactgtgcacttcatattttaccataatatctctggcatatttattgagctgtctcatctgatcatagatcttatccattactttttgatcgataaattcagcctttgctgatgttgttaaaattccaactcctaatggtttggtcaaaattaaaatatctccaggtcttgccccgctgtttgtcaaaaatttttgaggatatacaaatccagaaacagataaaccatatttgggctcttgatcgtgaatcgtatgtccacctgtgatgatcactcctgcttcatatgcttttttataaccacctcgtaaaattgcctgaatgctttcttttggcatatcttttgtgacacacatgatatttaaggcaagctttggatctgctcccatcgcataaatatcactgatcgcattcactgctgcaatctctccgaacatttccggatcgtcaacgatcggcgggaagaaatccaatgtctgaacaagtgctgtattttcatcaattttatagacagacgcatcatcacttttatcaaaaccaactaataaccgttcatctgatcttgttggaattccgtctaataattttgctaaagttccagctccaacttttgccccacatcctgcacactgggcgagttttgttaatttcacttctgtctccatagaccttatcctcccgtaaatgttcatgatctttcttaaacattatctcttgttacatcttttaaccacttgaaactgcgatatctgatcaatgtgatcggtactttgatcaattcatcactcatcaataatacataaactgccggcacactccaatgtaatacaaatgcagccaatgctcctaataaaatcgaacatccccacatcgttgatacatccatgatcaagccaaacttcgtatcgccgccagatcggaagattccaacgaccattgttgtattaaatgcctgcgcgatcacaaaataagacatcacataaaacatcattttcagatagtatcttgcagttgcacttaaggataagaaagaaattacaactggagatgctattaagatcaatcctcctccgatcactcccatcaccacacttaaaatgataaaccgtttggcataggctcttgcatgatcgaattttctctcaccgatcgtctttccaagatagatcgctgtggcgctggatagcccaaaagacacaaccgttgctaactgtctcgccacctgtgcaacagaattggctgcaactgcagaacttcccatatgtccaagaactgctgtattggctgatgttccaagcccccacattacctcatttaaaacaactgggagggaatagactaagaaatctctcactaacagtttgtcctgatgaaggaaatagtgaactctgaattttacatctttattatatatttttgcataaccacaaaccagaacaagttccataatccttgcgatcaatgtcgcaatcgctgctccacggattccaagagctgggaatccaaataatccaaaaataaagatcgcattaaaaaccacattgcataaaaatgatactagataaacaactgttgccacgatcactcgttcaatgcttcgcatgacatataaatatacattggtaattcccatgataatatatgaacatgcaacgatccttaaatacttaactccttctgcgatcacctgtggatcatttgtaaaaattctcatcaacgatgctggaattgtaaatgctgcgatagtgaatatcgcagttatgatcactgctgatctaatccctaatgccaagatcttttcaatcgttgtcttgtcaccttttccccagtattgtgcagtaagaacggttgcccccgatgttaatccaaacaaaaacagtaccataatgtactgaatctggccagcaagagaggcccctgataatactttttcactgacttttccaagcatcacaacatcggctgctgttactccaacgttgatcaaattctgcaatgccatcggaacgaccagtgcaaatacatttttataaaaatctttccatttgatgcttaaatcattcaatctttttctcctgttcttttcatttcctcataataggatatagaagctttgtctgcttgtcaagcacatattgcctgcctgtatttcatttagtatccccaaaaataaaaaataaaaaccacttaataaaatcatctgcagattcatcattgcgatatttattaaatggtctttacctttataattagaatttaattttttggcatttatagatatatagtttattcttcgatttttaatgcttcttcattgctgagctctttgccatcttttgttgttgcaacatagtagatatcgccttcttctggctgataatagatatctaaatttacgatcgtgttcattttaataccagctgcttttaaattttctttaacaagtttctctgtgtcttttacatctatgttgcgttcctgaaactgtacttcgatttttgttttcatactactctccttcttcttgatcatctactctttatgtcaactcttgatgtgattattattagattcttgtatgcgtacattgtattctacgtacgatttataattcatattatagcctttttttccaatttattcaacttgaatctgatttagtacaaaatctatctacttttccttgatcttttttccataactttttggatgatcatatctgcgatccatccacataagagcccaatgatcaaacctcctaaaacatccgttggataatgaacgtataaatacattcttgaaaacgcgattaaaacagatactatcaaagctcctgctgccattctctttcttcccgcaaaatacagtgcactgaccgatgcaaatgatgcagctgtatgtcccgatggaaaagaataatccttcaatggtgtgaccaacagctggaccgtctgattaatgctatatggtcttattcttgccacgatcggttttaagatcacattacaaatgatcaaatctgcaattaatgcaactgccatgtatactcctgattttcttgtttttggtatcagtaataaaatgactgttaaaatgatccatacgatccctgcatctcccagtttcgtaatagctaccataaatctgtctaataatggagtatggatcgtttgaagtttgtctaaaatctgaaattcaaatcccataatgattttactctgcctttctttttctattataacattgattctttgattttataaaacattgatacataggttgtatccttagattctaaaatatgccgtactcctatttctcgaagctgcttcgttgtcttttctccaatactgatacacggaatattctctatccattgttgcttttcttctcctatctgatcaaaaaatcttcgagctgatgatgcacaggtaaaagaaacacttcggatatctttcatttctggaatttcacttaaaatctttctattattttcatacatgaccttttctgttacctgacagatcggtgtaagggctttttttaatttttctccaccagatatgcctttacagtaccagaccacatcctttgcatctacttcctgtttcataagttcggaaagattgatctctcctgcttcttctggcataagatctgctataatcccatattgcatcaagacatcttttgtctttttacctacaacgacaatttttttatcgaagagatctcgaagatccagattcgaagatttcatctgtttcataaaaccatgaactccatatctgcttgtaaaaatcagataggtcactttcgctaattcctctttggaaatccggtcatatctataagaaatctctcctgtctgaagttccttgaccttacatccatgatcttttaatatctgcgctaactttgatggctgatctcctattttggtaactaaatgacaggtcgtatcttctggtttttgaatctgtttttgaagtttcacaacgtctcctacaacaatgactgctggtgatgaaagtttttcttgctttactttttcatgaatcgtatttaatgttgcttcacatgtttgctgctttgtagatgctgcactagaaacaactgcaacaggtgtattggcatccattccattttttaatagattcattgtaatctcttctagtttcgaaagtcccattaagaacactaaggtttcttcagactttgccatagatgcaaaattaagatcagataactgatttcttcgatcatgtgctgtcacaacacggaatcctttggagattcctcgatgagttacaggaatccccgcaagttccgcagctgcgatacaggagctgattcctggaacaacttcacaataaattccatgatcggctaaatatatggcttcttctccacctcttccaaagacaaatggatccccaccttttaaacgcactacgatatcatattgtaatgctttttgtgctaataattcattgatctgttcttgtttcatcgtatgatgatgattttcttttccaacatagatatgttcgcatccttcttttgtttcatctaataattcttgtggaatcaatctgtcataaatgacacaatccgccttttttaagatttcttttcctttaaccgtgataagtcctggatctcccggtcctgcaccaattaaatatacgattcctgccagctgttttttgatattttttactgccgtttgtgctaagatctcagggcatgttccataaactttcgtatatgcctgtttacttccatcttcatttccaaacatagcatatagttcgtacccttgatctgtcttttgacatctggcacctgccggagtatgacaactgcctcccatttgttctaagaaatttcgttctgcacatacttcgttcattgtttcttcatcacaaaatacatccaacatcttttgcaattctttctgatcttctcttacttccaaagccagagcaccctgtgctggtgctgagatcatgtcttctggcgccagatattgcgtgatcacatcttccattcctagtcttttaagacctgctgccgcaagaacgattccatctaattgttgttcctccatttttcgaagtctcgtatcaacattccctcgaatatttataatctgaaggtctggtcttaactttaataactgaaatgctcttcttttgcttcctgttgctatcacagcatcttctcgtaattcagacagatgtttcgctgttcgaaggatcaacacatctcttggatcttcccttttccatacttttgtaaaaacaaggccttttgccggggttgacggcatgtctttcatgctgtgaactcccatatggatttccccagaaatgatcttttcttcaatctctttgacaaacagacctttcccaccaattttatctaatggtttattctgaatcttatcaccttttgttttaatgatctggatttcaaaagtgtgttctggataagctttcgctaatttttcctgaacatattttgtctggatcagtgcaaggcgtgatcctcttgatccgatgatatatttcataggtcattttcctttctttgtctctatcccaaaaagctgttctaccatcttcttataatctgcttgttcctgtcttgtttctaaatgttttaattcctgaatcggttctttgatcatgcgctgcaaggatgcatttaacaccttctttagaagtttctgctctcttgttccaaaatctatttttcttgataaatatgaataactatcttccacgatctctgtacatttttcctgcaaggagcgaattgtttcttccattggtgcctgaaacagccactgcatcgtttcttcttttgctttgctgatcatcgtattgctttgtctgcaaagttcttcacgttctgactgatttgctttagaaatctctttgatcgtatctaaattgatcagatttacctttgcgtcatctgaaagttttggatcaatatctcttggtgttgcaagatctaaaaatgtaacttgtttttctggcgtataatattcttgttttacaaccacatgtggtgctgatgttgcagatactacaatatcacattgtttcatgatctcatatctttgttcgtaagaaatgatctcaatcccttgaaactctttctgaacatttcctgcatgtgccagtgttctgctgcataaataaatcttgcctgcttcatattcctgcagataacgaagtgcaagaactgcagtatctccgcttccgatcaccaagaccattttgtctttgatatcacatattttctgtaattcacggattccgatatatccaacagatactggtttctcacttattctaaacgttgtttttaccttttttgcacaagtaatagcatctcttacgactttatttagttctttcttgctaaatcccatggttcttgaaaaatccaaggcatcttttacctgtccaagaatctgatcttctcctagtaccatagattctaatcctgcggttactcgaaacagataagaaactgctttatcttcttcgcaatgtctgatatattgctcgatctctgctttatcaaacatatcacagtatatattttgtatttttttgatctgttgttcatcatcaaaaaaataataaatctcactgcggttacaagtcgataagatcatcacctgttcaaccccgatttcctctgctttatgaaaaaattcaagcttcttctgatccgtaaatgaaatttcatcacgaatagtaagatctgcatttttataatcaattcctagaaatccaaactgcatagagcctctcctgcaagtttacatgttttctcaatatcttcttctgtatgtgcgttagaaataaacattgtctcaaactgagatggtgcaatataaattccgcgatctagtaaatatccaaaataatctgcatactgttctgtattggatgtcacagcactttcaaaatctctgactttctggtctgtaaagaatacactcattaaagatccaatctgattaacacaaatatgtccttttcctgcttctcttgctgcatcagcaagttttcttgttttttgctctagtctttcgtaaatctgcggatcattttttaagatatttaatgtctcaattcctgccgttgttgcaactgggtttcctgacaatgttcctgcctgataaactggcccatctggagagatcatctgcatgatttctcttcttccgccatacgcaccgatcggcattcctccaccaacaatttttccaagtgttgtgatatccggcctgatattataatactgctgtgctcctcctagagatagcctaaaacctgtaataacctcatcaaagatcaataatgatccgtgatcttttgtaatctctcttaaaaattcgagaaatccttcttctggaagtactaatcccatattagctgccaccggttctacgatcactgctgcgatctgatctttattttcatcaaatagtttttgtacagaatctttgtcattgtattctgcaactaatgtattcttcgtatcatcttttggaaccccagcactatctggaacggatgttgtaagtgctcccgatcctgcttttactaacaaactgtcggaatgtccatgatagcacccgcggaatttaacgatcttatctctccctgtaaatcctctggctgcacggatcgcactcataacagcttctgttccagaacttaccagacggcttacttccatagacgggatcaattcactgatcaattctgcaaggatcacttccttctctgttggtgctccaaaagtcaaaccgttttcacaagagtccatgacttttttgatgacttgaggatgagcatgtcctaagattccaggtccccatgaacatacataatcgatatattcatttccatcggcgtcaataatacggtctccttttgcagattccatgaatcttggagtacgatttaccgcacggaatgcacgaactggactgtttacccctcctggaatatgtacttttgctcgttcatataattcttttgatcttgtatctttcattttatctttcctcttctttcagccattttgcaacatcaagtgcatgatatgtaatgatcatctttgcaccagcacgttttaatccgaccatattttccataacgatctttttctcatcgatccatccattggccgcagctgcttttaccatggcatattctccgcttacattgtatgcaacgatcggaatattgtatttcatagatgcttctttcataatatccatataagcaagtgctggtttggcaatgatcaagtctgttccttcttcgatgtcttccccgatctctcttagagcttcctgtccatttgccggatccatctggtatgtttttctatctccaaatcctggtgcagaatgtgctgcatcacgaaatggtccatagtatcctgacgcaaacttggcactataagacatgatcggtgtgtatacaaatcctgcttcatctaaagcttcacgaatagctttcactcgaagatccatcatatcacttggcgcaatgatatctgcccctgcttttgcataacttacagatgcctttgcaagaagcggaagtgtttcatcatttaagatcactccgtctttcacaagaccacagtgtccatgagatgtgtattcacaaagacatacatccgcaatgatcaaaagttcttcatactcttttttgatctggcggatcgcctttggcacaattccatcttcagcatatgcaccgcttccaacttcatctttatgatctgggattccaaagattaaaattgctttgatccccgcttctttgatcctgttaatttcctctgataaacgatccagtgaatactgataaatccctggcatagattctacaggatgtttgatattttctccttctgtaacaaagattggataaatcaattcgtcaattcttacatgattttctcttaccatatctctcatatagttgcttgttcttaatcttcttgtacgttccatttttactgttcctcgattttactctgatatatatttttgaatgatttcattgattcgttgttcttccaatgaatcaatatcctctaatccgatttgtaataattctttataaaatgcctttcgttcctgttctgtggcaatgcatgatttggcaatctttctcagacttcccaagatctgtgcgagttgtcctaattctttattcaaatctggtttgatcttttcttttaaatactgtgtgatcaacggactctgcccgccacttgaaaatgcagcgacgacttctccttcttttacataagatgggaaaataaagctgcaatcttctttctgatcgaccgcattgacaggaatcttctttcgtctgcagatctggctgatctcatgatttattttttgatcatcggttgctgcgatcacaaaatctgcctcattaaaatctttctccataaacgttcgaaagattcggcaaatctgatcgatctgccgaatctgtgttatcatctctggtgcgatcacggtaatatctgcttcaaaatcttttaaaacttcaatcttacgaagtgcgatcttaccaccgccgatcactagacattttttcttctttagttgtacaaacattggaaaatatgccattatctctgtgtcctattttatatattcttttgcgatttccttgattccttctggatgttttaaattccactgtgaaaagtcaagttcttcactctcaactgcctgtcctaattttaccaagaactgtggaatatcttcttctaaaatgatcccaacttcttctcccatcttctcttttccctgaagatcagatccattgatatgaagtacaaatgcagaatgagcaactttatcaattactttcatacttccgtggaatccgatctctccgatctgatgtgttccgcaagaagacatacatccagaaatatgaatcttaggcagtgaaccatcctttaatccagcttctctttctgcttcgatcactttgtgtaataatccttgagaatctcttaatccaacctgacagatcgttgctccgatacaagatacagatgtctcaaacaacgtttctgcaccatcatctgtcgcatctaaaactttctttgcttcatctcctgtcagattgatgatgtacattgtctcatctggtgaaattcttgcttccacttcatccatatctttgatcacatcatatatctctcctaatttctcaggttttggacagccaccgaatgggtgataagaaactgcatataatccttcctgtttctgatcgatcactcgtttaccagatactttacttccatctccctgtttcttcacttcagaaattcctacatgaagatcaagatcctgtccggatgcgaaaacttcatctaatttctcatggaaagctttgatatatccttcttcacctaaagtctcctgcatataacgcgttcttgctcttccacgttgtttataatttccatgtgcaatgaatgtttctctcattgcacaaatataataaagaatcttctctggttgtacattctcagcaactttcagtccaaatctcgcattgttaccaagtcctccagcactgtaaacatcaaagtttccatcttcccttgccacaaatccaagatcacggaatgttgcatgtgtctcattagctggcccgtttgaaaatccaacttttaattttcttggcataacttcttttttgataaatgtcatcaaatattctccagctgcttcggcatatggaagaacgttaaaatattctcctttttcaacacctgacaatggagatacggttacattacgtggaaaatctccacctccacccattgtgacaataccatgatctaatccaccttccatgattccataaattgcttctggctgtaagttatgtaactgaatcgtctgacatgtcgtcaggtgaactttatctacattatatgttttaatactgtctgcaataaattttaatttatcttttgttaaatggccacctgacatacgaagacggatcatacttgcttttccatctttctgtgcataacttccgtaaccaccggaaaatcctttgtaatctgctttacttagttctcctgcataaaactggtctgtcttttctttaaatgctggcaggtcttgtttccattcctgtggattgatcgtttccatatgtaaaattcctttctgaacattttgtttcttttattatgtgaatccttataaaataccacatttgtcttatcataccacatttacataattgtttgaatgatttctttccttttctacaagaaatgattcgattgcttttgcaaggtttttatgtcctttttcattcatatgttccatatctgccttacttggcttggctacatcacttgctgcaaggaaatcacatccatacttccatgcaatctttaaataagtctgttttaattgcttggatactttcacagaatgctggtcaaattcaagatcaaatcctggtttccatacatcttctcctaattcgatcggagatactaataaaatatcgatcgctggatcagcttttctgatctgctggatcagtttttcgattccttttccgatgcgatctgcacttgcatggttatatgttttgcagtcattggttccaagcattaaaacaacctggtcaagtggtgcgtgtgtctctaagagcattggaagtactttcgctccatttcttccatctcttgtcgcatcgtcaaatacactggttcttccgcataatccttcttcaatgattctatatcctttatcgtaaagcttctctgataaaatacctgtccatcttgtttctctgttatatcttcttgttgtacctggaatcagtccatatgtattggaatctccaaagcataatatctctttcatgtctgtcaccttcttcgttatatttcatataattctaataggaataatatgattataagaaatatgagtttgattgtcaataggttttaaatagaaaaataccctataggatatagatttttcctataaggtattatacgttattattatatgagattaatttataaaggtcttaatcattcttcttcccaaacaataaacttacgatcacacttaaaatgatcgtgatcaccatatcaggaagtgtgtttccaaggatcgtatcgacacccattagccagcggtatgcaataaagccaacaacccatacaagcatgttctgaatgcatacagatttccttgaaaaatcctgatgaaggataaagaaatctgcgatctgtacagcgatcattggtgcaaagactgatccgatcagatataagaaatctgtgatatcgtccatcggataaacaattgccccaatcattccgatcactgttgccgcgatcgcaatccattttccattgatattcttagatagggattcactggaaattccggcagaccaagcatctaagaatgttgttgttacagttgagaatacgataattaataatcctgcaattccaagtcctgcttttaccatgatctgtgcgatatcggattctcctgtaaagatagagattcccataccgatcacatacatccagcagctgaccaatccataaacgatcacacttgcccatgttgctttcgttggttctttagcttctcttgtgtagtcactgatcagtggcagccatgataatggcatggcaactgcaagttctacagctgctccgaaagttaatccatcatttgcaaccggctttaatgaaccatgtccgaaaataataaaacttaaaactaatgtcaaaataaataatgctgccattgcaaccgtattgatctttcctaaattttcaattcctaccagaatccagataatgatcaatcctccgataatgactggccatacccagttcgcaatattgaagattcctgctgctgctaatgatccgtcatagatcatgatcgctgtccatccaactaactgcaggatatttaacactgcaaataacaaagctcccgttgatccaaaactcatttttaccgtttccattgcactttttcttgtctttccaccgataaatccggcaaaaaacatcataccacatccaatgatatgtccaatgatgatcgctaataatcctgtagaaaatcctaaggatgcgaaatatgtacctgttaaaatttctgccaaggacactccggctccaaaccagatcagtccgttttcaaaaattgatgttcttctgctacccattgtctatgcctcctctttccattcatcttttaaatcaaatgcatgattcattggtccgcttccagccccaagatccaacatatctgccaatgctcttgaaacatagtcttttgcacgctgtacagaaatcttaaggtcaaaacctttggcaagatttgctgcgatagcacttgaaagagtgcatcctgttccatgtgtatttgggttattgattctttttcctttaaaccaggaaacttcttcttttgtatataaaaggtcatttgcatcgttaatattatgaccaccttttaataacactgcgcatccaagatcttcatagatcgcttttgcagccgcttccatgtcttcttctgtgtgaatctccattccacaaagaatctcagcttctggaatattcggtgtaattaccgtagcgatcggtaataattctttctttaatgtatctacggcatcttcttctaataatcgtgatccgcttgttgctaccatcactgggtcaacaacgatattttccgctttataatgctgtaatctttctgcgatcgttttgatcagtccgcttgaggaaaccatcccgatcttgactgcatcgggtctgatgtcttcaaaaactgcgtcgatctgtttctttaagaattctggatctgcttctaatattcctgttacgccggttgtattctgggctgtcagtgctgtgatcgcactcattgcaaatacaccattcattgtcatggtctttaagtcagcctgaactccagcgcctccactggaatcacttccagcgattgataatgctgttctcataagtatctctccttttctctcttatgcattatttttctattgcgatcaaaagtggtgctcccagttgaccgcattgtttcgtatcattgtaaattcttccataataggaatcctttatcatacgaaaaaaacggaaagctactgattttgtaactttccgtatgttcgcgacttatcatcttcgtttcctacgttggcattacccaaatcaggttcaaaggtcgaaagttttactttcctctcagcctgtttaacaagctccctgtttttataacttaataagtatatagcaagtttctctaaaaagcaagttcctattttcgtactttattgctttttttaatttttagcttatttttcttgcctttcttggaaatatcgttaaccctaactttttcataataaattctttccccaaaaataaattttaaatctcttttccttttgtcacgatcacatgaatgataaatggaataaacaatgtgataaatgctgcatatccaaggtacgcatatccctgttttacaacagccaacaatccaaactgtgcgatcgcaaatgctaaaaatgtaaagatcagtgttgcaatggcatttcttactaaatgtccattctgtctttcctgctcagatctcatacgacgctctactgcattgacacatcttgttacgattccagagatcatgtttaccgccgttgaaatagatccaaggatgatcaaaacagagatgatcggtgttaataatcctgaagatactccattttgtactaaaactaacataggaactgttgctgttacaaggtctgctgcgtatgcaacggctaataatccgatgatggataattccattgcaaagaaattaaatacaaaaatctcaatggctgctttgttgatctgcttcttatctgtcacaggttccatatgctggtacataacagatacagatgctaactggaagaagaaatataaaactgcagaatataaggctgctccaaaagctccgctttctccagagatcacaggcatctttcctgatactaagttagagattgctgctgtgatcgcatcccactgtacgatgatgtttggtactaatacaagaactaatccgatcaagatcagtacacttaaagtagatgcacattttcttacgacacttgttccaaaaagtgcgatcacgaaaataaatgccgctatgatcaatgtacatacccagtatgggattccaaatagcatttgaagtgttgatccaccagttgcaaatgctgcagctgatgccgttccgatcatgatcagataacagatttcatatagatttgacatgatcggtcttgtctttccatataaactgtcagaaaaacttctgtaatcatatgttttatgtttgtatgcataacgcattccataccagaaaaataatgcatataatccttgtgtgatcaatggcattaacagacaccagattccgtagttgataaaatactgatagatctgtgctccggaagcaaatccacctccgaactgtgtcgtaaatgccacgaatgcgattcccatggcaagaggcatcttactcttgtcaactagtaaactttttttgccgctcattttgtcgtcctctcttttctcttaatgtagtctgatattctagttttcatcgatcttgatcatttttcctggattcaagatcagcttatcatcaaatgcacgtttaatagacttgtatagttcgatcattcttggtcccgcaaattcctctaagaaatcaagacgtccgtttccgattccatgttctccggataactgtccaccaagtttttttgataatgcatataattctgttaatgattcatgggttgccttcttccaatcctcatcgctcatctctggtccacgaagcatttcggtatgaatgtttccatctccgcaatgaccacatggctctacgcggattccatgtgcagatgcaatcttctttgcctgttttacatattctgcaatctctgatcttggaacaacaacatcacattcttcctgtgcaacggaatctgccttcattccttcaagaattgctcctcgtacttcccacacagatgccgcacgttctggcgttcctgcgatattacaatctaaagctccattttctaatgccgcttctgctgctgcttctactgcacgatcaagttcttctttgcttgatgcatcatacataacgatcaataccgcttctccgtgtttcactggaaacagtttatgtagacttctttctacaatatcgatcaattctctttccaaaaattcaatcgctgttggaacaaatggcagatctaatacttttggtaccatatcagcacattcttccaagcttctaaatggcataaccaatgtacttgaacatgttggtgcaggcaataactttaacgtaacttccgtcaaaatacataaaattccctcagaaccaatcactaaatctttcacatcaaatcctgttgtattctttacgacattggatgagaaattcatgatggaaccatctggcataactgcttcaatacaacggacaaagtctcttgtaagaccatatcttaccgctttcattccacctgcgttggtaatgacatttccaccgatagaagctgttttttctcctggatctggtgggtagaataatccttcttctttagctgccgcctgaatatcaattaacaatgctcctggctgtgccgtgatcgtctggttcttgtgatccactggaaaaatcttattcatacgcatcacagataacatgattccaccgtatttacaagttgctccacctgcaagtcctgttccagccccacggcagacaactggaatattctgctcgtaagcatatttcatgatttctgaaacttcttctttattcaatacttccacgtataattccggtggaaatactccatattccggcatctcgtctttgtaatattcttttgcgatctcatcgccgacccatacacgttcgttgtctgtgatctcaatgatcttatcaaaatcttcctgggtcatcttcttatatggatatggcatcttattcgtcccctttctgttcttttactaattctgtcagatatggaacgactttgtacaggtcatctacgatacaatagtgtgccacattgaaaatctgagcttctggatcattgttgatcgctacgatgcattcagatcctgtcatacaagatgtaaactgaatcgcaccagaaactccacaagtaatgatcagttttggacgaacagttcttccagataatccaacctgatgtgcaacatccccaaaaccattctcgatcatcggtcttgtaaatgctaactgtccacctaaagctttggctaattcttcacacatttccacatctttttcattgcggacccctcgtcctgctacaactaagacatcttcatcttcaatgttctttgttttctcgatcacttcagattttaagatctcaattggagattgtttcatctcttctttgactggacagacaacgacttctcctttggcattgtcgaccttctgtgccgcatccataactctgtatcttacagttgcaaactgtggtcttgattttgtgatagaaatctgagccatgatatttccaccaaatgctggacgaatctgtaccatgtctgtgtttgacttaatatcaagggttgtacaatcagctgttaatcctgtatggaatcttgttgccagtcttggggctaatgatcttccaagtgctgttgctccgatcaagacagaacttggtttctgtgctgcgatacattctgcaacaacatctgtataacagtctgctctgaatccttctaaggattcatcctcatatgcaaagacctgatcaactccatagtctagaagtttatgtgcattctcaatggttcctgctccacctgcgatcacacatttgactttaaagtttactttcgaagccatctttcttgctttaccgatcaattcaaatacaaccggatgaatgtctccacgttcctgttctacaaagatcaaaaaatctttccatttgtctttatcaaatgatcctgctttctgctcaaagctgatcgctttttccggacattgtctgacacacattccacacattcggcaagtgtccccgacaacaatcccattatcttcaaaacttaatgccccaaacggacatttttccacgcatttaccacatagactgcagcgttttgcatcaaattttattagttccatgtcatctcacctaaatcactttcttattcactaatacgtcaaataattgttttgtcttttcttttgcatctccgtcaaaataaacctgcttttctacttctggcggtgcaaacattttctctactgcggttggtgatccgacaagtccatatttgcttaagttctgatctgccatatcttcaaatgtcatgatcttcactgggcggtctttggactgtttctgcagtaaataagatggtaatcttggtacacacatgtctttgtcaactgtgatcagacatggatatggaatctttgaagtctgtgatacactgactaaatcctgttttacctgaatagactcgctgtctgcatctacgatctcagacacccatgctgcatgtgggattcctaaatgctctgcgatcgctggcccaacctgagcggtatctccatcggttgtctgctttccacaaataataagatctatatctccgatcgcagtgattccctgagatagtgcataagatgttgcaagcacgtctgctcctgcaaacttgcggtcagataaaatgactgcatcatctgctcccatcgtatacgcatctctcatcatctcctcagcctgtggaggtcccatggtgagaactgtaacacttcctcctactttctctcttaattgtaatgctgcttccaaggcaaataaatcataaggattcgttcttgtctccccggataaacgcttcattgcccctgtttctgggtcaatgtcaactttagtacctgccggtacctgtttcatacatactagaattttcattgttctgctgcttctttcgtattatttgttactctttcactttaactgattaacgtaacactacttattatacgacaccatttttttattgtcgagttaatcatacaaaaaaatagcatctgttgtttattttttcgtaacaaatgctatttccttatctattttttcttctattcgtcatcgtcaccgacgatcactggctctttttctatcacttgttgtggtttcatcgcctgattcccaactggtgccaacaatacttttcctgttccacggtatacattaaccaagccttcgccactcgctgctgagccgagcaaagattttcctgctcgttctaccgtaaaatcaagacttccgctccatgcgatcgccaagtttccgtcaatctttacaacatcatcttctaatgtgatctcaactaattcttctcttgaacaatcagattctatgcacacaactccacttccttttaacccaaggttgaagaatccttccccgcctgcaaatgcagaagaaaatgtctttcttctgactgctttttgttttaacgtagattcacatgctaaaaacaatccgtcatctaatacgatcgaatttccccattcgtcaagatctaataaaatgatatgtttatatgtaggttctaaaacaagagttccatctcctgtatattctggcttgatcacagattctccagttacttttcctcggatcgtcttggataagaaatctcctgctcctttaattcctgttgtcgcagagacatctcctgccatccactgcatggcacctgactgaatcgttacatttcctctggatagttcacattttagctgacgttttcttacattcatctgactgcagaagaatgctaactgggcatcttctggcatgacacttaagtctctctgatattcgataacttcaaatggtcctgatttgtcgatgatctttacatcgtcgttgtcactgaaattgctgattttatacataatctttccccttcctgtttcttctataaacttttgatctttttctgaataaatttcttcataatattcataaaacttttgcattaccaatggcatttgcaacattccagatacaataaattgatttcgatcagatgataccttcatatacatttgattattaactgctgtttctgataaaaacatatcatataactgtgtttcaaaaatccgattcgatactgctacaatcccatttttatcctttaagaagccaaacgtaactcccaaatctataatcggtgtttctcgtttaaatgggaagtcaactcctgcaaataaaatgttttgaagcatttcttttaactgtggatgatctaacaactttttggtcatatcatcaaacaatgtgtttggttcttttaacaaaaccttgactgcacttaaaattccttctcttgtccacacttgaacatcggatactctttcatctaataactgacatatctttgaaaccaaatatggatatcctgacgtataatcatataaaatccgactgatttcttttacatccatacctgtacgatgttcctgctcgtattcttgtatcattgtctgaatatcacttacagaaaagctcatctcaatattaaaatcaactgcgatattccatggactgttatatttcgattcttcttgtggatgtagttttaactttaatgttttaatatcgtaaacacctgcaagaattacagaatgaaatgttacattttttccttgctgacattttaaatatttctctcttagaagtccaaggaaagataagaaaatctgattgtctgaacttttgtctacttcatcgatcattagaactacctttttaccgcattttctgcataggttgctgatttttgttcctaatgatctcataggaaatctctcagagattgaatgattccattcctctaaaactttttcatctacattctgctctcgcaaacactcttcaatatcaagtgaaagtccttcggcaagacttcccagagattcaaaatattcatcggcagcttcaaaacttaaactcaaaaccagataatcttgttttcgcaattctttttccagaagataaagcaaggttgtcttaccatattgtctggctcgattgatcgtaaagtattgtcctgattcgatatattgattgataatctgctgaatcctgttgctaagatcaaccatataatttttctccgggatacatgttcctgttgtacaaaacttcttagccataaaccccaacctcctttcttgtccactctctattaattacacccttattctacaattcatcaaaatcaaatatcattgggattgtgctttcctgataatatttctgttctttttcaaaataagcttctaatcctttatagtcttgttcgtgctgtgctttattaagatatcgattatattctgctttatgaatatcacggatgatcactggaacaatattatgatccagacattgttttagaatgatcatacgcccgactctcccatttccatcctgaaatgggtgaatattctcaaactgtgcatgaaatttagcaatatcgtataatgtaattttctctgcgttatgatacttttctaataactgatgaatcttttctggaacttcttgtggcaatgctgtctggatatcactgactctgtttgcacgctttctccacccaccaattgcatatccatttgctcgatcttcaaaaacaccttcctttaaatttttatgcatattttttatgatatcttctgacaaaggtttttccatacatttcattacataattaaacattttgaaatgaccattcatttcttctatatcttttgttcgaaaaatcatgtctggatcatccacatataaagttcctgtttcaaacatacttgctgtctgtttctctgttaaggtacttccttcaattcgattggaattatacgccatactcctctgtgtaaaaccgtatactccgcttcgatcctgttttttaaattctatttgcagtctgtcttttaatcgttttatatatgtttcattttccatgattttatctcacctcttttatttaatctgttatttttaagtatagcatgaattatgaatttctacatctattcttttagaagtctatccaataatacttcccgattatttataaacatctccgtaatctgataactttccgtctcctcatactcacataaatgaatcctaccatcatcaaaacaataaatgtcagcgtctggaattcctagtaaaatcggtgaatgtgtaacaataaagaactgtgctccttttcttgcacatttatatatctccattaataatgttaattgtctttgtggtgataatgccgcttctggctcatcaaaaagatacaatccattgggctgtagattattttgtgctaatgccaagaaaccttctccgtgtgatctctcatgatatctggctgaatctattccaccatattcttcttccttcgttgcaacattatagaaactttctgctctaagaaaatatccccatttttccttccgatatccttttacaactctgatggcatcgcataattcggagtgtgtatcatgcgtagaaaatacatagtttttcgttccaccttctggattaaatccatgagctatggcaattgcttctaataaggtggactttccacttccattttctccaacgaagaaattgattgaatttttaaattctagcctttcaatattttttaatgcttctatttgttttagataactgtcatcatctattttattccagtcaaatattacgccttgtataaactgatcattcattggattttcctttctatcatgataagcttcttcctaatccttttatattttatcaaaaaaagatatgacacgaaactgtcttttcatatcatatctttcatatttcttatattttcatttttctacatactcaatagcctatagataataaactatcctacattgctttcctgtatatctcagcaatttcttcctgtgtaaatacaaccggattgttctgaatacttgccgcagataccttcatacagttctctgctatccaaggaatatcttctttggataatccaaggtcaaatagtgtacaagcaaggtcgatatcttttaacagacttcttaatttaccagcaagatcttctgcggtaaccccgccaaagattcttgcgatcttagcaaatttgaaatggtttcctttatgggatgcttctacgattactggtgttaatgctgcaagtccttgtccgtggacgatatcttttagtccgctggctggatgttccattccatgtgccagagtgacacctgctgtattgatgaccattccaccgatcgttgatgccagtgtgatcttctcccatgcttctttgccgccttcacctttatatactttaacaagatttcctgcgatcagttccatcgcgtataaacttagggcatctgtaaatggctgtgcgatctttgacgtgtatgcttccatgcagtgacataatgcatcgaatccgacagatgcaagtacatgttttggcattgtcatcatgcattctggatcaacaatggatacttttgcaacgatcgcattgcaacgtaaggatttcttatctccattttccggatttgtaagaactgcaaatccatttccttcggatcctgttccacatgttgtaggaattaagatcaatggtaatgctttatcactttgtaatctgttataaatgtaatcgttgatatctccgtcattgatacttaagaatgcgattgcttttgcacagtccatgatgcttccgccaccgatcgctacaacgacatcacatccatttgccttggcaaaatcagcgccttccatcgccgttgttgttaatggattctgtgcgactttatcaaataatacatggtcaattcctgctttagacaggctgtttgctactttatcatataaaccagatttctttgcactgcttcttccagttacgatcagtgctttcttaccatatggttttgtaagctctcctgtttctaagactttaccgcttccaaatgcaatattgactggaaggaagtagttaaagttaattgctggctgtacttctactacattttctgctgtgttaacagctccaagtgcatcttcaaatgtacgatcttcttctgatgtgatatcttcatcatcaacggcaacatcgatgtgagatccaaatttttctttgtattttaatttacatacaatgaagaagataattccaagaacagcccatccaccagccattgcccattcctgtggtacaaggtttgaccctgatcctgggataatatacatcgcaaccataaatcctgacattaagactgccaatacaccaacaatcttataatgttttactttgtatggacgtgccatttctggtgctttctttcttaagatgatgaaagataaggaaaccatacagtatgcaagacagcatccaaagttacctgcatcgacgatccatactaacattttacgtccaaataatggagctaatatggataatccaccgatcaagtataatgcattcactggtgttttgtgtgttttatgtaatttacggaaagttcttggaatcatataagattcagccatggaatacattgcacggctaccaccaattaaaaaggagttccaacttgtaacgattccacacataccaccgacaatcaatacttttgacatgatactgctgtggaatgcttttgccattgcatcagctgtaacaagtcctgatcctgcctgtgaaaatgaaatatcagatggactcataacataaccaacacctaagatgatcagcgcataaaatgcaactgctagtacgatagataagatcatgatcataccgatttttttaagcggcacattgatctcttctgctgcctgtgggataacatcaaatccaataaagaagaatggtgtcataaccgcaacactcatgatcgctttcatagtagttgacgcactatctcctgcaaataattgtggtgttaaattgctagcatctccactgactacagatgctacaatcagaaggattccaactccaccgatgatcactgttaaaactgtctgtaaagttgcagctgtcttcgcacctttgatattgataaatgtgataaagaatgctacgatcatcgcaactgcaagccatgatgcataaatatcaaatcctgcaacagtatacagatatccttttaagaatccaggataaatataagtgataattgtaggaagtgcacatgcttcaaaacatacaacactgacatatcctaaaatgatcgcccacgtacagataaatgaaccaaccggtcccattgccttgtaactaaatacatgttctcctccacactgtggcattgctgcagtaagttctgcataagtaagtcctacaaagaataccatgataccaccgatcgcaaaaccgatgacagctcctaaaactccacctcgaccgatccagtctccggttgaaacaacccatccccaaccgatcatagcgccaaatgcaatgacaagaatgtcccatgcactaaatactttgtcaaattctgattttttcttttccattatatatcattcctttcttgcttcacattctgtttaaagtttcgaaagaaaaaaggcgctaaaagatccttatctcttaacgcctttgttagaatgtaaatgtattttagtttagttttcaaatcgcaggtcaattaactgcatgatatattttgctgttttttcaagtccaagaatactagaatcgatcatcatatgtctggtacggcaatctctcatatcagagtttgtcatatattcatatcttgatttcagcatcccatcattatattttacaagtttttgtgcctctttttgtgatacacctttttgttccatgatatgtttcactttatattcttctggtgcatatacaaagatatttaagcagtcatccctgtcttttaatatatagttactacatcttccgataatgacacaagatgattttgccgccagtttatgaataacctcaaactgtgtgtaaataacacggtttgtaagattcgcatatcttggtccaaaggttgtgtcaaattcatatttgacattttcttctccggaatcggctttttctaccagatccctgtcaactccaagtttctctacgacctgatctactaaatctctgtcgtaaaatggaattccaagtgattcggcaaccatctttccaatgtccggaccaccgcttccgtattcacatccgatatttacgataaaatgtttcatttacattcctccctgatattttgatcttttttcaaagatattattttatgctaaggattctacagcctccttcatgatcgcaaatgctttatcacattcttcttctgttacgatcaatggtgggattgtacggatcacactgcttccgatggctgttactaacagttttcgatcaaaacatgcatgtttaatatcaactgcgtttaatgtgtcatcaaattcgatacctgttaataatccctggtgtctgacctcttttacatgaggaagtccttttaatttctcagcaaagtaatctccaactttctttgcatttccagccaagtcgcgatcgatcagttcattaacttctgctaatgctgctgcacagctgactggatgtccaccaaatgttgttccatgagatccaggtgtaaatgctttagcaacttctgctgttgcacagattgctccgatcggcattcctccacctaagccttttgccatggatacgatgtctggtttgattccatagttcatataagacatcactgcacctgttcgacaccatcctgtctgaacttcatcgatcaagagtaacatatcattttcatcacaaaattctcttaatcctttcatgaattcctgtgttgctggatgaacaccaccttcaccctgtactggctcgatcatgatcgcgatcgtattttctgtacatgcatctttaaatgcctgaaggttattatatggtgcgtatgagaatccataagtcattggtccaaatccgacctgacatccatttcccggctgtcctgttgctgacattgctccgaatgttcttccatggaatcccatcttcgctgttacgatatgataatggtttggtccgtatttttcgattccgtatttacgagccatcttgatcattgcttcatttgcctctgtaccagagttctgatagaagatcttatccattccaattgtttcacatactttttcagcaagcagtgcctgaggaattgtgtatggatagttgaatgtatgcatgatgtcgccaacctgatctttaactgctgctacaaccttttcattacagcttcctgcgttatttactgcgattcctgcatagaagtcgagatattcctcaccattttcatcgtacatatacatatcttttgctctctctgcaaggaaatcaaaacgttcgtatgtctcgatcatatatttgtttactttatctttaatatcctgacttgttaatcctgtatcttttaatctcatatctgcttcctcctcatgatgttattagttatttaacttctctgggccagattttgtttatctttttcattgataaactttaaataataaaaagaaaagcaagggaaacttatcctgttggtaagcgcccttgcttaatttctatcctttattttgtacaactatacaataacactagaggattgaattgtcaatatatctttgttattttttgaaatttctttatttttatcttttataatatattttattattgtattgtatatttttcttagtgttttattgttttttgatttttttgtaaaatattatatattacatctgtccattatattgaacatatcattttatcatcttactacttccgtatgatacctaccgataatctacaaacacacagataaaacttgtcttttgttgtgtttcatttttataattatgttttttatctgtttcaaatcgatagatttccccttttgtgatcttctgaacatcttcaccacactcaatcgtaagttctccatctgtaactgaaagatattctcttgtcttctctccatggctgccactgatatatttgcctcctggttcgatatcaatgcggtaaatctctaattggtgattatcttcatatggaaaacatgtccatactttgtattcaccgatcatttcttttgttggtgtcatctgatctggtgttacaaggcaagattccattggcggagcatcaattaattcttggaattcgattcttaatccgcttgtgatctttcctaaaacacctaacgatggatttgctgttcctttctcaatctgagctaacatacttttactaacacctgtttgttctgatagtacatcaagactcatgcccttggaagttcgaattctttttaggttgacagctacattgtgagataggtatgattgataatccataggagactcctttttgcttttattatcagtttcttcatttctgcgtgttctaatgcaagtattattactatccttatgttatctgcaatactgctttaatgcaagcatgattttttacataaccattccttgaatttattcttgtttatgcaactatttgtggatttttatttaatggtgcatattccgaatatatctctggctcatccaaaataactatttgaacaccttcttcgcataacgcttgcaatgttcctggtagacatcttgcttcatttattgttttgcatctatatgctatacagccttgttgatcaaaaatctttgctataacataaattgccttatccatttttaacttctttctatttgttttaaaatatgtcttccccatgtgcttgctctgttgtcaatataaaatgctccataagaccatgttttgtagaactaagtgaatctttcatcatcttcctccgtccgcttcttcggtcccctaatgtgacatttatgggaacttcttctggcttttttattcaaatgacattccatttctttttgaatccatgtcataattacatctacaagatattcctgctgtacttggcttagttcttttctcggttgcattttatgctgctggaatcttatttaacatattaaccttatctatgaattctttcatatcttcaatatactcataaggtgcatattctgaatatatatccggatcatctaaaataacaatctgtactccttcagctcttaatgcttctaaagttcctggcaaacatcttgcctcattaagtgttttgcatctatatgctatacatccttgttgatcaaaaattttcgctactacatatattgatttatcaatcatttcttttttcctccatttcttttaaattttagacgaaatcctaatatgtcattaaaacattgtttaaaccctccacctgttttaagagtcttttcatacttccttttaatagaatcttcacttttaaaacgagatccaataagattttcttgaaatattgtatctatatagcttgccctatatttttctatatcatctaaaattatcggtaatggtgtctttcgaagtgaaatctgctttaaacttcttcctaatgttgaatgatatgataaaatatctaatacttctttcgaaataaattgatccacctatttcacctccatatattttaacattatattatttctattgtatacgtgtttaattttcttttaatgctattctagcatattcatatattttctacaatgaaaaagccactgtaaatattacaatgacttttctgtatttttatttagatgtcttttgcaacaaatataatttaaatgggtattttgtttagaatttttcggtttattctggttaattaatgtctacagaatcttaattattcccaatgtcgtgatttcttaatatctgcggaaacctttccttttttattgataaggatagtatactaatcaaggtagggatattcaagaactatatggacattgaaatgattaatccttggatgcaagtaaaatcatatcatggacattttgagagatcacaaacaatatttcaaacatgtaagtacaaacacaatttatacttttgacacttacatcatataataataaaaatattaatttctattgacgtacagttttctgtacagtaatatataagtatagaaaacgagctaagaaaggagataccatatgttagcagtaaactatacaaattttcgtgaaaatctgaaagattatatggataaagcaacagatgattatgaaactatgatcgttacacgtaaaaataataaaaatgttgttatgatttctgaagaatcatacaataatttaatggaaaatgtctatgtcatgggaaacaaatccaattatgattggttaatggaatctaaagagcaattagaatctgggaaatatacaaagcatgatcttattgaggtgcaagatgaataaattgttcacggataacggatggaaagactatgtatattggcaaaccgaggaccgtaaaaccctaaaaaaaatcaattcactaataaatgatatttcgagaaatggaaatgttggaatgggcaaaccagaacctttaactggtaatctatctggctattggagtcgacgaattaatgataaagatcgtcttatttatcgaattgatgaagaaaatatttatattctttcttgcagatatcattacggagatcattaaatccaagggtagactgtctaatataacgtcgcagagtccgttctgatattccatactgttcagcaacccttttacgaagctcacaggcagcaaaactatcaagatcatcttcaagcagggaagcgatcatcttatatttctgtaatgcgatctcatcacggttttgttgtttgataaatttttgtgttttgttcatgattgtatgaacctcctttcatggatcatcatacaatcatatgccatggacagtgaaaccaaagtcagtaaaatgcctgtagtgtatttcctgaattataaatataacgaaggatgatcttaagccaggcatccggaatggaacttctcaaatgctcgagcagtgaaatcgtgaaagacagaagttcctcatcatatcccaggatccgatgaccgatcgatctcatatgtccttctatgttcatatggttaaagataaaccagtgatgccatcggttcatgcttttttcagaaggtacaaacaaaatcaaatatcaaaaaagggacttttgacaccctaatcctattaggtaaacgcaccgatttaccgattacggatgtttgctagaaaaatggagtaaagtattagcattcttttattctagcaacaccctaagataaatcgcttacgaattattctagtggcagaaataaatttttacttttttaaattgtctacttgacgggtagcagttcaggcctgcaggctcttaaatccctcttactcaattttaggtctcttatctagcttctcaaatttaaactttccttgtaatctatcccaaaattcatattttgaggtactaaatatatattggccatcttttccaattcttagaggaacagctaatattttatcatcatattctgataatacaacgtattttttattattaacatacattatttcataattacttttgtcttttattgatttcgacaaaacacaacctgtacttccaatcaacaataacgcatccaatgatatacaaattataacaaataacgatacaattttcttggacttttttaaaatattgattttatccaaaaatactaatcccattaatcccacatatgttataaaatatacaaatacccttgtaattattccattttcattaacaaaaatatttattgaaatattttttaatattgcatccaaaaaacatacatttagaacactaatacatgctcctataataagcatatatccaaaataaaatatcaacgtgaattttgtttcacgattttcttttttatcttgatttcttgctattattggatatattaagatagccattaatcctataataaaaactatatacagaattttttcatttaaatctccctcaaaatattttgccggaattttgtaaaattcttcacaatcttgttgataggtcttattataaataaacataataatactatagaatattccaagcaagcctactaaacctacaataaattcaatattttttttgattttctccattatacttccctcttattttcatatgttttcctaatgatcctacatatgtcaagatttaaaatgcggttttccttatcttaacttattaacatcaattcatcctgttgaaaattatgatacagttcttcgtattcatctgaactcataagatttcaggtcacttaattattttcaatagattgaaaatccactctaaaataaggcggtcacaatgtacattcttaaatgatcaaaaatgtacattttaatgttgacatttataaaactctcttaatctttcgtcttaagtggagcagatatctagatttgctcggtacctagatcaccctcacttaagcatccaccaatgtgctttcatatattttttcttttacattaaaagactgtcccacttgattatacttatatacatcttttttcattaatctttttatctttaaatggattaaattttataaggttataatcaattgctttttcaaaacaatcattcatatatcccaaacagctattcatagaacttacagcatgtgtaggattttttgtccaagcttctaaaaaatcaataacatctaattccgtaattaattttaattttgaaccaccaaattgctctgccattatatttttatattttgataaaacatttactgcactctgctctgcaagtcgtggtgctttatatttttcataccaccacatgaaccattcattcaatgtagcatttttaaaaataactccaggaccttcttttataatttttattcttttattgacccttcgtttcagttgctccagattcatatcagaatcataaatttcttcacctgcaactcccttttttgcataatatagtccattagctttttgataatatcctttacctaaatcttctccatttatgctttttcccattagagatcctcctttagcgaatcatcttatggttctaacttaatcaatataccatatttatgattcctgttctacttctttaatgtttttttagatagccatttatctaatagtcttttatttatataccatctatttcctatttttaaagaaaacgtgcaatcttttgattttatcaactctctggcttttgtttgaccaattccaagatatatgcaaaattcttttagtgtaagtaatggtttatctgccaattcaagatacacatttttttctttttgttctgcaatcataattgcacctcccgtcatcaataaatatttttgaacagaaaaaaaacattccttacttatgtgtacagtaaacttaaaataagaaatgttttttcaacgattcaagttgattaaatgttcttctctttctatgctgctatctcattttcgatattagcagaaggtaaactttacaaaaaataaagcaagaaagacaattctcaccgatactgaagatattgcttctatttctgctgaccgagctagttataagcataataccaatacagaaagacctagcgaagacggtgtgcagtttgtaacaagtaattccgattgaacttgtagaacacatcaaggtttacaaaaacggcaatatcagcgtgaaattcaaatctgacgatggaatgatgatggatatttggacggagagagcaaatgattctgtgaaatatgacagcttagctacgcaggaggattttgataagttttgatgaataaattataaatttcaataattgtattgctattgtacgcacattcgaatataatatgattataaaatatcggaaaggtggtgctttatatggcagcaaaatcagcgaatctttatgctcgtattgaaccggatgtgaaagaaaaggcagaaagcattttatctgcactgggcattcctgcatccaatgctatcaatatgttttataaacagattatacttcagagaggtcttccttttgatgtgaaaattccatcttctcgtcctgtagatgtgtccgctttatcaaaagcagaactgaatgcagaacttgagaaaggatatgcggataccaaagcagaaagaacacgagaagcaaatgcagtttttgcagacatccgtaaggattatgatctatgacttacactatcaaaattacagatcaggcagataatgatatccgtaacatctatgaatatattgcctacgaactgcagtcaccggagaaggccagtggtcagctggacagaatcgaaaagtgtattatgagtcttgacgatatgccagggcgctatcgtttttatgatagagaaccgtggaaaagccgtggacttcatgttgttccgatagataattattgtgttctttatattgtagataatgatgataggacagtttccatcatgcgagtgatgtatgccggtcgtgatattgatgttcagcttaacaaatacacaaaatacgaagagtagtgtaaatagaaatatattgaagggtattacaattccaaaatacctcatagctcactcggcatgctcactccaaacgaagcagaagctttatactgggagcagaatacttagtctagtctgctcctgaaaatttttacacttttttgtgtctacttacttgactatagtccaatgtatcacataccagcatcttctaacttcggacccgtcgggttcgaagttatgaagcctattactcttgtataaaatctataatccatatataatgttatatatatcttttctataaaggagttttatgatgaataataccggagaaacaattgtaaagaaatggtttaatgattatgtaaacactatgcaccaaaatcccaaaaattataacctattccccatttttgttcttaatgacatttccattccctttactaatacaaacaataactatttttcagtccaatttgatcatattttactcagccaaaaaggaattatcagttatgagacaaagtgctggtccggaacaactcatatctgtacattggaagatgctaaaaaaagctttctgccgttagacagctttcctcgttatcctaaaaatgcttctaatggaatcattatttttaatattcaagaagatacacatgcaacatcaaaagacaattattcttttcatgtcagttcttattcaaaaaaagacaaaaatataatttataagttagttcagaataatcaacaattagcaaaatatttacatatggataaattttttaatcgttttatctttattaattctccagattttaataagaacgtcgttctttccgaaaatgccagaaactctccacatctaaaaacatattcgaaaatactattaaattataatgattttgcaaacgatttggatgaattttttaatgaacctgaccgattttcttcaaccgattgctacaacctgtataaatcccttgatatatattccgaccattttaaaaactgggtatgggatccttcccaaaaataaaagggggattggggacctccccaacaagctctatttgtccgaaaccgtcggacaaataggatgcttgctttaaattcaaagaatttaaatttccactttgctactcaaagtggcatgatcattgaaaagaaaactctgctatcgcagccgtgaattaaaaattcactttgattcctcgggaacacaagttattcaaaaaatccccatgatatatttctttaccatggagactttcttttctttcatttctaaactacttatgttcccagggaatcaaagttcctattgtaattatctattgacaaaatatcctaacattattataattaagataatcttatttaatttatttaataatattaaatatcatttatggcatccattatatgggtgccttttctccattttaagaatctttacaatttatcatatattaaattttacttatcttcctcaggaatcaaagttattcaaaaaaggcttcataaatatatttctatattacgaagccttttctttttaataattctctaccaatatttaattacatcaagccacttgtggataatcaataacagctatttcttgcattaatttttttgccatattaacaattatctcaagacgttcagcaacctcatctgtataatacttttccccacactgttcacattcaagacatggaacatttttaatcacaataatacagtttttataatttacaacatgtgtagtcgtactatttatagttgtgctatttttacaatacatacacatattcctcacctctttcttcgagtctttaaatcattttcaaatttttttgtatctggataatatgcggtaataatatatatatttatattatcacacccggcaacaatatgcaaaatatgcccattcacattatatccaaaaatcaaacaacttgggttgggataatcgtctggataatcctctataatttcacctgtcgcaatcccatttctttacatctaaccgactaatatctctttcttgcattctttgtaaacaatgttgtgtccaaagaatttttgattcagcacataatttttgatatatctttatgttcatttctttttccttctctcctttagtattattatactacattttttgtttttatcattttcaacaactcctaaatataatcttttccacttatgtttcctgggaacataagttaaattatacttcaataatatatgctctgtcagtcaattgctctgtcagttctacctcattttcatttacatgtttaacaatttctgaacaactttctatatcatattcacaatcgtgacacggaatcaaaatcatttcatggatagaagatggaagtatcataattttctttgtatttaccagatttgcaaatgctttcataacttttttatttaacactgctgatgctcctctgaatctagacttgttagaaattataaacatttcgcattcttctgcactcattggaaatcttgataattgtataatttctgtttcttttctaacattattttctgctgtttcccatgcttcggattcgtcaacatccacgtttttcaatatattttttgaaatttttgctgagtaaattgcatcatttaatgcttccattctcaaaaataaatatttttcgattccttcaaattctgttttgcattttacaatatcttctttgctttccttttgaactcccacataaagtcgttttaaaaaaccttctctattaaagtgtattggtttgtttaattcttcactctcacgtaatgcatcgttatgaatcttaagcatatctcttacaatttcttttactgttgcaccgctttgctcttctttcgttattatatcttctacataaaatactggaatcatatatctgtcagaatcaatgatactgattttcaaaaattctacgccattttttacaacattttcttctcttacttcatatcccattttatttaattcgttaacaatatcattttttgtcattttcttttctccttataattacttgaatttgtttgcttcttaactttcaaaaccgaaaaatttattttcaagatctgatctttttctgcatggggagcgtattttgtttttcggaaacaatcgtttcatattttttacctcactttatagcaaatggatttcttaatttattttctgagtcttcacttatctttcgggtttgcgtgcatctgtcaatagcaggatttataccggttacaagggtttaagtggtaagcggagcaagcatcgcttgtgagcattaaggaacgtcccttgtaaccggtataaattctgctatgatgcacatcagcaaaccgataagtgaagactctggaagtaaattaagaaatccatttgctataaagtgagatgaaaaatataaaacgatcggttggagaaaaaaggggttccctttgggaaccgttcgagaaggggattgggatattttcacttatgttccctgggaacataagttgccttttttttactttgattccccgggaagcaaagtatctattataaattttgacaacgcaaaaagacagtcactaattctagcaactgtcttttcttttattccattatatttctaaatcatcatctaattccatctgctctttgctgttctcataattcaagtccatatttaatgctttcattgtttctcttgtaactgttattatatgaattctttcctgcagttcatctaaaacacaatttttaacaacatccagaaacatttttggatttcctcgaacctgccactcttctaaagatttcttataatcctgcttggcatcatgctttaatgcaattggtggatatccttctttttccagcatataatttaaaatcagtcttcctgttctcccatttccatcctgaaatggatgtatattttcaaacattgcatggaatgctgcagcctttgcaataggatgtgcatctgaattttcatatgcatataacagggtcggcattaactctctaatttgtattggatcaactggttctgttaaagatccctgaatatatactggtgcaattcgataagttcctctgattcttggctgacaatctaaagtagttctttcatgtatatcttttataaaattttctgtaaactttctgtcattttccaattctttttcgatatatgcacatccatctgcacatcctctagctgaaaatatttctcttaatcgttgattattatttggagtaaattctccttccaatacaagctccgtatctcctaatgacaacgtactcccttctattgcatttgactcataggtaaatctaactaaaaatgcgtcatcatagctttttaaaccatctttttcatattcattaaatggtttcataccttcaaactttttctttaattcatctaattctttataatcatctatcgaaatatcctgatgaaaagctttataaattttttcgtgcattttttaccctccattcatatttcatttttccatagtattatgtttgtgtcaagttgaatcagtttgactttgatttccgaggaatcaaagtttatagcaactatctcttgatcaaattacctttttttctgccttattatataacattcataaattaaaatcactccgatcaccatcatcttcagactataagtaatatttaatgtatcattctccattccaccaacagctcccatgatcaaaaccactcctgcaacaattccaattacgtatctcataaaattttctccttccaaactttttaattttaatgttttaaactacaaccgatcataaaatttgctttcaagatctgaagctttttttaaggggtgcgtttaaattttttcggaaacatttatttttgtgtttttcctcctttcgtaaatttgctttctgagtctttgcttatctcgggtttgcgtgcattttcaatatcaattttctttatagctgcaagggttcaagtggtaagcggagctttgcgagcattaaggaacgtcccttgcaactataaagaaaattggtataatgcacatctgcaaatacgaataagcaaagattctgaaaacaaatttcgaaggtggataccaaaaactttcggttggagaaaaaaggggttcccttggggaaccgctcgaaaaagggattttattttacttatgttccccgggaatataagttacatttttacataaaaaaagcagctatccgctaaggatagctacctactctttatagtcatctatatctccaattcttcatctatctcttttgattctggagataagtcatcatattgttctggttgatatctgacattttcatattcattagatggaacatacaatcgtttacactcaagaattccatcgatttgctgatcaactaatttatttaatttctgcagacgttcttctggaagatcaaattcgtcatttctctggaattcaaaccctctcaaatttttcaggtcatttcgtatttcaggagttaataatgcatgagcgatctcattgaaatcttctccaatctgtgttggtcttgatgctaaatatacatccagattttcaaaatcttcctgttctgcatatggtaacaaagcttgattatgatcaaacattggagccattctttttatctgcattgtatcattatctaccatgaatccataattgcccatatgacgatccgtattcaaaatcaaagcatctaatacaatcattcgtcgaaaatcatcttcacatccatgctgttcaaatttttctaatatttcttttactgaaacaagttttccaaaaaattttgtaattggaacatacccttcctgctccgatgtaaacaacctacatttcgatgctattttattatgatatttctcaacactatattctactgcatctctgcatattatcctggcaatctgagatgaatacatttctgaataaggctctaatccagcatttcttgctccctcgcttcctctctttaacagatagattccatcatcttcttttacccaacattttgcaaaactacctgacgtaccaaattccggtgaagtggtcgtaaactcttttccataaagcccaccttcaaatgctatcttcgcaatcgtttcatcaaattgattttcatacagagaaacatttttccactgtaatttactatctacagttttaatccaaaatgtatcatttaatgaaagggcatgtgtcactctgataaatccatccagattataacaaccacacattcttaacaagtctgcaatatactggcgatgttttggagcctgtctctgactgatccactgtcctattccatcatatccatatggtcgtatttcttcataggattcttcttctttaaaactcacaccaagaggggaattatcgcaagtaaatcttaatatccgatcatctttattcattagataaaattcattttctaaaaacatgtctattttcctctctaattcctgtctttattacttatctatgtgcttttattatatcatcgtaattcccacatataaaccacttcttacttttaaggatatacttaaaagtcttcttataactgtttatgtggaatcgatctaaaatttctacaactcccttataataaacacaataattttctctattacactgatcaatttctgttcttgctccagcaattgtcatttctcttaatctaaattcttttatcttaccattattatctaaaatctgtaatcttccatttggaatttcacctgttatatttacacgttttgttttttttcatctaacatctcatcacctcacactaagattatacaagaacgtatgttctgtgtaaagaggttgattttgctgcttttattccagcagttatcttttttcccatccttcatatttattttaaagcaaacaacagtctgaaaggagcaaaaaaatgttaaaaaaatttagtacaatcatcattaatttcatttctaaatccttactaaaattaggatttttatgcttggccaaaatattatttataatcttattgcctctctttattgcttctatggccattattttccagtgttttctgtacggcctgtgacatggcctgtgtctgccccgttacagtcttacctaaagaatatattttgtcttcataatttttcattttataaaaatcctctctccatcttatgccttcttcatcctgcttttatctgtatacagaaaacctgtccctgctagttttgttacccatttttgcatgcaaaaaggacacttgccaaaatctgccagtgtccctactatatttctctaaaatcacacatttatatagtataaaaggtatcggaattccttctgttcaaacatcttttccatatattatgatgatatggaaacagtggcaaccggctgacatggtcaagctttctgactttagtcccttctggctttgcgcccttacctttcaacaggtttgcctttaaaataatttctttcttcaaaagaccataccacacggttttccgcacgtcaataattttttaaaaaaatctacacatattttacttcataaaaaatctaaatcgataaatcctaaaaatctaacatttttttcatatgaagctcattcatcatttatagtgctattctctccattaactaaacataacctattgttcgataataaattttagatccaaaaagaggcctcacaccacgaaccaactcgcaatgcaaagcccacccacacttatctaatcttcgttacataatccagcgaaatccacccatcccctcattctcatacgctttcagtcttctggttgtgtgatttcttaatgtccctaggaccttaaagtgtcccttacttttgttgcatttgctgttgcctttccttctgctatatggacatgtataggctccaatggattattttcattcgaccaaaaataaatactatatggcccaactctaaatatttgcagcattcagaatccctccttcttgagaaaattctataattaaatgtgcattgtctcgaataagttgcttaaaatacatcatctctgactctgaataaccgtgaacttcccatgtataatctggcaaccaacaaatagcatcatgaaatccccctgtttcatctggtgtttcaatatatacttttacttttccatctggatacatctctgaatgcgtaatttctgtatcatcatttaatgtcatatatggatacatcatattctttcactccttacttccatgccgttcatctttatgatattttatcacaattagatttctaccacaatgaaaaagccactataaatattacaatgacttttctgtatttttatttagatgtcttttataaaaatataatttaaatgattattttgtttaaaattttcagaacaatttgttcttatttgtacattttattttataaactgatttcttaatgtcccagtgatcaatgtcctatgcccactatttcttcaaaactctatcaaaaattctataatttcgatcatctcttggagaacaatacaccgcaaattcaatatttttgaaactatataagtattctcgaattacattttttgctacctgagcaacaatctgaggatcattcataaatgcaccacatccaaatgccccaagaattatcgtttcatcatcttctgaaagtgctgtatccaaaattctttttaatcgcttttcatgtaattttaataattcgtcatttgtcatctttttcgcattattatatgatgacttgccattataattattttggactcttagattcggagctgcacatgtgattacatctacatcataccaatcagatgcattcatgatctctggttgttcagtatctgttttaaatactgtgactgcaggtgtataaatgatatcatcattataaattggattatgtgcttgtctatgtggagaatagaatccatcccacattgtttgtgtacttaaacaaacatatagtcctgaacatctgcacagacattcttcttgtgcattagatcctctttttactccaccacctggattagttgcggaagcaaaattatgtaccgctgtcttagtatttttatatgccgatgctgcttgtaatgttctcttttttgatacaataatatttgcaggtttttcatatcgtttctggttattgctatttattctttgattttggaggattagtttttggttacatattgaatttttgatcgattgttttaagcttgaatttgttttacataatgtttctgtatcttcaaatatttttatgttttcttgttttcccataatctaatttctctctttttctttgttatatgtataaactaggataaatacaacctatttttacaataaaaagccattgctattaatactcccaaggagatattaagtaacaacagctttaataaatttattaatgggtattttgtttagaatttttcggtttattctgattaattaatgtctacagaatcttaattattcccagtgtcgtgatttcttaatatctgcggaaaccttaattgccgcggtagctttttgttatttcattttttcaactaatttctcaaattcttcttcattctcaataaatgtataaggtgcatattctccatatgctgtaggtctactaattgttactaattgtattccttttgatgccacttgctgattcatccttcttttcattttcactaaatgacttccatgttgagtttttaatgcataacatccatgcatatttttgccgtatctaatgtatcctttgcattttacattcggtaaatagataaatctcttttcttatccattcactatcaccccttcttcatgaatgtttttataaaatggcaacgtatctaaccaatattcatattgctcttcattttttataattggcgaaatatcaactcctgtatccatttctatatcaaatgctaaatcatatacctgattttctatttttttaatctcattatctgacatttttaccagaaccataacatcaacatctgaacttgaattataatcacctctggcataagagccataaacaataacttttgttaattttgattccattatgtcttttagttgctgagaaaattgataaattatattgtgtattctatatttattttttatacattgatattttatcatatctcgatcactataacaacgaaaaagccattgcacaccatctactctattaattggatgatgatttacaatgaccttcttctttacattaaatgattattttgtttagaatttttggaacaatttgttcttatttgtacaatttattttataaactgatttcttaatgtccctgggacctctctgtatatttttattaaaattgcacaagaaagcttggatttatcagctttccggatactctttaaattaattagctgatcaaaatacagccttatggatagtgaataaggtatctttttgtaccattcatagaaaattggtataaaaagaagacgtcttgatatttttatgattgccttctttgttcacccattttctctacagcaacaaacctctcatgtctgacaggatcatccatctgctacgatcggagtcctaaattccttcgttctgtctatccatagctgggctgccacttatgcttaagcacaggatctttgtcctatggtctgtatctcctgtggctaaactggctatacttttttcaacgatacagttacatccctgtccacagcaccaatctccttggcggacgctttcctgttttcaggtttatttctttcttgttaggctgcctgtggcagttgggttggacgatgaatatcctctatcatttttgatccattgtagacaacacccttcgtcatgattgcaaagaatacccggatcagcttacatccaacggctatcattgcctgtcggcctttcagtggattctttatccgttttctgtaataatcatagatcgatctaaattctttattgctctgtatcaatggtaatactacctgatatatgatttttcgcagtttcttccgatcacgcttgctgatcgttgtacgacctttgtgttttccagagctgttctctaccagttcaaatccagcatacttctggatctgtttcgggtttttaaagcgactgatatccccgacttctgatatgaaaccagctacagttactaatccgacaccatcaactgacagcatcttttctgcatttggtatctgcaagatcagttcttccatcacagatgtaaccatttccagttgttgcttctttaccttataatcttccagcaacatctgaatttccatgactgcaccctgacctcctgattttccaacactatcatgcgcagcatctaccagggtctttgccctattaaaactggcgcctttgccacgcactttatgttctctccatatctttataatgttatctacacccagtgctgtcaccatagtcggtaatggtacttcctcaaggatcatcattcctgttgttgtatcaaatttcttgtatacagtaagatattctggaaaatatatcttcagccatctctgtatcctgttggatgctacattcagctccttcatgatgcgatctcggctggatgtcacttctctgatctctgcatagattccttccggcacatatggaaaactgtaccttccatcgattacaagctttgcaatcgtctttggatctttcagatctgttttctttgggctgttgtcatccagttcctttgatttcttaacagatgcaggattcacgaatgccagtttcatcccatgatcttttacaaactgataaaaggtataccagtaatgacctgtaggttcacatcctatcattgcttcattttttccatgctttatgcatatttgtgtaacccagtcataaaagctattgaacccattgatatcagttgaaaatctgaatacttttcttgtcagctctcttccccggtaatcgaatgctctgacatagtgttcagaacttccgatatcaactccgagtactaaagttgattctgtgacttgttcaatcttttgattctgtgtataattcattataaggacctccgataattaagatgtttttcatccgccaagatgatatcttaattatactgtgaggttcttctttcgtctattgacattatttatgaattacaggaatgcttaatatttattataagttttttccaatattttcaagttcttttatagaatccttgttttttgcaagttcatcactggctgttgcataatatgatttttggaaaatcatatcccatgaaagatatttcgccatgcagtcgaactgtttgtcaattaactcatactggatactatccaccggggatcctcctacaacgattgttccaacttttttatttttcagctgcaaaccgcggcagtagcacttatcaatgataagtttcaactgcgcagacattccccaccaatataccggagtagcaaaaagaatcacatctgcagcagtaattttatcaatcgtgggatttgtatcatcctgatcaatacatcctttataacattgacaggccccacatcccttacaaggtgctatatgaagtctgtctggttggatgatttcaatctcatt

SEQ ID NO: 620 - DNA, 62892 bp, Unknown
  gut microbiota DNA sequence
gccaaagaaaaaacaaaaaagtatactatcacctgccaggattatttgaattttatgaattatattgtgcctttctgccattatataaggaacacagagaatacttttatgactggtgtgagatcagttccatctatggctctcctgcagattgtctctggggaggcggacgcgcaggatttggatctgataatccagaagaagtcttaaaacttacacaggaatatggaatttcagccagactgacttttagcaacagtttacttagaaaagaacatttaacagataaaaaatgtaatatcctatgcaaaatgtttgaagaagttggagaaaaaagaaatggtgtgatcgtccattcggatttattgcttaagtatttggaaataaattatccaaaattatattttgtatcttctacgacaaaagtgttgacggattttaatgaatttttgcaagaagtaaagaaagaagattttcggtatgtagtaccagattttcggttaaataaagcatttgataaattaaacatgctttcggagcaggagaaaaataaagtggaatttttatgcaatgaatgctgttggtttggatgtaaagacagaaagcaatgctacgaaatagtcagtcgaaaaaacttaggagaaatgataccagatcacaaatgcaactcgccagatgcaaaggaaggctatcgtttttcaaaggcaatgaagaatccgggatttatcagtgctaatgatataaagaaaatttatcttccaatggggtttgagaattttaaaattgaaggacgtggattgggaagtgcgttggttttggagtttctactatactatatggtaaaaccagaataccaaatatgcgttagagaagaagtttatttggataatatgcttgatttattttaatgtataatgcattttatacaacacataaagcaaaactgtttattaaaaaatgcgaggaatctaagttaagaagtttaagaaaaagaaggggtttctttttcttgtatgatttagtataatagagagatacagtgaaatatatattgaaaataggagagaaaaatggaaaagaaaaatgactttaagccttttatttccgcagataaagttttaccagagtttacagttacatcagtaatccttggtatgatactggcggttatatttggtggtgcaaacgcttatttggggctaagagttggtatgactgtatcagcctccattccagcggcagttatttccatgggtgtgatccgtgtgatcttaaagaaagattccatccttgaaaataacatggtacagacaattggttcagcaggtgaatcattagcagcaggagcaatctttacaatccctgctatttttatttgggcatcagaaaagggaagtggagttactgctccatcttttgtatctatcgcattgatcgcgctttgcggtggtattttaggagtactttttatggtacctcttcgtacagccctcatcgtagaagaacatggggtacttccttatcctgaaggaacagcttgtgcagaagtgcttttagctggagaagaaggaggaagtaaatctaaagttgtatttgcaggactcggaattgcggcagtttataaatttattgcagatggtttaaaacttttccctagtgaagttgaattttcaatgcagggacagtatacaacatccgttggtatggatgttcttccggcattagcaggtgtaggttatatctgtggtgtgcaggtatcaagctatctttttgcaggtggtgtgctatcttatcttgtattaattcctgcaattgcttattttggcggagattctttatcaaaagttgtcgatgagacaggaaaagcacttgcatttaatcagttaggtgcaagccagatctggagtaactatgtcagatatattggtgccggtgcagtagcagctggtggtctgattagtctgatcaagacattcccaacaatgatcaagacatttggacatgctatgaagggattcggtaagaaaggtgacagccagttaagaacacagcaggatatttctatgaaagtggttcttggaggaatcctgatcattgcagttttaatctggttattaccagagattccagtaagcttcttgggagcactgatgattgttgtatttggtttcttctttgcaacggtatcatctagaatggttggtattgtaggaagtagtaataacccagtatcaggtatggcgatcgcgacactgatcgtaacaacatttatcttaaaagcaactgggaatacaggagcagcaggtatggtatcagcaatttctattggtactgttatctgtatcgtagcagctatggcaggagatacttcacaggacttaaagacaggttatatcgtaggtgcgacacctagattacagcagatcggagaattgatcggtgcgatcgtagcagcatttgcaatcggaggagttatgtaccttctgaatgcagcatggggattcggttctgatcagattccagcaccacaggcaacattgatgaagatggtcgttgaaggtgttatgggtggtacattaccatgggtattgattttcatgggtgtgtttatcgcaatcgttgttgaaatccttggaattccagtgttagcattttcaatcggtctttatttaccaatttacttaagtacaccaatcatggttggtggactgattcgttggtttattgacaataagagaaaatatgacagtgatgcggcaagaaaagacggatcagatcgaggagtcctttatgctgcaggtatgattgcaggagaaggtatcgttggtatccttctggctgtactggcagtatttggtgttgcagataagatcaatctgtcatctgtatatggagctgccttccagagtgtaggtaactgggtaggtttagcagcttttgtagtattgttagctatattattctacttcacaagaaataaaaagacgattgaagtagacgcaaaataataaaaataaatatgtatttcagtgagaagaaagcactgctgcgattctgcagtagtgctttctaaataaaaaggtgcattatgaaagaaaagaagaattatattgacaacatcccgaagatcaatgatatgaaatgggatgtgtcagaagatggaattgtagaaattacagtagaaaatactggattttataatacgatcgcgcagaaaatatttaaaaagccacgttacagttttatcaaattagatgaatatggaagttttgtgtggcagaaaattgatggaaagaaaagtatttatgagataggaaaagaacttcaagcagttcatgaaggtgcagcaacacagttatatgaaagattatcacagtattttgcaattttagaaagaaataaatacattgtttttgaagaataaatattattaaaagtgaaaaaggatttaatatgaaaatatcaacagtgatcataggcattgctttatttgccatagtgacgatgatcctatatggatggggaatcgtaaaacaaaagaatcagacaagtgacctgatgaatttgctttttagtaaaggacaggataaaataaaaaagtatttaaaacaacatgaatacgttacaatttcacaggtagaacagatttgcgaaggtcttgaagcgaaacagccattttcaagaaataaagcggttgtgaaggataaacgagactatgcgaagaaacttgtagaatatatgctgaaaacgaatcagctcgaacaagagggcagtcgttacaaaatgcacaaaaaataaggaggacataaaatgtcagtattaggagaattacagccaaacaaagtatttaaatattttgaggagatttgttcaatccctcacggatcaagaaatctgcagcagattagcgattatctggtagattttgcaaaagcacatgaattaaaatacagacaggatgaagatctgaatgtgatcatctggaaagatggatccaaaggatatgaggcttctgaaccagtcattcttcagggacatatggacatggttgcagtcaaagaagcagattgcgataaagatatggaaaaagaaggattggatctggaaatcaatggagattatatttcagcaaaaggaacttctttaggtggagatgatgggatcgcggttgcatatacacttgcagtgttagacgatgaagaaatggcacacccaccaattgaagcaatctttacagttaacgaagaaatcggtatgcttggagcagcaactattgatgtttcagatcttaagggacgtttatttatgaacatggattctgaagacgaaggagtgtttacagtcagctgtgcaggtggagcatccgtaatctgtaagattccatatgagacagaaactgtcaatgcatctgtcattgaaatcaagatgactggattcgcaggtgggcattctggtgtcgagatcatcaaagggcgtttgaacgcaaactgtgcaatggcaagagtattgttaagtctgtttaatgaggttgaaatgcagcttgtttccgtaaatggtggagaaaaagacaatgcgattgctaagtttagcgaagcatctgttgcagtacttccagaagaattagaagcagcaaaacagatcgttgaagatacatttgcacagattaaagaagaatataaagtcacagatccagatgcaaaattaacagtgaatgtaaaagaagcagcaaatatagaaacattcacagaagatacaacatttgcagtagtaacagcaatggttcatatgccaaatggtgttcagagaatgaatccagagattgaaggattggtacagacatcactgaatatgggaattttaacaacagaagaatctgaagtacagatgacatttgcagttagaagttccagtgagacagaaaaacagtatctgatcgatcaattaacatctcttacagaaacattaggagggaatgtagagattgcaggaccatatccaggatgggaatacaaagcagattccagattacgtgaggttatggttgaagcatataaacatttatacaacggagaagaaccagttgttgaaggtattcatgcaggacttgaatgtggaatctttgcttctaaattgccggggcttgatgcagtatcctttggaccacagatggaacatattcatacaacaaatgaggtgttgagtatctcatctacagaacgtacatgggaactggttgtgaaaacgttggctgctttgaaataaattgtgatttgtagtttgaagacggaaattattggtggaatattataaaaagagatcatgtgcctgcaacccatttgtgttcggactcccacgtagctgtactaagctcctgaatggtctaacgaccatccactcgctaagtgcagacgtgtccgtacggttgctgacacatgatctctttttataatattcaaataatttacgtgattcaaaccactacacagtgtgtatgttatacggtactggctaataatttttgtatttattaacagatgacagatggtaaaagggcttaaacaacaccgatttatcgaggtgtttggaaaatattcaaattgcttatcttcagtttgttgataatattattggagttgaatcttctgccattttgtattgatatattataacaagtacgattataataaaatagttgtgtttttttaaaccattttatacaataataaatagaaaaatcaaaatgaaaggaataaaatgaatccatggaagaattcttacaagtaggagcaatcgccaacacacacggcatcgctggggaagtcaaagtatttccgatgacagatgatatcaaacgatttaagaaattaaaagaagtatatttagatacaggaaaagaaagaaaactattacacgtagtgtcatgcaaattcgtaaagaaccagccggttttgagatttaaagaattttcaaatatcaacgaagtagagatgtataaaagaaaaggcctgtttgttacaagagatcaggcagtacctcttgaaaaagacgaatactttatcgcagatctgatcggtctttctgtgatcagagaggataatggagaagttcttggggaattaactgatgttttacagacgggtgcaaatgatgtctatgaagtgaagatggaagatggaaaagaagttttacttccagcgatcagagaatgcattaagaatgtggatcttcaaaaaggtgagatcacagtccatgtcatgaaaggattattagatgaatagatttcatatattaacattatttccagagatggtgatggacgggttgaatacaagtatcatcggaagagcgattgaagcaggacttcttgagatcaatgcggtcaatattcgtgactattctaccaataaacatatgaaagtggatgattacccatatggaggcggagccggacttgtgatgcagccagagccggtttaccgtgcgtataaagaccttgaaaaagatatgaagaagaaaccaagagttgtctatctgacgccgcaagggacaacatttcatcaggagatggcaaaggaacttgcaaaagaagaagaattagtttttttatgtgggcattatgaaggaatcgatgagagggttttggaagaaatagttacagattatgtatcaatcggagattatgtattgactggtggggaattgcctgcaatggtgatgatcgattcaatttcaagattggttccaggtgttttacataatgatgattccgctggggatgaatctttcgaaaatgggttgcttgaatatccacagtatacaagaccaccagtgtttttagataaagaggtgccagaagttcttttatccggacatcacgagaatatccgcaaatggaggcatgaacagtcagtcaaacgtaccaaagagagaagaccggatctatgggaggcatatgagaaggagatgaaagaaaaagatgggggaaaataggattaagcttgtcgcagcggatatggatggaacactgttgaatcgagagcgtaagattacaaagtatacacagaatgtgatcaaaaaagcaatggcacaaggtgtttatttcgttccggctacaggaagagctgtgaatgcattaccgccagagttaaaagagatggaaggaattcgctatgggattttcagtaatggtgcaaccatttatgacttaaaagaagaaaaagtgatttataaaaatcattttgaaatggatcgagttttagagttgatggattttcttaagcaatttgatctaatggaaagtattagtttaaatgggcaatcctatgctaacaaaaaagaaatggaaaatattgattattatgaacttgattcaaatacaaaagcaattgtgcaggggtcgagagttcttgttgatgatttagagatgtttgtaaaagaacagtcaacaactgttgagaagacaactttattatttaagacgatggaagaaagacgaagagcagcggatgcattgagtaagattgaagacattcagttttcaagttctcttccaaagaatcttgagatttctaagaaaggctgtaataaaggagatggtctgttccatcttgcaaagatcttgaatattcaaaaagaagagattatgagttgtggggatgcagacaatgacagagaacttttagaaagtgcaggacttgcggttgttatggaaaatggccttgattctatgaaagcgatcgcagactatattacggtttccaatcaggaaaatggagtcgcaaaggcaatggagaaatttgtattaaggtaaagaatcttaaaaaatacaaaaaaacacttgcttcacataaaaaaatatgataatatgttcaagttgttataaatatggatggtcctctgttacatttggtattaagaacatctaaaaacgttcaaggaggaacaacaatgagcgcacaggatattattaaaagcatcgaagatgcacagttaagagaagttgctgaattcaaaacaggagacactgtaagagttcacgcgaaagtaaaagaaggaaaccgtgaaagaattcaggttttcgaaggaacagtcatcaaaagacagaatggtggagcacgcgaaacatttactgtaagaaaacaggcaagtggtgttggtgttgaaaaaacatggccagtacattctccaatcatcgaaaagattgaagtagtaagacgtggtaaagtaagacgtgctaaattatactacttacgtgatcgtgttggtaaagcagcaaaagtaaaagaaagagtataatcagacaaagattgtcaaaagagagggataggctgtatagcttatccctgttttagtatacaggaattttacgaatctttctatacgaagaggaaaggagttcttctatgaggaaaggatacacagtaacctatcagatgcgcaagaaacagcgtcagcaaagggaaatcgtgattcagtatgtcttaaaatttgtcggagttgtgttactggcatttttgttagtaagatttgtgtgtttcagttttacgattcaaggtgattctatgtcaccaacgattgaaagaggtgaaaaacatctggtgaatcgcctgatctatcagatcaagggaccaagtaggtatgatgtggtcatatttaaatcagatgacaagaatggaaattactatgtaaaacgagtgataggtcttccgggagaaaaggttcagatcaaaaacggcagaatctatgtaaacggaaagaaaacaaaagcattttcaagtcagaagattttatctgcaggattagcagcagatgagattacattaaagagtaagcagtactttgttgtgggagataactataataatagtgaagattccagaagtgcgagtgttggaaatatcaaaagaacaaatatcattggaaaggtcggtatcaaatactggccgtggtaaacagagggaaggagaaataaagaatggattttcagtggtacccgggtcatatgaccaaagcaaaacgtatgatgcaggaaaacatgaaactgatcgatattatgatcgaacttgtggatgcaagaattccactaagcagcagaaatccggatattgaccagttggcagcgaacaagtcacgattgatcttgttaaataagacagatatggcagatgaacgtgtgactgcacagtgggaagaatattttaaagaaaaaggattctatgtagcaagaacaaatgcaagatcaggaaaaggtgtcaaaggtacacaggcgatcgtgatggatgcctgcaaggaaaaacttgagagagatagaaaacgtgggattaaaaaccgtccgatcagagcaatgatcgcaggaatcccaaacgttggaaaatcaacatttatcaacagtctggttggaaaagcctgtacaaaaacaggaaataaaccaggagttacaaaaggaaaacagtggatcaaattaaataagaatattgaattattagatacccctggaattttatggcctaaatttgaagaccagcaggttgggcttcgtctggcattgatcggatcgatcagagatgaaatcctcaatcaggatgaaatggcgatcgaactgatcgagtatttaaaaaatcattatcagggaattcttgctgatcgctatcaagtagatgaaaatgaagataaagtgaaaatcttagaacagattgcgctaaatcgtaattgtaagatgaaaggaaatgaattagattacgaaaaagcatcaaagatcgtattagaggaattccgaaatgggaaattaggaaaaatttctctggaaacaccagaagaagggacaaaagaggcataaaagcctttgaggggcagatataagaatgtttaaaagtattctaaggttgctgggtaccattttgatcgcggttgcatttgcatttgttcttattatgtgtgttggtgaacggacgaaagtaagtggacattcaatggaaccgcacttgcatgatcatgatcaagtgttgttagataagttaacatatcgttttcgggatcctaaacgatatgagattattgtatttccaggaccagaaggtggcgatcagttttttgtaaagcgagtgatcgcacttccaggagaaacggtaaagatcacaaaaggaaaagtctatgtaaatgacaaagaagtaaaagattattccaaagatcatacgacagattcatgtgaattaaaaggaaagtttcatctttcatcagatgaatattttgttttaggagataacagagataatagtaatgacagtagatataaagaggttggtccagtaaagaggtcaaagatcacagggaggattattttccggttttatccatggaagaatgcaggtgtgatccggccataggaagggttttaagacttatgacaaagaaagaagaacgagaagccaagaagttagaaaaattaaggcttgagaaagaaagaatgtatgagatgttttcttttgaaagagaatatggaaatcatcaggcgatttgtggaattgatgaagttggaagaggaccatttgcaggacctgttgttgcggctgcagtgattttgccaaaagactgtgatattttatatctgaatgattccaaaaagctttcagagaagaaaagggagcttttatatgatgagatttatgagaaagcagttgcaatcggtattggaatgtcttcagaagaagtgatcgatgagatcaatatcctgcaggcaacttataaggcaatgcagcaggcaatttcaaagctttcgataaaaccagatcttttattgaatgatgcggtcacaattccagatgttgagatcgaacagattccgatcatcaaaggagatgcaaaaagtgcatcgatcgcagcggcaagtattgttgcgaaagttacaagggaccgtatgatgaaagaatatgatataatttatccgggatatgactttgcaaaaaataaaggatatggaaccaaagcacatattgaaggaatcaaaaagcagggaatctgtgatatccatagaagaacatttgtaaagaaatacatataaaaaacaaaaaagtatatataatatgaagaaaaataacagggagacaggggcaaaagcagaagcgattgcctgttggtttctgaaacagcaaggatatgacgtccttgaacaaaacttttatacaaaagtcggagagattgatattatagcaaaagaagatcagacattggtatttgtggaagtaaaatacagaaaagatgacaaaaagggatatccggcacaagctgtagaccaaagaaaacagcagaagatccgaaagagtgcaatgatttatttaaagaagaatcatctatcttttgaacagccgatccgttttgatgtagtggagattttaggaaagaagatcagggtgataaaacatgcattttaaaaaatcaaacgataatcagtctacgatattacatgaggggtctgttccatatctgacatttaaaaaattggatcaggcaggagtcagacatggattttcaacacgtatgggtggagtcagcgaaggaatgttttccacgttgaatttaagctataaccgtggagataaaaaagaagctgtggatgaaaatttcagaagaatctcagaagcgatcggattcgatcatacaaagctggtattttcaaatcagattcatgagacgagaatccataaggtaacgaaagaagattgtggaaaagttatgaaagatatggatggtcttgctacaaatgagcaggggattccgctttatacaggatatgcagattgtgtgcctttgtttttttatgatccggtagaaaaggctgcagctttagcacattcaggatggagaggcactgttggaagaatcggtgccaagatggtacaatttttagaaaatgaatatggaagtaaaaaggaaaatatcatcgcagccattggaccatcaatctgccgaagttgctacgaggttagtgaagatgttgcagatgagtttaaaaaagaactgacaggacatgatgcaaaagaatttttggatgataaagggaatggaaaataccagcttgatctctggaaagcaaatgagattattttgacagaagcaggaatccgtccagaaaatcttgatattacagatatctgcacatgttgtaatcctgatctactgttttcgcatagagcaagtcatgggaaacgtggtaatctggcagcatttattgtgttataaaaaggtaaataaaaagaatatatcttgtgaaattcttcacactggacgaatttcataagataaggtatactaagaaacagtacaggttttgaaacatttagagaggtatatagattatgagtaagccgatcattgccattgtaggaagaccgaatgtaggaaagtctacattgtttaatgcactggcaggagaaaaaatttcaattgttaaagatacaccaggagttacaagagaccgtatttatgcagatgtgacatggttaaactatcactttacattgattgatacaggtggtattgaaccagatagtggtgatctgttattaagccacatgagaggacaggcagagattgcaatggagacagcagatgtgatcattttccttacagacgtaagacaggggcttgtcgatgcagactatcaggtggcagatatgttaagacgatcaggaaaaccaattgtgttagcagtcaataaagtagataattacgaaaaattcgttctggatacttatgaattttacaatctggggcttggaacaccatttccagtttcagcgaattccaagattggatttggtgatctgttagatgaagttcttgttcactgcaatccacaggatgcagatgagaaagaagatgaaagaccaagagttgcgatcatcggaaagccaaatgcaggaaaatcttcattgatcaataaattattgggagaagatcgtctgatcgtttctgatattgcaggaacaacaagagatgcgattgatacaacggtcaaacgtaatggaaaagaatatgtattcatcgatacagccggacttcgaaagaaagccagagtcaaagaagatatcgaacgttacagtgtgatccgtacggttgcagcagtagaacgttgtgatgtggcgatcttaatcattgatgcggaagaaggaatcacagaacaggatgccaagatcgcaggaattgcccatgaacgtggaaaaggtatgatcattgcggttaacaaatgggatctcatcgagaagaacgataagacaatctacaagtttacaaaccaggttagagaagtgttatcttatatgtcatatgcagaacttgttttcatctctgctaagacaggacagagacttcctaagatttttgatgttcttgatatggtgatcgagaatcatgcattacgtgtacagacaggagtcttaaacgagatccttacagaggcggtagcgatgaaacagccaccatcagacaaaggaaagagattaaaactttactatatcacacaggtttctgtaaaaccgccaacatttgttgtgtttatcaatgatcgtcagttaatgcatttttcatatacaagatatcttgagaaccagatccgtaatacatttggattcagaggaacaccaattcatattattgcgagggaaaggaaggaaagataatggcagtttgtattgttgtgtgtatgatcgtcggatacctgtttgggtgtattcagacaggatatattgtcggacgagtaaataagatcgatatcagagattacggaagtggaaattccgggacaacgaatacattaagaactttgggaaagacagcagcgatcattacatttcttggagatgccgtcaaaggacttgtggcggtgaatcttgcgagatatgtgatcatgccggcttttcatgtagaaggagaagcttatctttggcttttgacaggatttgcagtagtactgggacataatttcccgttttatcttggatttaaaggtggaaagggaatagcgacaactgggggagttatttttgcatttcactggcagcttgggttggtctgtgcagcagtatttttgatcattacggctatttctaagtatgtatcgttaggatcaatctgcatggtgctgatcattccatttattttgtattttaacaatccacatgattggaaattagttattgttggatgtatatttacagccatggcaatctggcgccatcgtgcgaatattgggcgtttgatgaatggtactgagaataaattaggtcagaaagtaaaacgttaggaggaacttaaacagatgaagaaagttagcgttatcggtgcaggaagctggggaagtgcccttgcggtattattagcaaataatggacatgaagtgacattgtggacacatgatccgcatgaaatagagatgctttccacaaagagagagcaggtagagaaattacctggagtaaaattgccagataatattatgatcgaggcagatcttaaaacagctttaacagatgaagatgttgttgttatggcagttccttcacctgttgttcgtatggttgcaaaacagatgtccccatttataaaagacgggcagatcattgttaacgttgcaaaaggtatcgaagatgttacatataagacattatcggatatcattgaagaagagattccaaatgcagaagtttgtgtactatcagggcctagtcatgcagaagaagtaggaagaggaattcctacaacggttgtagttggtgcaaagaataaagagacagcggaaatgcttcaggatgtatttatgaataaagtattccgtgtatacacaagttccgacattgttggaattgagcttggaggagcattaaagaacgttattgcattagcagcaggaacggttgatggtcttggatatggagataatacaaaagcagcattaatgacaagaggaattgcagaactgacacgtcttggagaagcacttggtggaaaaccagagacattttcaggccttacaggagttggagatctgatcgttacatgtacaagcgtacatagtcgaaatcgtaaagcaggatacttaatgggaaaaggtatgactgcagaggaagctatgaaagaagtaaaaatggttgtagaaggggtatattcagcgaaagcagcccttggacttgcaaggaaatgcaatgtagctgtaccaattgtggaagcagtgaacagagtgttatttgagaatgcggatccaaaagaagaagtttcaaacttactccttcgtgagagaaaacaagaacatacaaatcttgaatggaattaatcaggatatataaaaacataaatatatacaaaacataaaaacatgaaggaaggaagacaacaatggaatcatttagggaaatgtcaaaagaagagttacaggcacaggaagtggaagtgaacaaaaagtatcaggaatttaaagatcttcatctttcactaaacatggcaagaggaaaaccagcaccagatcagatcgatcatgcaaatggcatgcttgagacaatgacagattatcatgcaaaagatggtctggatgtgcgtaattacggagttcttgatggaattccagagatgaaagaaatattcagcgatttattagatattccagcaaagaatatcatcgttggaggaaatgcgagtctgaatctgatgtttgatcagatgatgagactggttgtatttggaacagcaggtgagaagccttggggacagttagagaaagtaaaattcttatgtccagcccctggatatgacagacatttttcagttacagaaactttaggatttgaactgatcacagttgatatgacatctgaaggtccagatatggatcaggtagagaaactggttgcggaagatgaaagtatcaaaggaatctggtgtgtgccaaaatattccaatccacagggaatctgctatagtgatgaaacggttgatcgtttagcttctatgaagacagcagccaaagatttcagaatcttctgggataatgcatatggagtacatccaatctttgaagatgtaaaagttaagaatatcttagatgcatgtaaagaagcaggaaatgataacagagcatattatttcttctcaacatccaagatcacattcccaggtgcaggagtatctatcattgcatcaagcgatgataatattgcagagatcaagaaagtgatgacagcccagacgatcggatatgacaagatcaatcagcttcgccatgtgcagttctttaagaatgcagatggagtcagaaaacatatgcagatcttagcagattgtttaaaacctaaattcgagacagttcttaatacgttagagaaagagttaaaaggaagcggactgatcacatgggagaatccaaaaggtggatattttgtatctgtagacgtccttccaggatgtgcaaagagagttgtagaacttgccaaagaagcaggtgttgcattaacaggagcaggagctacatatccatataagaatgatccaaaagacagcaatttacgaatcgcaccttcttaccctacagtagaagagttacagcaggcaatggatctgttttgtgtatgtgtgaagaaagcaggaattgaaaaactgttagagcaggcataagagttaataaaaaatactatgaggaatattctttatcaatggtgataaggcatgttcctcatttgtttttgtaatactagtatttggtttttaaaatataaattcaaagattgtatctatacaattaacacgttgatgtggtaaaataaaactgtttattcgtaaaataataaaaaggagttgattatacatgaaatttacaaagatgcacggttgtggcaatgactacgtatatgtaaactgtttagaagaaaagatcaataacccaaataaagtggcaaaatttatcagtgaccggcattttggaattggttctgatggaatgatctgtatctgtccatcagataaagctgattttagaatggccatgtataactctgatggttcagaaggagccatgtgcggaaatggtgtccgctgtattgcaaaatatgtctatgattatggactgacagataaaacaacgatcacgatcgagacaaaaggcggaattaaagaattagatcttacagttgaagacggcaaagtgacatgggtgaaagttgatatggaagcaccgatcacaaaagcttcacagattcctgcaatctatgatgatcttgatgaagtgatcgatcagcctgtgatcgttgatggaaaagaatataatatcacatgtatttctatgggaaatccacatggagttgtatttgtagattctgttgcagatatcgacattgagaagatcggaccaaagtttgaaaatcatccaatgttcccagatcgtgtgaatacagaatttattgaacttgttgatgataaaacgatcaagatgcgagtatgggagagaggcgcaggagaaactcttgcatgcggtacaggagcctgtgcaagtgcttatgcatcttatctgaataagaaaacaggaaagaaagtcttggtacatcttttaggtggagatcttcagatcgaatataatgaagaaaaagatacgatctttatgacaggaccagcaacaacagtgtttgatggcgagatcgatcttacaggaattgacgattaagagtacaaagacagaagaattattggagatagaatatgatattaaaagaattattagaacgttcagaatataacctcgtgcaaggaagtgaagatgtagagatttctacattagtatatgattcaagaaagattgaaaaaggcagtgtatttgtatgtatcagtggagcagcctttgatggtcataaatttgtagcacaggctgctgaacttggagcggcagcagtcgtagtagaaaaagatgtagaagtaccagaaaatctgacagtgatcaagtttgataatacaagacttgctttagccgagatgtcagcagcatactttggatatccagcagaagaactgacaacgatcggtatcacaggaaccaaaggaaagacaacaacaacgtatatgatccgtgcagtcctcgaacatgcaggacagaaaacaggattgatcggaacgattgagacaatcatcggagatgagagaattccatccgtcaatacaacaccagaatcttatatcgtacaggaatctttccgtaagatggcggacgcaggattgaaaaatgttgttatggaagtatcttctcaggcattgatgcttcatagaacaagtggatttgaatttgattatggaatttttacaaatcttgcagaagaccatattggggaaaatgaacataaagatatggacgactatattcattgtaagagtctgttatttaagcagtgtaaacaaggaatcgtcaacggagatgatgattatgtagaaagaatcatcaaagatcatacatgtgcgatcgaaacatatggaatgaaggatacaaacgatgtttatgctgaaaatattacaagaattcaggaacctggataccttggagttgcttacgatctcaaaggaaaacaggaatataacgtacatgtagatatcccaggagactttactgtatataattcactggcagcaatctctctttgccgccatatgggaattgtcaaagaagatgtattatcagcattgaatacaattcaggtcaaaggacgtttggagatcatcaagactccaggagattacacattaatgatcgattatgcacataatgctatgagtcttgaaagtcttttaacaacgatccgtaaatataaccctaagaagatctactgcttatttggatgcggtggaaaccgtgcaaaagcaagacgttatgagatgggagaagtatcttcaaaacttgcagatcttaccgttgtaacatctgataatccaagaaatgaagaaccaatggatatcatcaacgatattttgatcggggttcacaaagcagatggagaatatgttacgatcccagatcgtaaagaggcgatcaaatattgtatggaacatgctggagcaggagatattgttattcttgccggaaaagggcatgaagactatcaggagatcaaaggtgtgaaacatcatatggatgagagagatctgatccaggaaattatcgaaggaagatagaacatctgtcttttgaaatatataaagaaacgaaggagaattacaaacgtggaagcaagaatttcaggaacaacaaaattattcggattgattggttcaccggtttcacattccgcatcaccagcaatgcagaattacggctttcaggcatgtggagtcgatggagcgtatcttgcctttgatattaaagaagaggaagtgccagaattcgtaaaatccatgcgtctgttaaatattcagggatgtaatgttacaatgccaaataaaacagcagcagctcagaatatggatgaattatcaccagcagcagaattgatcggtgccgttaacacaattgtaaatagagacggaaaattatacggacatatcacagatggtgaaggttttgttgcaaacttaaaagatcatggaatcggcgttgaaggaaaagatatcgtaatctttggagcaggtggagcagcaacagcgattcaggtacagtgtgcattagatggagcaaaatctatcacgatctttaacccaagagatccatttttcgagagagcccagaagatggtagagaagatcaaagctaaggtaccagaatgtcaggtagaattatatgatctcgatgcgaaagatacaatgcgtgaaaagattgatgcagcagatattttagttaatggaacattacttggaatgaaaccaaaagaagatacaacagtgatctcagatacaacaatgtttcatgaaggattagttgtagctgatgttgtatataatccagaagagacaagattcttaagagaagcaaaagaacatggatgtatcacagttccaggaaaaggaatgctattatggcagggagttgcatctttcaaattatttacagggaaagatatgccggttgatgaagtgaaagaaagattcttccagggagtataagatacatagatcatatatggaaacaaaaagatcagaaactgtaataagcagatttctggtctttttttcttattgttttcatatactttatcagtctataaaggaggaacttatggatcagtttaatgtatataaggatatgaaagcaaggacaaacggagagatttacattggtgttgttggtccggtgcgaacaggaaagagtacatttatcaaacgttttatgaatctgatggtattgccaaatatcgaagatgaaaacgacagaaatcgtgcaaatgacgaacttccacaatcttcaagtggtaaaacgatcatgacaacagaaccgaaatttgttccaaatgaagcagtatcaataaagacggaagaaggaatcgaattaaatgtccgactgatcgattgtgtgggatatatggtggaaggcgctacaggacacatggaaggagaagaagagaggcttgtaaaaacaccttggtttgattatgaaataccatttacgaaagcagcggcaattggaacaaagaaagtgatcacggaacattcaacgatcggtgtagttgtaacttgtgatggttcttttggggaaattgcagcaaaacaatatgagccagcggaagaagaaacgatcaaacaactgaaagcattgaaaaagccatttgttgttttattaaatacgattcatccatattcagaaagcacaaagcagctagcggctgaaaaggaagaaaaatatcagacaaaagtgctaccaatgaatttagaacagatgaaaaaagaggatatttatgaaattataaagagtgtgttgatggaatttccgatttcatcaattggattttatgttccaagatggacagagatgttaaagaaagatcatccattaaaaatggaattacttcaaatggccagagatgtgatcacagaaaaaacaacaatgagagacatttatgaagaacaagaaaaagaatatgagtacataacggggcagaaactagaatctgttgcgatggacagtgggaaagtggtcatcacagtaaaagttggggatgtatattattatgaatttttaagtgaaacaacagggatggagattcgcaatgaatatgaatttatcaagatcatgggagaattagcaaagaaaaagaaagagtacgaagaagttggagaagcattggcggcagtaaaacaaagaggatatggtgttgtgacaccgacgaaagaagaaattgtattagaagaaccgcagattgtaaaacatggaagtaaatacggagtaaaaattaaggcaagtgcaccttctattcacatgatccgtgcaaatatttcaacggagatcgctccgatcgttggggaagaatatcaggcgaaagatctgatggactatattgagcagggatcgaatcagccaggggaaagtatgtgggatgtcaatatttttggaaagacgttagaacagctggttggagacggtatgcagacgaaggcattaaaaatgacagatgagagtcagcaaaagcttcaggatacaatggaaaagatcataaatgaaagtaatggcggtcttgtctgtatcattatctaagaacaattgacaaacgaatggaaaaagaatatactttgatagacaaagtgttttttgatctgacagttatgagtacagatcaagaagagaaaaaaagaagcgattaagataagtggagtagttatgtctgtaaaaatattaggaacaggaagttttcttccagaaaaatcagtgagcaacgatgacctttccaaagtgatggatacaagtgatgaatggatttcatccaggacagggattcgtagcaggcacatttcgattgaagatacaacatcaacgatggcagtgaaagctgcagagaaagcattagaagatgcaggaatcagtgcggaagaattagaccatattttcgttgcaacattatcaggagattatgcaacaccaagtacggcttgtcaggtacagaaaggaatcggagctgtcaatgcagtctgtatggatattaatgcagcatgttcaggattcgtttttggattaaatacagcagttgcatatgcgagagcaggaatgggtaagaagatgatgatcattgggggtgagacactttctaagattcttgactggagtgatcgcagtacttgtgtattatttggagatggtgcaggatgcgcgatcgtggaagcggatgaagaaagagaaatctttatcgatacaggatctgatggagcacgaggagatgttttaacatgtgaagaaagacatttaaacaatctcttagtaaaggatgattctccaatgcaacaggttgccatggatgggcaggaagtattcaaatttgcagcacgtatggtgccaaagagtattaacaaagtccttgatgaagcaggcgtttccaaagaagaaatcaaatattttgtattacatcaggctaacaaaaggatcattgaagcagcagcgagaagattgaagcagccaattgaaaagttcccgatgaatatagaccgttgtgcgaatacttcatcagcaacgattccgatccttttagatgagatcaatcaaaaaggaatgctaaaccgaggagataagattgttttaagtggttttggcggaggacttacttggggttctgtttatcttacatggtaagaagcaaacaaatacgatacaaatgaagataaaaatagtcagctttcatataagatgataggagttgactatttttttattgcataggaaatttcaataaaataaaaaatatgaagtaagaagaaagaatcctgtaatacaagattctttttgaagttaaaatatgatataatgagtggataagtacaggagggaattcatggaattacagttatggagagaaatgctcaccccatatgagctggcagttgatgaacttgtgttaaagtttcgacatattataagggaatacagaaatgtcggaagatattcaccgatcgagcaagtcgatggacgtgtaaaatctatctcaagcattttggataagatgcagagaaagaagatcaatgtcaatgatgtagaaaaagaactggaagatattgcggggatacgtttgatctgtcagtttgtggaagatattgatcgtgtattagagatcatagagagtcgttctgatatggagatcaagagccacaaagactatatttcacattccaaagacagtggatatcgaagctatcatgtgatcatctattatgaagtgaatacgatttatgggaagaagcggatacaggcagagatacagatccgtacacttgcgatgaatttctgggcaaccgtggaacattctttacagtataagtataaaggggatattccacagcatgtgacagataaattattagttgcatcagatgcgatcgatgtcttagatcatgagatgtcaacagtgcgcgatgagatcatggatgcacaggactcattccgtaagaagtcaaatcttgtatctgagattcttcatacgatgcagaatttatataaagttgcgaatcgtcatgaagtattaaagattcaggatgaattttataaaatatatgagacaggagatatggaacgcttagagcattttaataaacagttggatattattgcagaaggatatcgtgctcagagcatttcttaagaagaatatgaaattaccagaattatttgaagagaagatgagacgtctattgggcgaggatttttcggaatatgagaagcatttagatgatcctgcatattatgggatcagagtcaatacactaaagatctcagtagaagactttttgaagatctgtccgtttcatgtgacgaaagtgccttggacagataatggattttatgtggacagggaagaaaaaccatcaaaacatccatattatcatgcgggattatattatatacaggaaccaagtgcgatgacaccagcttcctacctgcccgtagaaccgggagaccgtgtgcttgatctgtgcggggcaccaggtggaaagtctacagaacttggagcaaagttaaggggagaaggattactggtatcgaatgatgtcagtatctcaagaacgaaagctctgatccgtaatattgagatgtttggcatccgtaatgatatgatcctttgtacggaagccaaatatttagtaccatcaatgacaggattttttaataagatcctaattgatgctccatgttctggagaaggaatgtttcgaaaggggaataatgagatcaagaactggcagcagaaaggaagcgaaccttatgcaaaattacagcgagagatcgttgatgatgcgatcaagctattagcgccaggtggtatgctgctttattctacctgcacattttcacccgaagaaaatgaacaggtgatcgaatatctcttagagaagaatgaagatctttctcttgtgccaatgaggatgtgtgaaggatttgaccacggacacccagaatggactttgacaggaagagaagacatcaaacaatgcattcgattatggccgcataagatcaaaggagaaggacattttcttgccttattgaagaaagcagacggagaacagccaacattcaaatacgaaaagattaagaaagtaaaactgacaccacagacagaagaattcttcaaaaactgtaagatggatattgactggagtcatgttagagaacatcaaggaaaattgttttacctaaaagaagatattccagagatgaagaaggtaagagttctaaggaaaggtctttatctaggagagatgaaaaaaggaagattcgaaccgagtcagtcatttgcagtagcgttggcggccaatgagtatgaaccatatctttcgtttgacatcaacgatgagaatacggtcaaatatttaaaatgtgagacattagacgtagatacaaataccgaaggaattcatctggttggaacaaatgaatttccattaggatgggcgaagattaaaaaaggacgactgaagaataagtattcttccagctggagatggttataatggcaaagaaaaccagattagacaaatttttgtgtgacagtttaaatatgacaagaaaagaagcaaaagagtctgtcaaaaagggtaaagttgtggttaatggagaagcgatcaagaaaccagaatataaggtggatgcagaacaagatcaggtagaatttgaccacaaactgattcagtttgaacagttccattatctgatgttacataaaccacaaggggttgtatctgcaacgaaggatcatcatgatcagactgtactcgatctgattcatgaagattataaagacagattgttccccgtaggaagattggataaagatacagaaggattattattattaacggatgatggaatgctggcacatgaacttctttcgccaagaaaacatgtggataaagtatattttgcaaaagtttcagggcagtttggcgaaaatgagatcgccagattcaaagaaggtctggatattggcaatggcgaaagatcaaaacaagcaagacttcagatccttaaagcagatgtacaagaatcagaggttttgatcacgatcatggaagggaaatttcatcaggtaaaacgtatggtaaaagctgttgggagtgaagtgttatatttaaaaaggctgtcaatgggatcattaaaattggatgaagagttaaagcttggagaataccgaagattaacgaaggcagagttacaagaactaaaggagcataggagataaatgttagagaataaaaaagcagtgatctttgatcttgatgggacattagttgattccatgtggatctggagagagattgatattcgctttttgggaaaatatggattggaagttccgcaagggttaaatgataaattagagggatatagttttcatgaaacagcagtttattttaaggaacattttccgttgccacttacgatcgaagagatcatgggaacatggaatcgtatggcttccgaaatctatatcaatgaaattcatttaaaagagggcgtgaaagaatttattgagttgttaaaaaaacggaatatgaaacttggaatcgcaacaagcaattcaagaaagctggcgaaagattgtttaagatccaatgggattttggatgcatttgattatatctgcacgtccgatgaagttccaagaagtaagccggaaccggatgtttatttgcatgcagcaaagatgatcgataccagaccaaaggatgcattggtctttgaagatattccatatgggattttggcagggaaacgtgcaggaatggaggtgtgtgcagtgaaagatccatattctcaaggatcagtgaaagaaaagaaagaaattgcagattattatattaatacatattatgacatactagatggaacctatgaggtattaaagaaataacagatgccaggagaaaggatgatcatatgagaaatatcgcattggtaaccggagcatcttccggaatgggaaaggaatttgtccgtgagatctcgaagaaatacaaggggcttgatgagatctgggtcgttgccagacgaagagagcggctaagagaactaaaaaaagaaatcattggaacaagagtgaggattcttccattagatcttatggaggaagaaagctttgaacgtcttaaaatggttcttgcaaaagaacagccagtggtaagaattttagtgaatgcttctggatatgggatttcggggtcttttgaacatcagacagaggaagatgcggcaggaatgatccatttaaactgtgaagcattaacaagaattacatatcttgtattgccatatttaagaagaggatcttttatttatcagatggcatcttctgcgggatttgctccgcagccgaatttcacagtttatgcagcaaccaaagcatatgtgaaaagtttctctattgcattgcggcaggagctgtcctatcaagggatcagggtgatcgcagtatgtccagggccagtaaaaacggagttttttgaccgtgcatatgaacaggaagagatgaaattttataagaaattcgtaatggcagatccaaagaaagttgtaagaaaagcaatccgtgatgcgagaaaaaataaagcagtatctgtttatggaatgacgatgaaagtaactagggttatctgcaagcttcttcctggaagatggatcgcaaaaatcatgggtaaataaggatataaaatgagagaattaaacataacgacaagagaagaaggacagagattagataagattctttcgaaatatttaaataaagctccaaagagttttgtatacaagatgcttcgaaagaaaaatatcaagttaaacggcaaaaaagcaacgggaaatgagaaattatctcaaggagatcaggtgtgtatttatcttgcagaagatacgatcaacaagttccgtgaagaagttaaagcaggaaagcaaaagatcaaacttgatgttttatatgaagatgagaatgtcattatggtcaataaaccatggggaattttgtcacagaaatcaaaaccagaggatatttccatcaatgaccagatcatcccatatgcagtgaaccaagggctgatcagtgaaaaggaattgcaggtagtaaaaccatcgatttgtaaccgattggaccgcaatacaacaggaatcatcatttgtgggatttctatagaaggattacagacgatggcagaaatgctaaaacatcgtgatatggaaaaatactatctttgcatcgtaaaaggaaaacttgaaagaacacaaaaagtcagtgcttatttaaagaaagatgaaaaaacaaacaaggtaaaggtatcaaaacaggagatcgcaggagcaagccatattgagacagcttatgagccagtgatatcaaatgatgaatttacactattgaaagtcgaactgatcacaggaaagacccatcagatccgagcgcatcttgcaagtattggacatccgttgatcggagattttaaatatggcgataaaaagatcaatcaggagatgaaacagagatttggattaaaagatcagctgcttcattgtacagaggttgtttttccgcgagatatgaaaacatgcagaaacctatctggaaagaaaattcaagcaccacttccgaagcgatttgatatgatcaaaaatgacttgtttgggagagcatagtcatggcagaagataaatggaatgtaaagggacttcgaggatcggtccttgaagagttgatcaactatacgaatgaaaaatacaggcaacagaaacttgctcttgtgcagaaaataccgacatcgatcaagccagtcagatttgataagacaaaacgtcatattacgcttgcttattttgatcagaagagtactgttgattatattggggttgtgcagggaattcctatttgttttgatgcaaaagaatgtgcaaaagacatatttccacttcagaatattcatgaacatcaggtagagtttatgagacaatatgaagaacagggtggaatcagttttttgttgatctattttacatcaaggcatgtttgctattatatgtcatttcaggagatgatgaagtactggaatcgtgcaaaagaaggtggagtgaaacatttcaaatatgaagaattagatattggtttttttgttccactaaagcagggaatgatccttcattatctggaatgtctgcaaaaagtattagagcaaaaagatcaataagattcgtgtcgaaaacattgacgagaagcaaaattttgcgtataatataacattgacgaaaaagaaaagctgtggattttaaaccgcagtgcagaaaaggatagattttatgatcagaagcatgacaggatttggacatggggaagtgtccaatgacaagaatcagaaggtcacagtggagatgaaatccgtcaaccacagatattgtgacatctcattaaaacttcccaagaaattaaccatgtttgaggcaaatatccgtaatatcatgaaagaatacgcaagccgtggaaagattgatatttatgtgtcttatgaagatttgtcagagacagcggtaagtctccattataatcaggcaatggcagaagaatatatgcaggtatttaaaaagatgcaggaagattttaacattgaaaccaagatcactgcagaagccctcgccaaatatccagaggttgtaacaattgaggaagtacagcaagatgaagaagtatggtgggagttgctagaagcagcattaagacaggctgcggagaagtttgtagagacaagaacgattgaaggagcaaaccttaagagagatcttttaggcaaacttgatcagatggcagcagatgtggcgtttattgaggaacgttctccacagatcattgcggaatacagaagcaaattagaagaaaaagtgaaagaatttttagaagactcaacgatcgaagaaaacaggatcgcagcagaggttacattgtatgcagataagatcgctgttgatgaggaaatcgtaagattgcaaagtcatatcagctctatgacagatgtgttggaaagcgatgaaagcatcggaagaaaacttgatttcatggcacaggagatgaacagagaagcgaatacgatcttatccaaatcaagtgatgtcgatcttgcggatcatgcaatcgaactgaagacgaatgttgagaaagtaagagagcagattcagaacatagagtaagataagaagggaaagatcatggaaaagagaggttcattactggtaatctccggattttctggagttggaaaaggaacggtggcaaagaaactggtagaaaaatatggatatagtttatcaatttctgcaacaacaagacaaccaagagaaggtgaagttgatggcagagagtattttttcaagaccgtggatgattttaaaaatctgatcgattataatggatttattgaatatgccagatatgtggacaattattatggaacgccaagaaagtttgtggaagatgaacttgccgcaggacataatgtaatcttagagattgaggtgcagggtgcatttaatattaagaagcaatatgaggatgcattgttgatctttattacagcaccaagtgcagctgcgatcaaagaacgcttagtaggcagaggcacagaatctgaggaagtgatcaataaacgtttaaatcgcgccaaagaagagtcagaagacatggataaatatgattatatcgtgatcaatgatcaggtagaagactgcgcgaatcgaattcatgccattgtgcaggcaaaagaatgcctgcttggaaataatcttaagtttatagaagcaacaaaaaaagaattagaacagctataggaggaattattatgttacatccatcatatacagaattaatgaaggtcatcaatggtgacagtgaagaagagaaagttatctcaagccgttattctatcgtgcttgcaagtgcaaagagagcaagacagatcatcgcaggagatatgccattagtagaagaaaaagatggtgcaaaaccattatctacagctgttgaagaactttgggaagaaaaagttaagattctcggagatgacgaagaagcagaagaatagaaacagtaaggaaaacagggtgcttagggattcctaaacacccttatttgtacagacagggagttttttatggacattattttgttacttaaaactgtattacttggaattgttgaggggattacggaatggttaccgatcagtagtacaggacatttgatcttagcagatgaatttatcaagctgaacatgacagctgactttaaggagatgtttgatgttgtgatccagttaggtgcgatcatggcagtcgttgtcttatatttccataagttgaatccattttcaccgaagaagaatcacgaggagaagatggatacgatcattttatggacaaaggtaattcttgcagtatttccagcagcaattattggtattttgtttgataactggttgaacgatcatttttataatccaccagttgtagcagcaatgctgatcatctatggtgttttatttatcattattgaaaaccgcaacaaacgaagcagaagaagaccaatgaatgatctttccagattatcttatggaatggcacttggaattggtgtatttcagatattggcattaattccaggtacatctagatcgggtgcgacgattcttgggggaatcttgctcggatgttctagaacagtagctgctgaattttcatttttcttagggattcctgtgatgtttggagcaagcttattaaagatcgtgaagttcggtcttgcatttacatcaacacagttgatcgtactgatcgtaggaatggttgtatcatttcttgtatcaatcggagcgatcaaattcttgcttggatatattaagaagaatgactttaaggcatttggtgtataccgaatcatactcggtctgttagtgatcgtgtattttgcattcatcaaataaggagtttgtaaaacatggataagaatttatttctaaagaatatggaagagatgatccagatcgcaaagacgaatggtaatcagatcgaccacaaagaattattagattattttagcgattatgaattaaatgaagaagcgaaaaaacttctgatcgcaagttttgtagaagctgggattcgcgttctgggtgttgatgaagcacagatcgttgcagaagaagaggcgaaagaaaaagctgacatttcggaagaagaacagggtgcgatccgattctatgaagaagaattagaacagatggatcttccgggagaagaagagcaaaaagaactgatccatgcatggcttgtagagaaaggagatggagaagcagttattgaaagctttcttccacagattcttgaaattgcaagaacacatacggggaaaggtgttttattcggagatcttgtacaggaaggtaatattggtcttttggaagcaatggcaatttatcagggaaaagacgcagaaggattccttgcacatgcgaagagtgcagtagaagattctattttagatgcgatcgcaatgcaaagaggttctgacagtgttggagaagcgatggcgattaaggcaaatcgtctggatgatgcttctactttcttatcaaaagagcttggaagagaaccaaagattgaagaactggcaaaatatctgtccatgacagaagaggaagtcaaagaggttatgaaaatatccctagatgctctttcagtgatggaagctgatattaaacagtcatagaagaaacaaatatcatatggaacgctttgtggaagcagatgggagggctgatcttatgaatatccgagaaaaacaagaacagacagagatggaattattaagtccgtatgcgacacaaagcatccgtacaaaaggaagaaaaaagcctgaggtggaatgtgagataagaacctgtttccaaagggatcgggatcggatcgtccattgcaaggcttttcgccgtttaaaagataagacacaggtatttttatctccagtgggcgatcattatcgaacaaggttaatgcacactttggaagtatcgcagaatgccagaacgatcgcaagagcattagatctcaatgagacattgacagaagcgatcgcgcttggacatgaccttgggcatacaccgtttggacatgcgggagaacgagtgttaaatgaaatgaatccagcaggatttaagcataatgaacaaagtgtcagggtcgctcagtgtctggagaagaatggacagggattaaatcttacatgggaagtcttagatggaatgaaaaatcattcaatgcacagcatgccgcatacattagaaggaaaaattgtgcggctggcagacaaaattgcatatatcaaccatgatattgacgattccgtacgggctaaggttctacgggaagaagatcttccaaaagaatttacggaagtccttggaacaacatatcgggaacggatcaatacgatggtgcttgatattgtaaaacatagtgagaatctgaatgatattgtgatgtcaaaggaagtaagagatgcaatgatcggtcttcgaaagtttatgtttgagagagtttatgaagaaccaaatacgaagaaagaagaagacaagatcaagaatatcattggtccgttatatgagtattatctgatacatgttgagcaattgccagaatataataagaagatgatcgataaaccaggagatgtacctgtggcagtttgtgactatattgctggaatgacagaccattttgcaattgagaaatatactgagatttttatccccaaattttttatgcaaaaataaaggaaaataaaaaaaggtgtagaataataatatatagagggattttttaaggagggacaagcgttgatttatggtgaagaaatcatagaagaggtgcgaagccggaacgatattgttgatctgatttcgacgtatgtaccgttgaagaaaaaaggcagttcttatttcggtttgtgcccgtttcataatgaaaaatcaccctctttttctgtgagccgagataaacagatgtattactgctttggctgcggagccggaggtaatgtttttacatttttaatggaatatgagaatttttctttcccggaggcattaaaatatctggcagagagagctggaatggaacttccggaagaggaattgaatgaagaagccaaacgagcgatggatgaaaaagccaggcttcgggagatgaataaactttcagccaattatttctattatctgcttcacagcaagcggggacagaaagggcttgcatatttaaaagaccgtgggatcacagatgctacgatcaaacattttggtcttggatatgctgatatttataatgatgacctgtatcgatttttaaagagtaagggatacagtgatgaagatctgaaagattcagctttggtgacgatcgatgaaagacgtggtggaagtgataagttctggaacagagtgatgtttccaatcatggatgtgaacaaccgcgtgatcggctttggaggcagagtcatgggagatggttcgcccaaatatttaaattcaaaagaaaccaaattatttgataaaagccgtaatctttacggactgaattttgcaagaagttcaagaaagaaagagattatcttgtgtgaaggatatatggatgttatttccatgcatcaagcaggatttacaaatgcagtcgcagcacttggaactgcatttacaagtggtcatgggacgctgcttaagagatatacagagaatgtcattttgtcatttgacagtgatgaggcggggcagcgagcgatattgcgagcgataccgatcttgaaagaagcaggacttacggttcgtgtccttgatctgactccgtataaggatcctgatgaatttatcaaaggattaggagcacaagcactggaagaacgaatcagaaaagcaatgagcagttttatgtttcaggtaaaagtagccgcaggaagatatgatcaggacgatccagagtcgaagacacagtttcaacatgaagcggctaaactgctggcaacgattgaagaaccgctagaacgcaagaattatattgaagctgtttcaagagaatattatatcggggcaaaagatctggaagatcttgtgaattattatgggacttctggatacagcagtgctcagagacagcagacaacaccgcgtcagcaggagagacgtctgcaagtgaatgaggcaaaagaagagaagaagaaacagccgcagaaactgttattgacatggatggtcaatgagccacagttatttgacaaactagaaggaatcatcggccccgatgatttttatgaacagatttaccatggagtggcattgttactcttcaaacaatacgaagaagagaaagcagtgattccagggaaaatattaaatcaatatacagatcttgaagaccagaagaagattgcagaattattcaacacaacattaaagatcagtccattagcggaagatcgagacaaggcgttgaatgatatcgtgcgaagggtcaaggaagacagtattgaacaacagatgaacgcaacaaatgatattttgagatggcaggatctgatcaaggagaaagcaaaccttgcgaaactgcatatttcattataggttggttaaaataggaagagaagaaagggacgaattatggaaggtacaatggaacagttcaccgagaaacttgcgggtctggtggaattaggaaaaaagaataaaaactttttggagtatgcacagattgattcatattttaaggatatgaaactaaattctgatatgatggaagcaatctatgattatctggaacaaaatggaatcgatgtgctgactcttgccgcagttgcagacgatgatgaagatcttgatgatccaatcgaagatgaaacagaaattgctgttcctgatggtgtcagcatcgaagatccagtccgtatgtatttaaaagagattggtaaagtacctcttcttagtgcagatgaagagatcaaacttgcacagagaatggaagaaggggatgaagcagcgaagaagaaactggcagaagccaaccttcgtctggtagtcagcatcgcaaaacgttatgttggacgtggaatgctcttccttgacctgatccaggaaggaaatttaggtcttattaaagccgtagagaaattcgactatcgcaaaggatataaattcagtacttatgcgacatggtggatccgtcaggcaatcacaagagcgattgctgatcaggcaagaaccatccgtattccagtgcatatggtagaaacgatcaacaaactgatccgtgtatccagacagcttcttcaggaacttggaagagaaccttctccagaagaaatcgcagaggagatggatattccagtggaaagagttcgtgagatcttaaagatctctcaggaaccagtatcattagagacaccaatcggtgaagaagaagacagccatcttggagacttcattcaggatgagaatgtaccagtaccagcggatgcagcagcatttacgctgttaaaagaacagttagatgaagtacttggaacactgacagagagagaacagaaagtcttaagattacgttttggattggatgacagcagagcaagaactctggaagaagttggaaaagaatttaacgttacaagagaacgtatccgtcagatcgaagcaaaagcactgcgtaagttaagacatccaagccgcagcagaaagttaaaagattatttagattaaggtatgattatggaattatcaaacagattagaaacaatcgcatcttttgtcacagaaggttatgtagtggcagatatcgggacagatcacggatacataccaatctatttaacaagtaatggaaactgcccgagagcttatgcgatggatgtaaataaagaaccattaagccgtgccaaaacacatattgaagaagagaatgcaggagaggttgtatcctgcattctttccgatggattacatgaactgccgcaagatgatgtagattctattgtaattgcaggaatgggtggagatctggttgtcagaatcttagagcaggactttgataaattagcgaatgtaaaagaactgatcttatccccacagtctcatttagaacgagtgagacatttcttaaatgatcatggattccggattttagaagaagaatttttaaaagaagatggaaaatactacgttgtgatccgtgcagttcatggaaagcaacagtatgacaaagagtgtttttatcgttttggagaagaactgatcctcgcaaaacatccagtacttcttgagtacttagatcaggaatatgtcaaatattcaaaaatcaaagaaagtcttacagacgattcaaaagaacatatcagaagacgaaaagaagaagtggaagatttacttggagatatcatggaggcactttgttattatgaattgtagagaactgatcacatttttagaaacagaagttccgttagagacagcagaaggctgggataatccgggatttcttgttggagataaagataaagagataaagaaagttttagttgtattagatatcacaaatgaagttgtagattatgcgattgatcaaaaggcagattttatccttgcacatcatccgatcattttttcaaagatcaacaaatgcacgagtgatgatttccttcagaagaaattattaaaactgatccgccacgatatatgtgcatatggaatgcatacatgttacgatgtctgcagaatgggagatcaagtagcagatcgcttgaatttgaaggaaatacagggaccagttgagctatctaaaagccacaatgagaaagcgtttggaaaaggaatagggattgttgccaagattgaagatgagatcagtgttggagaatacgcaaagaaagtaaaagaagcattttctttggaaaatgtcatggtatttggcaatctagatacaaagatctctaaacttgcagttgttccaggatcagggagaagtatgatcagtgaagcgaaaagtacaggagcagatgtatttttaactggagatatcgggcatcatgaaggccttgatgcagtcgatatgggaatgtgtgtgatcgatgcaggacattatggattagaacaggtatttattgatgatatgaaagatctgatcaggactcatttcagtgatatgaatgtgatcacatataaggcaggaagcccttataaagttgtttaaatagtagttatataaaaaggaagtgatggcgtatgatcaaagccacagtgaatcaaagcatttatgaagtaaaagaaggaacaacactttctgatcttgcgaagcaggtacagctgcctcaggagccgatcattttgcttgcctatatggatggaaagttaagagaattatttactcctatgacaaaagactgccatgtgcgttttgtaacattaaaagaacaggcagggtatatggcatataaacgaactgccacgcttatgtttctgaaagcatgcgaagatctgcttggaactggtgcaacgacaaagatcgcattagattattcaatcggaaatagtattttttgtgatttcctagaagatcgtgtgatagatgatgcttttgctcaatccattcaaaaacgtatggaagagctagccaaagcgaatcttccgatcacaaaaagatcgttagacacagatcaggccgcaaaatattttgacagaataggccttaagggaaagaaagaattatttcagttccgcagggaatcaaagacgaatatttactcgttagacggatatgataattatttttatggatatatggcaccatcgacaggatatattccagcatttttggtgtctgcttatcagcatggggtagtacttcagattcccaaaaggaaacagacagaggaaatcgtaccatttacaccacagccaaaacttttccatgtgatgcagcgttccagagaatggacgaaaacgatgggtgttgacacggtaggtgccttaaatgatgagatcacacatggaaatatcaatcatctgatcttgttacaagaaggattgcaggaaaaactgctagcggatatcgcggatgagattgtaagcaagaataagagaatcatcctgatcgcaggaccgtcatcttcagggaaaacaacattttcccacagattgtctattcagcttgaaatcgctggattaacaccacacccagtttctatggatgattatttcttagacagggaattgtctccaagagatgaaaatggaaattataattttgagacgatcgcatcgttggatgtggatcttttgacaaaacatatcaatcaattgctagatggagaagagattgatgtgccaagttataactttatttcaggaaaaagggaatatcgcggacacaaattaaagattggagaaaaagatgttctggtcatggaaggaattcatggattaaatggtactcttacgaatgaaataccagaagatgcaaaatatagaatctatgtcagtgcattgaatcagatcaacttggatgaacataatagaatcccaagttctgacggaagattactgcgaaggatcgtgcgagatgccatgacaagaggaaatgatgcgagagagacgatctccagatgggactctgttagaaagggagaagaagacaatattttcccatatcaggaagaagcagatgtaatgtttaattcagcacagatctacgagatcgcagtcttaaaacaatatgcggagcctttgttatttgcggttccaaaagattgtccagagtatcaggaagcaaaaagattattaaaatttttagaatattttttaaatattccaagcgaagcaattccaaaaacatctcttttaagagaatttatcggtggtagttgctttgaagtgtaagatatgatataataattggcgcttagtcggacaaatggtcgcgccgtttcagacgaaagggaaacggtgaggaaagtccgggcttcacagggcaggatgccggataacgtccggtaggggcaaccctcaagctagtgcaacagaaatataccgccacattcgtggtaagggtgaaatggtaaggtaagagcttaccgcctggctggtaacaggcagggcatatgtaaacctcatccgaagcaagaccgagatgaaaacgatagatcggcccgatctgttttcaggtgggtcgctggagcttgctggtaacagtaagtcgagatagatgaccattcaacgacataacccggcttatcgtctggctaagcattatgaataagaatgatagagaagttgtaagagaaatcataagtagatcttacaacttctttttttgatatgtaaaaagaagttataacaaatgtatttctttcagaaaccagaaaaatcttgaaagaaattgcagatatatatataaaaatgacgataaaatggacaaatcaaactattcgtgaaagaactttcaaaatatcaaaaaaacttgaaattaattttaaaacagatatactaaagataacgaaagcaggaaagggaggaattaaaaatgaatccgaaagttgagaatttaaaaggaaaactgatcgtatcctgccaggcattgccagatgaaccattacattcttctttcatcatgggaagaatggcacttgctgcaaaacagggtggagcatcgggaatccgcgcaaatacaccagaggatatcaaagagatcaaaacacaggtagatcttccggtgatcggaatcatcaagagaaattacgatgactgtgagatttatattacaccaacgatcaaagagattgacgaattaatggaagcgaaaccagagatcatagcattagatgcaacaatttcaagccgaccaaagggacagaaattagatgagttcttccatgagatcaaagaaaaatatccagatcaactactaatggcagattgttctacaatcgaagaagcactccatgcagatgaattagggtttgattttatcggaacgacaatggttggttatacaaaacaaagcaaggatcttaaaatcgatgaaaatgattttgaaatcttaagaacaatcctttcaaaagtaaaacatccagtgatcgcagagggaaatatcaatacaccagcaaagttaaagagagttttagaactaggagcgttttgtgcagttgtaggttcagcgatcacaagaccacagctcatcacaaaatcatttgcaaatgctatcaaataaaagcatttttaaaaggatcatgtatggattattatgtaaaatcggtcataccgatcattgaatcaaattatgaaaattttacagctctggaaaaaaatattgcggatttctttatgaaaaatgaagaaaaaatggacttttcagcaaaagagatcgcaaaacacttgtttgtttcagaagcttcgttatcaagatttgcaaaaaaatgtggatttcgaggctatcgagaatttatttatcaatatgaggaatcatttgaagagaaaaataaagaactcacgggacatacaagaaccgtgttaaatatgtaccaggagttgttaaataagacatacagcctgatggacgaagcacagatcataaggatctgtgagaaattaggacaggcaaagagagtgttcgtatgtgggaaaggaagttccggccttgcagcgagagagatgcgtctaagatttatgagaattggagtagatatcaattcgattcaagatccagatctgatgagaatgcaggcagtattccaaaaggaaggttgtcttgtaatcgggatcagtatcagtggagagagtgaagatgtttgttatctattagaagaatcaaaaaaacgaggagcggacaccatcttgatcacaggaaaaaataaggatgactatgaggatatctgtgacgaattagttttgatcgcatcaagaaaatatttagatcatggaaatgttatctctccacagtttccaatccttattatgttagatcttatatattcttactatttagaacacgataaaaagaaaaaagaaaccatgcacgatgacactgtgcgcgcattaaaaggagaaagatcatgagaatcatcaaaacaaaatcatacgaagaaatgagtaaaaaagcagcaaacatcattgcatctgtagtcacattaaagccagactgcatgttaggacttgcaacaggatcatcaccaatcggaacatatgatgaattagtaaagaaatacgaagcaggagatcttgatttctcagaagttacaacagtaaacttagacgagtacaaaggattaccaaaagaaaatgaacagagctattactatttcatgcatgaatacttattcgataaagtaaatatcaatccagaaaaaacatatcttccagatggaacaaacttaaacagtgaagaggaagcagcacgttatgaagcattggtacagtctttaggaacggttgatcttcagttattaggattaggaagaaacggacatattggattcaacgagccaggggatcattttgaagatggaacacactgcgtagacttaaaagaaagcacgatcgaagcaaacaaacgattcttcgaatcagcagatgatgtaccaaaacaggcatacagcatgggaatcggaacgatcatgcgttctaagaagatcttattagttgtcagcggagaagaaaaagcacaggcattaaaagacagtatttatggaccagtaacaccagaagtaccaggatctatcttaagattccatccagatgtaacaattattgcagatgaagcagctatgtcattgatcaaatagttgaatatgtagaataaaaatgaagattcaatctattaaaacagtgtattttagtgcgacaggaaatacaaagaacgtcgtaaagtcaataggagaaacaattgcaaggaatatgaatctttcatataaagagattgactttacacttccacaagctcataaagatagctatgaatttacaaaagaagaactagtgatctttggaactcctgtgtatgcgggaagagttccaaacaaagtacttccgatgatacaaggattatttcaaggaaatgatgcatttgcagtaccagttgttacatttgggaacagaaactatgacaatgcattgattgaattaagaaatgaactagaaaacaatcattttcatacgattgcagcaggagcgttcgtagcacagcatgcttttacagatcaattagcaacgatgcgcccaggtaagtcagatcaggaagaaatcagagggtttgccaagcgtatcgtaacgattgtagaaatgataaaaacattgggagaaattccgaaaccagttcatgtaaaaggaattgagccaatcccgccatattataccccacttggaattgatggcaaaccagcgaaattcttaaaggcaaaaccaaagacaaaaagtaattgtgatcactgtgatctttgtgtgaaagtctgtccaatgggatcgatcaattcagaagatccaagtaaaattgatggaatttgtatcaaatgtcaggcatgtgtaaaaaaatgtccaaaacaagcaaaatattttgatgatccggcatttttatcacatgttgaaatgttaaagagaaactatcaaagagctgctaaaaatgaaatttttgtgagtgatggcagagaaaatgaaatacaataatttttaatcaagtggatgaaaacatcatttttctgatataattaatttatcagcaagatggtgtttttgctattttacaagcgaaggatcagctagaaaggattttttatgctatttacacgggacagaaatttctatagaactttatttcatctaatgatcattgttgttttccaaaatatcattgcatacagcatcaatatggcagataatctgatgcttggtatgtatagtcagtcctctctttctggggcagcaacggtcaatcagattcagtttttactacaacaaatgacacttgcgatcggggatacactagtgatcgttgcttcccaatactggggccagaaaaagacgaaaccgattcgaacatttacagggattgcgttggcaacaggattaatccttggattgactgtatttatactgaccacattgttttcaagagaaattttaatgctttttacaaaaaaggaaagttacattatacaaggaatggattacctttcactgatccgttttacctatcctttatttgtgctatctacgatcttaatggcggcacttcggagtgttgagacagtttctatcgcattaaagatttcaattttatcattgatcgtagacgtatcgatcaactatacactgatttttggaaaatttggttttccagaaatgggaactaaaggtgcggcagttggaacattggttgcacgtattttagaattagtgattgttgtaatctacttaatctttgcggatcataaattgaaattattctgtaaagatttcctccactttacaaaagaagcattttcacgctttttcaagattttgtggccatcctttttatcaaatacgttatgggcacttgcgacaccaattcaaacaggaatcttaggccgcttatccgcagatgcgattgcagccaattctgtttctacgacgatgtttcagtacttgaaagttataaccatcggagaagcctcagcatctgctgtattgatcggaacaacgatcggggaaggcaaaggaactacaaaagtaaaagaatacagtaaaacactgcaagttatttatctgatcataggaagcgttcttggattcagcctgtttttcttaaggattccattgttatctctctatgatctgacacaaaatgcatatcaaatggcagaccagattctgatcattttatccatcgtgatggttggtatgtcataccagatgccaacaggaattggtattatcaaaggcggtggcgacgtaaaatatatgatgtatctgaatctgatctcaacctgggcgatcgtgatgccgctttcatttttaggggcatttgtatggaaattgccagtaccgatggttgtgttattgctgaattcagatcagttgtttaagtgtataccaacgtatctgtatgtgaagaaggataagtggatcaaggttttggtttgatgatcaataccttgccatttgcagattcaaatgataagataattgataaaacaaaatcaattgcaacacactaaggcaatgaaacttctatgaataatctaaaaataactgcatatactctttcttaaaggagagtatgtgacattgaagaagaaaatagaaatcgcagtcatcctatgttccatcggcatctgcagatttggacaaaatgtcttcgcaggagaattcctaagattaccagcccaaaccaatgccaaagtagaacaagtggtgcagacaagacttttggaagaacaaagagcgtaccttatgcaggcacagcttatgacgaaagtcaatttagaacaacagattaaagacaaacccgtctatattccaaaaacaaagcatgtagtcacccaaagagaacgatcggttcttgagaggatcgtggaagcagaagcaaccgataaagatgaaaaaagcaagatacttgtagcaaatgtaattttaaaccgtgtaagaagtaaagaatttccaaattcaattgaatccgttgtgtttcaaagagcctatggaaaagtccagttttcaccgacagcagatggaagatatgaatctgttcgtatcacaaagagtacgaaaagaagcgtaaaaaaagcattagaagatggaatcgactattccgaaggagctttgtatttcgtagaaaaaacaatggcaaatcccaaaaatgtttcatggtttgatgaggcacttaccagattgtttacctatcaaggacattctttttacaaataatgcttgacaaggaaagataaaagtattatgattttaaacaaatagaaaagaaaccgttgagaaagagtagtaagcaggattagaatgattcaaagagagctgcaggtggtgagattgcagtatgatttccctggtgaatggactttcgagggtgattttgaaagtaacaagtaggaatcgccgggcacccgacccgttaccagagtgggcatatatgatagtatatgatttaagtggacacacctagtgtcaatttgagtggtaccgcggataattcgcctcaagcatatttgcttggggcttttctttttttctatttgaagaaacgtacaacttaaataaaaaggagaagaaattatgagaacaatgaaaaaagtattagcagcaggattaacagcagttatggcaatgtcattaatggttggatgtggaagcaagaaagatgacagttcgtctaaaacatataacttaggaatcatccagtttgcagaacatggttctcttgataactgccgcaaaggatttttaaaaggtttagaatctgaaggtatcaaagaaggagaaaacttaaagattacatacaaaaactcacaggcagatacagccacagataaccagatcgcatcaaactttgcatcaaagaaattagatatgatttgtgcgattgcaacaccaagtgcacagagtgcatacaatgcaacaaaagacagtgatatcccagttgtttatacagctgttacatcaccaaaagctgcaggatttgtagataaagaaggaaagaatgttggaaatatcacaggaacttccgatcttgtacttgcagataaacagttaaaactgattcgtcagatgatgccaaaagcaaagaatgtcggaatcttctacagcacaaacgaagcaaactccaaagcaggaatcgaagcttatgaaaaagtagctgataaatatggattcaagatcatcacacagggaatcacagcttccgcagatatgccaatggcagcagacagtttactgaagaaagtagactgcatcacaaacttaacagacaatttagtagtcagcaacatgcagacataccttcagaaagcaaacaaattaaatattccagttttcggatctgaagtagaacaggtaaaattaggatgtgtagcttgtgtcggaattgacttcgtaaaattaggaaaacagacaggtaagatggcagctaaaatcttaaaaggcgaagaaaaagcaaaagatatgaaattcgaaacatttaacaatggagatgtcatcattaatacagcagcagctaagaagattaacatgacaatcagcaaagatgtgcagaaacaggcaaaacagacatttgacaagatcagcgcaccagaaaaataatcaggagatgtaaatattatggaacaattgatcataggcgtatttgagcagggatttatctatgcgatcatggcgcttggcgtatatatcacatacaaaatattagactttccggatctgtccgtagacagtacttttccattaggagcagcagtgacaaccgtcatgctctcctcaggaaagaacccattgcttgcattaattgcagcaacagcagccggagcaattgcaggaatggtcacaggaatcatacatgtaaaattcaaagtcagagacttattatccggaattatcgttatgacaggtctttataccttaaacttaagaattgtaggcggaagcgcaaatgttccattatttaactacaaatccgtatttgataatgacttcatcaacggaatcttcccagaagcattagcaccatataagacggtgatcattattttcatcatcatgatcattgccaaaatattattagacttatatttaaaaacaaaatcaggatacctgttaagagccgttggagataacgagacaatcgtaacatctcttgcaaaagacagtggatttgtgaagatcgtaggacttgcgatctcaaacggattagttgcattagctggaagtgttatgtgtcagcagcagagattctttgaaatctctatgggaactggaacgatcgttatcggacttgccagtgttatcattggaacaaacgtatttaaaggaaatcttatcaaagcaacaactgcagttgtcatcggttctgtgatctacaaagcatgtgtagcaatcgcgatcgaagtaggattaccagcaacagacttaaaattgatcacagcagtcttattcctgatcattctgatcatcagtatggaccgtaagaagaaggtgaaaaaggcatgattgaattaaaacatatcgacaaatattataatatcggaacagtcaatgaagtctgcctgttcaaagacttcaatctgacggtagatgacggagatttcatttccgtgatcggaagtaatggttcaggaaagacatccatgttaaatctgatctgcggaagcttagaagcggaagcaggaaatattattttaaatggagaagatatttctcatcaaaaagagtatatcagacagagaaagatcggacgtgtttatcaaaatccagcaatgggaacctgcccatctatgacaatccttgaaaatatgtctcttgcagacaataaaggaaagaaatttggacttggatttggtacaaataagaagagagttgactattacagagaattattaagccaattaggacttggactggaagacatgatgggaagcaaagtaggttccttatcaggaggacagagacaggcaatggcacttcttatgacaacgatggcaccaattgagatcttaattctggatgaacatactgctgcacttgatccaaagacagcagaactgatcatggagttgacaggaaaagttgtcaaagaaaagaaactgacaacgatcatggttacacataacctgcgttatgccgtagaatatggaaatcgtattcttatgatgcatcagggacatgcggtacttgataaagctggagaagagaaagcaaaattagttgttgatgatcttctggatcagtttaatcagatcagtattgagtgtggaaattaaatttttaaattgtataacggaaatgtatcgagtattcataaaaacataaaaaaagatagaggtacgaaaaacgaattccattgacggattttttgcaaaacgctgatccgccaacactcctgcacaactcactgcgttcaaacagtgcccgtgttggctgcgattttgcaaaaaattctatggaatcctatcatttcgtacctctatctttttttatgtttttatgaatacctgaagacattctcgtataaaattaagaattttcaagcggaagggtgtgtatgttagacgttataatattccaccaataatttccgtcattcaaagcacaatcttgtgaagtctgtagacttttgttataatgatgttagatgatactaactatacgttagagaagactaacttctagaagcgaaaggaactatatatgtatttagaaataaaagatatgaaaaaaagcttcggatcaggcgaaagctataatcaagtactaaaaggaatcacaaccaacatcgaacaagggcagatgtgtgttatccaaggaaacagtggttcaggaaaatctacaatgctaaactgcatcggcggattagatactatggattctggttcagtcaaagtcgatggcaatgaaatatcaggattaaatgcagatgagctctccgaataccgcagagctaatctagggtttatcttccagttttataatctggtaccaaatcttacagtcaaagaaaatatagagatctgtcaatttttaacggaagatccattggatatggaagaactgctagatacgctcggactaacagaacatcaagataaatttcctgcacaattatccggtggacagcagcagcgatgtgcaattgcaagggcgttgatcaagaatccaaagctgcttctttgcgacgaaccgacaggagctcttgattcgaaaacatccaaagatatcttgatcttattagagaagatcaatcagcaatatggcacaaccatgctgatcgtaacgcataataatgcaatccgcaatatggtacataaggttattatcatcaaagatggtcagatcagtgaagattacgaaaatgaaacaagattaccagcaaaatcactggaggatctttagatggaaaaagtattgagaaaaagagcatggagagatttaaaagaaaataaattccgctattttgcacttgcttttttgattattatcagtatgtatttggtcatcagtctggtaggtgcagcggatacgattgttgatggaactacaaagcaggcaaagaaacataagctggaagatggacagtttcaggtatttgtgccactaacgacaaaacaaaaagaaaactttacaaagaaagggcttacagtagaagagacattttatcttgattttagacaaaaagatggaagtaagttaagaatctttaagaatcgtaaaaaagtcaataaaattaatctggatgaaggtcgattagcaaaaaacaaaagtgaagttgttgtagaaaaacgatatgcacaagaacacaacttaaaaacaggatcaaagatcacgattgacggcaacttctataaaataacaggaatcggatcagttccagactacgatgcatgttatgaaaagttatcagacagtactgtagacagcaaacagtttggacttgcatttgtgacagaagatgcttatgaaaatctaaaagacaatgaaaatagtattcagtctgaggaatatatctatgcataccgattaaatggtgcaatgactcagaaacagttgaaaaataaattaaagaagatcacatttaacccggatgatgtcgatgatccatattttaaagattactgggaagaaactgcaggaaagaaagatgacatcaaagacggaatcaaaaaacttacagatgcaagtacccagatgtcagacggattaaacaaactaagtgaaaacaacgaaacattgcaaaaaggtgccaatcagatttttcaggcatacttaaaaacagcagaaagccagttgacctcctttggtgtaacatcattgacagaaaataattatgcgaatattctaaaaagtttgatcgcaaagtcaagtgatgggttgacaagattatccttagaatcagcaaaagaacagctggatgccttaaaaacatatagagatggaatcaaggcttatacaaatggtgttaaaaaagcatcagatggaagtagtaagttaaaagaaggaactgatcaattggaagaaggaacaaaagaactgatgaaagcatttgatatggaaacatcgaatctgactcagtttttaaaggcagatgacaacataagaattggagcagcggcaggtgatcaggtcattagtaaacttgctggaatggtagcaggtgtcatcattatgatcttatttacctatgtaatatctgtttttgtcattcatgaaattgagaaagaaaatagtattattggaacattgtatgcgcttggagtgataaagaagcagcttctaaaatattatttaacagttcctgtgatcgtaacatttctggctggattagcaggaacgatcattggatatagtccgataggaattccaacacagatgcaggattgttatgattatttttctataccagatttgagtccagaacttttaatctatctattggtgtatggaattgttatgccgccacttgttgcagtgatcgtaaactattttgttataagaaagaaactgtcaaggccagcactttctatgataagaaatgagcaaaagaagagtcatatttcaaaagtcaaattaggcgatatgccatttcttacaaaattcaggatcaggcagtcactgcgtgaggcaagagccggatttacggtagtatttggaatgtttattgcactgttggttatgatgatcggtctggactgttatgtgatgtgtgatcatatcagcaaagaaaataagaaagacacaaaatttgaatatatgtatacatataaatatccggataaaaaagtaccaaaaggcggggatgcatgttttgtaaaaggattgcataaagaagtatggggatatgatcttgaaatttccctgatcggtatagaaaatgataatccatatttcagccaggataaagatcttccgaaagcaaagaacaaagttgttatttcatctgcaatggcacagaaatatgatctaaaaaaaggtgactcgatcatactgtctgatgaggaagatgaaatggattacgcatttcaggtagcagatatcacacaatattcttctgggttatatgcatttatggatatcgacagcatgagagatctctttcagacatcatcagattattacaatatggttgtatcaaagaagaaactgtcgattgactctggaaaactatatgcaacgacaagtaaaaaagcaattgaggagagttcagatgtatttatcaatatgatgattccgatgatgggaatgattgttggactttctgttattatctttgcaattgtcatgtatttaatgatcaaggtaatgattgatcgttctgcacaaaatattgtgttgatgaaagtatttgggtatcggaagaaagagattaagaagctttatcttgatgggaatttctatatgatcgcagttggagcactgatcagtgttccattatctaagaaattaatggatgcaatgtatccagttatggtttccaatatagcttgtggtatgaatttaagtttcacatggcagatgtatgcattgatctatgcaggaattatcattacatacctggtaattaacaagttattagtgcgaaagatttacaaagtcggactttctgatgcgttaaagaatcgtgagtaagattaaaagaaacaatcagtctttgccatataaaataaactattgtataatgatacaaaaagaccaaagaaggaagaaacgatgacattacaacagctaagatatgtcgtaacgattgcggagatcggaacgatcagcaaggcagcagaagaactctttgtatcacagccaagtcttaccaaagctctaaaagaactggaaaaagagatgcagatcacgatcttcgaccgcacgaacaagggaattcatgtatctagagaaggagagatcttccttggatatgcaagacaggtattggagcaggcggcattgatcgaagagaaatataaacataaaagtggtgggaaacaggaattttgcatttcaacacagcattattcttttgcagtcaatgcatttgtagacttgatcaaagaatatggaagcgagaattacgatttcagtctgagagaaactcagacttatgagattatcgatgatgtagccagaatgaaaagtgagatcggaattttatatctcaatgaattcaatgcatcggtccttgagaagatcatgaaagcaaatgatctcaaattcacagaactatttgttgcaagaccacatatttttatctgtgacaagaacccactggcacagaaagatcaggtcacaatggaagatctcaaagattatccgtatctgtcatttgagcagggggaacataattctttctattattctgaagagatgttcagtacggaagtgcgttcaaagaacattcgagtgagagacagggcaactctgtttaacttgctgatcggattaaatggatatacgatcagcagcggtgtgatcgataaggaattaaatggagagaatattatcgcagttccgcttgcagaagaaggcgagatgcatattgggtatgtgacacataaaaagacgaaacctagcagattaggggcgatttacttggaagcgttgaagaggcatgcacaataattttatatacgtttaaagaaaggtcataactgtatcatggtagagatacaggttgtgaccttttgtgattttatggtataattttcacataaaaacgaaaatgaatgacagtatgatttctgattctatctggaagatgtcagattatctaagtcgctattatgggaagaaagcaatcatcatggaatttaaagtgatcagccctaagaaagaaaaatctttagaagaaacagcgcaaaatgcattaaaacagatcaaagaaaggtataaaataatggaacaacagcagccagaaaagaaacacaaacgaagagtcagatataaagggactcatccaagaagattcgaagaaaaatacaaagaattaaacccagaaaaatacggagatacgattcaaaaagttattagtaaaggaagtacaccggcaggaatgcacatttccatctgtgtaaaagaaattcttgaattttttgacatccagccgggacaaaaaggattggatgcaaccttaggatatggcggacatacaagaaagatgttagaaaagttacagggcaaaggtcatatctacgcattagatgtagatccgatcgaatctgtaaagacagagaaacgtctgcatgatgcagggtttggagaagatatcttaacgatcaagcatattaattttgctaatattgatcaggtagccgaagaagttggaccattcgatttcattttagccgaccttggcgtatcctccatgcagattgataatccggaaagaggattttcttataaatttgaaggatcattagatttaagactgaatccagaaaaaggaatttcagcggcagagcgtttagaagatatcacgaaggctgaatttgaagggatgctcattgaaaatgcagatgagccgtatgcaaaacagattgcaaaagaaaccgttgcaacgatgaaacgaggaaagaagatcaagacaacaacggatcttaaagatgtcattgaaagagcattaaactttttgccggaaaaagagcgaaaagaagcagttaaaaaatcctgccagagaacatttcaggctttgcgtattgatgtaaacagcgagtttgaagtattagaagaattattggagaaacttccagacgcattagcaccaggtggaaaggttgcgatccttacattccactctggagaagatcgacttgtaaaacatgcgtttaagtatgggaagaaagtaggaatctacagtgatgtagccaaagatgttattcgtccatcaaaagaggaatgtgcccagaacggaagagcaaaatcaacaaagatgcgctgggcgatcaaagtgaaataaaaattaaaaggaagggaaatattaaaaagaggtatgctttttaatatttcctttttttaaaaatatgaaagaaaatggtttaaaatgattgactttgactgaaactgtgttataatgaagaaaaaaaagaaacaaatgattgattttgacgtttttttattttggaaaaggaggatgacctgtatgagaattacagagctgttgcaggatgcaacgattgaccttggcgtgaaggttaacagcaaagaagaagcaattgatcatctggttgatttaatggtcaagggcggaaacatcacagatcgcgaagaatacaagaagggcattttagcaagagaagctaatggaacaactggtatcggaggagggattgcaattcctcattctaagaacaaagcagtaactaaggctggtttggcttctatgacagtaccagacggagtcgattatgaagcaatggatggagaaccatctgacgtattttttatgatcgcagcaccagcagaaggaagcgacgtgcatttagaggcattgtcaagattatctgtgatcttaatggatccagtatttaaggacagtttattaaaggcaacaagcaaggaagaatatcttgcattgattgacaagaaagaaacagaaaaattcccagaagaggcggcgaaggaagaagagaaacctgctgtacaagaagagaaagcagacgatggaacgatcagagttcttgcagttacagcatgcccaacaggaatcgctcatacattcatggcagcagaatctcttgagaataaagcaaaagagatgggaattacattaaaagctgagacaaatggttcaggtggagcaaagaatgtcttaacaaaagaagagattgaaaattgtgatggaatcatcgtagcagcagataagaacgttgagatggcacgttttgatggaaaacaggttcttcagacaaaagtagcggacggaattaataaaccagaagaactgatccagacaattttagataagaaagcgccaacatatcatcattcaggagcagcagcacaagaagatagtgcagaaggtgaaagcgttggacgtcagatttataaacatctgatgaatggtgtatctcatatgctgccatttgtaatcggtggaggtatcttgatcgctcttgcattcttagtagataatcaggcgatcaacccggcaaacttcggtaagaatacaccacttgcagctttactaaagacaatcggtgaacaggcatttggatttatgcttccaatcttagctggatttattgcaatgagtattgcagaccgaccaggattagcgataggtttcgttggtggagcattagcaaatggtggttatacatttgcaaatatcatggcatatgattctgccaaagccgtttcctctggatttatcggagcattatttgcaggttttgttggtggatatatcatggttttattaagaaaactgtttgataaattaccaagtgcattagaagggttaaaaccaattttactattcccagtttgtggtattttaattatgggtgttgtgatgatcgcagttaatccggttgttggagcgatcaatacaggactgaataacttcttatcatctatgagtggaacaagttctatccttttaggagcagttcttggagcgatgatgtccattgatatgggtggtccatttaataaagcagcgtatgtatttggtacagcacagttaacagtagccaatgcaggaccagaacagtatgcgatcatggcagctgttatggccggaggaatggtacctccacttgcgatcgcactttgtacaacattcttcaagaatcgttttacagagagtgaaagaaaatctggtgttgtaaattacatcatgggattatcattcattacagaaggagctatcccgtttgcagcaggagatccaatccatatcctgccaccatgtatcgtaggatctgcagtagcaggtgcgttatccatggcatttaaatgtgggcttccagcaccacacggtggaatctttgttattggagtcatcacgaatccagtacaatacttaatttctgtagtagttggtgcagttattggaatgatcgttatgtcatttacaaagaaaccattaaataaataagattgtaaataaccatttacaataaattaattcctcatattttcataagcaatatttataataagtaaacagagattgtgaaattttgcaatctctgtttgctattttgataaaacaatgatatactagataagattttagaaatcaaagacagttcattcgtaccatcctgtctataaacaaaactaggactgagaagaagattttcaggatacaggtacgcgtgcttgtatccttttttaattgaaaatatatgtagaagggaaagaagaaaatgtatcagttaacaacacatgcatcctttgattcagctcattttttatcgggttatgaaggaaaatgcagcaatatccacggtcaccgctggaaattagaagttaccgtacaaagtgaaacattagaacagacagggcagattcgaggaatggttgtcgattttggacagttaaaagatgatattaaaaaattagcagatgagtttgatcatagtctgatcatagaagatggaacattaaaagagaagacagtagaagcattgaaagaggaaaatttcaaaatgatcttcgtagattttcgtccaactgcagagagttttgcaaaatatttttatgatagagtgaaagaaatcggatatgatgtcaagttagcgaaagtttatgagacaccaaataatatggcagcatatggggagtaaatgagatggaaacatttaaagtagtcgaaacctttgtaagtatcaacggagaaggaaagaaagctggtcgtcttgctatgtttatccgattgaaaggatgtaacttaaactgttcttactgcgacacaacatgggccaataaaagagatgcaagatgtgaattattgacggcaccgcagattgtagaaaggatcaaagaagcaggggtcgaacttgttacattaacaggtggagagcctcttcttgacgaaaatgtatcagaattgatcggaagtatcttgatgatgccaaaagttgagattgagattgagacaaatggaagtgtaccgatcagatattataaagaaagagacaacagattaacaatgacaatggattacaaacttccatccagtaatatggaagagaatatgtgccttgaaaatatggaatatttaaaaccatgggatgttgttaaatttgttattggaagcagggaggatttaaacagggcgaaagaaatcattgaacgattcagactttgtgaaaaagcaattgtatacttcagtcctgtatttggtaaaatcgaaccagaagaaatcgttgaatttatgaaagaaaacaagcttaacaaagtcaggttccagattcagatccataaagttgtatgggaccctgacaagacaggtgtataggaggaaatactatggcaatcgataaagaagcgatcaaggaacatataagaggtattcttgttgcacttggagatgatccaaaccgtgaagggttaaaagaaacaccagatcgtgtagcgaaaatgtatgaagaagtctttgaaggaatgaattacagcaatcatgagatcgcacagatgttttcaaagacatttgaagatgatctaagtgtcaaagatcataaagatatggtgatcgtaaaagatattgatatctttagttattgtgagcatcatatggcattaatgtatgatatgaaagtctctgtggcatatttgccaaaagacaaggtattaggacttagtaagatcgcaagaatctgtgatatggttggaaaacgtttacagcttcaggaaaggatcggaagtgatatcgcagagattatcatggaagtttcaggaagtgaagatgtagctgtttatattgaaggatgtcatagctgcatgagtgcaagaggaatcaaaaaacacaatgccaagacagtgacaacaacatttcgaggagcatttgacacagattctacattaaaatggcatttcatgatgcaggcaggaaaataagaaaaggagagaagcaaaatggcaaaaccaaacaaggccgttgttgtattcagcggtggacaagacagcacaacatgccttttctgggcaaagaagaaatatgatgaagtgatcgcgctttcatttaattatggacagagacattcaaaggaactcgagtgtgcaaagaaaatctgtaaagaacacggtgtagaacatcatattctggatatgggattgttaaatcagttagcaccaaactctcttaccagagtagatatggaagtagatcatgaagcaccagaagaaggaacaccaaattcatttgtcgatggaagaaatatgttattcttaacatttgcagctgtttttgcaaaacaaagagatattcatgtgttagtaacgggtgtttcccagagtgatttcagtggatatccagattgccgccatgtctttatctcatctttagaaacaacattaacacttgccatggattatgagtttgaagtgatcacaccactgatgtggattgacaagaaacagacatgggagatggctgataaattaggcgtctttgatattgtaaaaaatgaaactctgacatgttataatggagtgatgggtgatggatgcggagaatgcccagcatgtaagttgagaagacatggattagaggaatatttaaaagtccgaggacataaataaaaatatacgaaagagaaaaggatcttgtgatggtacaaggttcttttttgttgtttatatatatgaatgatgaaagtgtcgaaagtataaatagcaaaaagctgcaagaaaagtattgataaaattttaacaatgatgtacaatgtatttgtagcaaaacaatcgattgaaatcggatattcaaatgttggatatataagaaaaggttcaatttcggtcatccaggtaaaggagatgttagttatggcaagatttacattaccaagagatttatacttcggagaaaacgcattagagacactaaaaacaatcaaaggaaacaaagcagtattgtgcctgggtggcgggtccatgaaacgttttggatttgttgacaaggtcgttgaatatttgaaggaagcaggaattgagacaaaactgatcgaaggaatcgaaccagatccatccgtagagacagttatgaaaggtgccaaagtgatgcaggaatttgaaccagacctgatcattgcaatgggtggaggatcaccaatcgatgcagcaaaggcaatgtgggtattttatgaacatccagagacaacctttgatgatatcaaagatccatttaccattccgccacttcgtaacaaagcaacctttatcgcaattccatcaacctcaggaacagcaacagaggtaacagcattctcagtgatcacagattacagcacaggaatcaaatacccactggctgatttcgagatcacaccagatgtagcgatcgtagatccatcacttgcagagacaatgccacagacattaacggcacatacaggaatggatgccttaacccatgcgatcgaagcatatgttgcaggattacattccccattctcagatccattagcgatccatgcgattgagatgatctttgataacctgaaagcatcctatgaaggagatatgcaggcaagagggaatatgcatatcgcacagtgcttagcaggaatggcattctccaacgcgttgcttggaatcgtacattccttggcacataagacaggagcagtctttgatacaggacatattcctcatggatgcgccaatgcaatctatcttccatatgttattcagtacaatgccaaagtctgtgaagacagattcgcaatgatcgcaagaaaattaggacttcctggagtgactgataaagcactgactttatcactgatcaaagcagtagaagatctgagaacaagtcttcatattgtgtctaatctgaaggaatttggcgtaaaagaagacgaatttcttgagaagaagcatatgatcgcagagagagcggttggagatgcttgtacgggatctaatccgagagaaacatctgttgaggatatggagaagattctggaatgtatttattatggtaaggatgtaacattctaaattttaattttgtaagttggccaactgtagattttgagtatatgataaaaaataaataaacgatcggaagagcagcattagaattttcctcttccgatcgtttatttattttttatcatataccagaagtctaaagtgtggacgattacaagattgaaaaatttaagtggggtgtatgttgagtgttatcgtttttcaatttttgtagcgacagacagtgtttattataaataccaatacagtaaaacatacacactgtgtggtggtttgaatagacgaagtcggtaaaataatgtataataagaaccaaaataaggaggaatccaactcatgggaagatatctaaatagttcaactccatatgcattatatcaaggtgaaacaaatcagccatattttgtagataaatcattattactggcagaattgtttcctgttttggatgcaggcaatcagcatatttgtattacaagaccaaggcgttttggaaaaacgatcatggccaatatgatagctgcatttttgagtaaaaaagtggattcagattcgatttttagcagactaaagattaccagtaatcttaaatataaagaatacagaaataaatataatgtaatttccatcgactttagcaagatatcaagatcctgtgactcatattctgattatataggaaaaatcgagacaactttgatcagagatcttaagaaggaatatccacagattgaagtgtatgaagatgattcggcagcggatgtattagaaacgatttttgaagaatgtaaccaggaacgctttgtttttgttctggatgaatgggattttatttttcataaagattttattaacgaagaaaataaaaaacagtatatccagttcttaagtaatttattaaaagaccgtccatatgttcaaatgacttatatgacaggaatccttccaatcgcaaaatattctgatggatcagaattaaatatgtttgatgagtatgatatggcatgtaaagaaaaatacagtgaatattttggctttttggatgaagaagttgaccagctttatgacatttataaaaagataacaaagaatccgaagattttaagaagtgaattaaaagaatggtatgacggttatcgggcggcagcaggagattatttgtataatccaagatcggttgtttgtgcattaagagataaccaactggcaaactactggacaagttctggaacttatgattctattttcaactatattaaagggaatatagcagatgtgcgaaatgatcttgtgctaatggtcgcaggagaacatgttccagcaaaaatgcaacaatatgcagcaacagcaaatgcgttgcataccaaagaccagatttattcagcaatggtcgtttatggattgttgacctatgagaatgggaaggtatttattccgaacaaagagttgatggacaaatttgatgaattgctgttatcaaaccagcaattaggatatgtttaccgattggcaagagaatctcaacgaatgcttcaggcaacaattcatggggatacggatacaatggaagagattcttgaatacgtccatgatacagaagttccgatttattcatataatagcgaagtggaattatcagcaattgtaaatttagtttacctctctgcaagagatgaataccgtgttgagagagaagacaaagcaggaaaaggatttgtggattttatcttttatccaaaaagaaataatatacctggaattattctggaacttaaaatagatcatataccacaaaaagcgatagag

SEQ ID NO: 621 - DNA, 18496 bp, Unknown
  gut microbiota DNA sequence
agtttccaaaggaacaggcacggatcagcgatttgtaaaaaacgctctcaaaaatgcggagttgccacctgattctttcaaatatttgtttttcttttatttctgtcaaatacatgcaagcctacctacaaatcagaatctgtctacacgaatcactgcataatgtttcccctgcatctcgtctttaatcttctgcttaagatccttcacgatcttctctggctcataatctttcccataaggaatcacaagatcaaagatcacattcgtatgtgttggccctttgaccattcgaaagtcatgaactgacagtgtcttgtcatatttcttaacaatattaaaaacttcttttcttgtctcattcacttcctcatcatccgtcactacaggatccatatggattgttgcttcgcagtgatattcttccatcaaacgcatttcaatatgatccatcagatcatgcacttccatcatatctttattgtatggaacttctgcatgcaaagagacaattcttcttcctggaccatagtcgtgaacaacgatatcatgaactccgatgaccatcttatgatttaatacagtctctgtgatcttagcaatcaattctggatctggggattctcccaatagggggttcatggtatctttgattgattcataaccaccccagagtacaaaacatgcaacaaagattccgacaattccatcaatatttaaatgaaaataatggaatacaagcattcctccaacaactgctgctgttgaaatacaatcatttaaactatccgctgctgtcgctttcatcgtttcagagtgaattctccatccgattcctttgttaaacatatacatccaaaattttaatgcgatcgagatcactaatattacataagaaatccattgttctgtgatcacctctggatgaatcactttttctactgatgttttaaataattccactcccatcatcaagatcaggatagatacaacaagtcctgatacatattccatccttccatgtccgaatggatgatcttcatctgctggttttccagccattccaaatccgacaagtgtgataatagaagatgctgcgtcagataaattgttaaacgcatctgctgtgatagagattgctcctgtgatgattcctgcgaaaaatttggttgcaaataagaagatgttacaacagattcctacaatccctgccatctttccataagcatttcttacttttgcatcctttacattttctttgtctttaataaataatgatattaataagtttgtcataaaaaactccatctacatagtaaatgggagtcctaatgacccccaatgtactttttctttatatttatgaggatctttacctcatatgttcactttatgcttctacaatcttacctgcgattgctgatgcagctgctgtcttaggtgatcctaagtagatttctacttttgacgttcccattcttcctaagaagttacggttgtttgttgcaagaacacgttctccatctgtcatgatcccgcctgcacgtccacaacataatccacatcctggatgcgtgatgattgctccggcttctgccaaaatcttcatgtatccagcatccactgcctgtttataaatctttctactagctggtgttacgatcaattttacataatcagcaactttctttccttttaagatctctgctgccgctttcagatcttctaatcttccgtttgtacaagatccgataaatacctgatcaagctctgttccttcgacttctttgacagctctgatcttatctacctgtgatggacatgccactactggtactaaatcttctgctttatatgtgattatctggcaatactcagcatcttcatctccatataaccaatcaacatcagctaaatctaccttagaatattcagctgtcttttcatccggtgcgaaaagtgctgctttcgctcctgcttcgattgccatatttgacattgtcattctggctgcaacactcatctcatcaactgtgcttccagagaattctaatgctttataagtagctccagctgctgttaaatctccgatcaatcgtaagataatatctttagaacttacattttcaggaagttttccatcaatgactactttgatcgtctctggaactcttacccacatctctcctgttccaagaatcgctgccatctctgtataaccgattcctgaagagaaacatccaacacaaccataagttgttgtatgagagtctgttccgaatacgatattcccaggtttcgcatatccacattctgtcattaactgatggcagatcccatcacttctgtgaacatttttcatgccatatttcttggcaaatgcatcaccgatcttgaaatgtctgatatcgtctgttgtacttgctggtaccatgtggtcatagatcaatacgactttgtctgggtcccataactttgtaaatcccatttcttcgaatttctccgctacgaatggaataaagatatcatggatcataacacggtctacatttactgtctggatctgtcctggttttacactgtcaacaccaacgtttctgctgatgatcttttcaatcattgtctgtcccatatctttatttcaccccatttcttttcttcatggcttctactaatccaccagcgttgatgatctccatcaagttatctggaagggaatgaatctcataatctgtaccattatatgtgatcttctctcctaaagtaacttcaatctcatcaccttctttaactgcatcctgaatcttgtcattctcaattaacagtaatccattattgatggaattacgaaagaaaatacgtgcaaatgatttggcaatgacgcatttaacttttaatgctttgatgatctctggtgcctgttctcttgaagaaccgcatccaaagttgcttcctgctacgataatatctccttcaccaatctgtcctgctaattctggacgaagtggagaaaatccatactgtttcatatcttctacggttgggagtgccaaatattctgttgggatgatgatgtctgtatcaatgtcatctccaagcacccaaacctttcctttaaactgttccatatctcttctatccttcttccttaaatctggtctgctgttgtgatcttacctgcgatcgctgatgctgtgaccgtcgctgctgatcctaaatatacataagaatccggatgtccggcacgtcctttgaagtttcttgttcctgtagaaatcaaaacttcatctttcccgatgacaccctgacagcttccccagcaaacgctgcagttacagttcataaccattgctccggattccatgaaaatatcgatcagaccttcatctaatgcctgcatataaacttcattggaagctggtgcgatcaaaaatcttacgctgtcacttactttcttaccttttaagatttcagcagcgactcttaattcttcgatacgtccattgttacatgatcctaagaatgcttcatcgatcttcacatccttgacttctttggcatccacaacatcatcgatctgatgaggtcttgcaacaactggtttgatctcgtctaagttgatatcataaactttctcaaataccgcatcatcatcgctcttgaataagttctcagcttttcttccacgactttctacgtattctacaactttctcatctggctcaacgattccagtcttagctcctgcttcaacagcaagattgcaaagaactaaacgttcatcaatatcaaggttatgagcaccttctccagcaaattccatgatcttgtagttacatccatttgctccaaccattccgatgatagaaagcattaaatctctggcgtatacaccttctcttaatttaccatgcaggttaaaacggatcgtgtctggaactaatacccaagactgtcctgttaccatagcgtataagaaatcagtacatccgattcctgtaccaaatgctcctaaagctccatatgtacacgtatgggagtctgcacccatgataaattctcctggacatacatgattctctaccatgatctgatggcagacaccttttccttcatataatttgatctcatgctcttttgcaaaattacgcatctttctatgtgctgctgctgtttttggattctccgcaggcacattgtggtccatgataaataccagtttgtctttgtccgcgatctttggatgttttaactggttatgatacatatcaattgttaaatgtgtcgttccatcattactcattaaacggtcaacttcaatcgtatggatctctcctgcttttacctgatctactttcgcagctcttgcaataatcttttctccgatggtcattcccatgttcctattcctccccttcattcaagaaattgatcaatccgccatgatctaagatattctgcatatatggtggcagcttggtacatggaagggtttcatcctctgttttgatccatccttcagacaggttgatatcaatgtcagctccgtcttccactttgtcatataagtctttgctgatgatcactggtaatccgatattgatagagtttctatagaagattctcgcaaatgatttagcaaccactgctttgacacctaacgctttcagtacacttggcgcctgttctctggatgacccacatccaaagttctctcctgctacaacaatatctccttcttttaccttcttggcaaaatctttatcaattgattcaaaagtatatactttcatctcttcaatatttggcaataacaaatattgtgacgcgatgatctgatctgtatctacgtcgttatggaatttaaatacacgtcccattgatcttcctcctgttttgtatcttttatttttaaggatactataaaatgatgtaagtgtcaaaagtataaattgcgtttgtgcttgcacaaataagcaatttatatttattgacacaccgaacaacgagaacggaataaaatggtgtgaatacaccattttatgggagttcgaggtgttcgaagattgcggaattgcgtagcaatggaacaatctggatgcatcagagagtggcaaaatttacttttgacactctcatcatagtctgataacaaaaaaagaatggtaatacgtaaaatattaccaccctttatcttcgaattccgtataatttcatcaaaaatctccgaaatggaatcaaatgcagccagatatgttcaaaaaactcccaccaaaaatctccaggtgcaatccattttcctttacgctttacttttgtaatgatcgcaaaaacctgttctttgtcaatcggtccttccatatctacctgtgcatctccgataataaacagctttccctccttgttgatgtgatgaatccgatgcatcacatacgcctcatctcttctctgaaaaaacaccatatccccagctttcaattcttcttctggcttcttcatcaaaatatagtctctttgatggatcaaaaacggattcatactgctcccactgatcatcatgctgacttcttttccctcttctaccagatctttcaataccgggatataaacgttatttgcaatctgtctcattcatccaataccagtccatgttcataaagtgctccgacaaatccttctacatctgtccttgctgtttcttcatctacttcaaattcatccatgatcttatcaaccaattcttcttttgacttcgattcatctaaattcttccaaataaatgctgccacttcatttaatgtgatcattccattaaactgctgagttgcagcccctgttggtacaagaattacttcacctgcgatatcacgaagcataaaatctgtattacgtttcatatgctatggccctctttcttattttttcttatttttcttatttttcttatttttatttctttccatgtatatggattaatcaacaataacattggaaataattccagtcttcccgctaacatatcaaagatcataacgatcttggaaagattcgaatacattgaaaagtttccagttggtcctacgatattaagcccaggaccaatattattcaatgttgcaacaactgccgtaaaattgcttgtaaaatcgaagttatcaatagaaatgatcagtacagaaaacatcagtacaaatgcatatgcgatcatataaacattgatccctcgaataacttcatgttctacaattcttccgttgaatttgaccttacgtaccgttcttggatgtaagtatgagagcagctctttcttgacggtctttaacataatgaccaatcttgatactttcataccaccaccggtacttccggcacatgctcctgaaaacatcagcattaccagaataaactttgaaaattccggccatttattaaaatctgttgatgcatatccggttgtcgtgatcactgttcctacttgaaaaagtgcatggcggaatgcctgctcgatcgttggaaataaactgtgtatattatatgtgatcattgctacagatgcaccaataaataataagtaatattttaattcttcataatggatcgcatctttgaacttcttgatcaaaataaaataatatacattaaaatttactccaaataagatcataaagatcgcgatcaaatattgtatgtatggtgagtaagatgcacaccctgaattcaatatcgagaatccaccagttccagcagtaccgaatgcaagtaacagcgaatcaaataatggaagctttcctaaaagcaacaatactaccatcacaatagtcataaaaatataaatcttatacaagatcatagatgtttttcgaatcttaggaaccagttttccaacagatggtcctggactttctgctctcatcagatgaatattctgaccaccaaccaatggcatgaccgctaatacaaacacgaatacacccataccacctacccagtgagtaaaactcctccagaataaactacatcttgctaacgcttctacatccgttaagatacttgatcctgttgtagtaaatcctgaaaccgtttcaaacatcgcatctacaactgatggaatatctccattgatcacaaatggcagtgctccaaaaaaactcatcacgatccaactgatcgcaactgttaaaaaaccttcttttgcgtaataaactgtcttctttggtttcttcataacaaaaagaattccaatgatcagacatacaaatagcatgatccagaaagaaaagcctttcttctcatgatagattaatgcgatcagacaaggaagtgataaaaatgcactctcaaagagcattaccaaacctattacgtatcgaatcattgaaaaattcattataccctgcccccattatcctctctttaagatgtctttgacatcgtgtaatccttttttagttgtgacaactaccaccagatcatcttcttccatatgatcttgaccatttggaatcattggttttcctttacgataaatgctgcagatcagcagattatcaatcaatgacagatctttaattggtcttccaatgactggagaacctttctgaatatgaaattccagtgcttccgctcttccatccattaatttgtagagattctcaatattacttccgatggaattttgtcttgctcttacatactgaataatatattgtgctgtcagatattccggatagatcatacttccaagatctaatcgttcgatcatggcatcgtaattcaatttctgtacctttgtaaccaattttgcatcactctggctctgtgcatacagagacaagaacatattctcctcatcgtgattcgtaagggcaataaatgcatctacatccgtcagaccttcttctaacagcatatcatggtcatttccatttccatggatgatcatcgcatctggaatactctcatttaatctctcacattgatctctgtctttatcgatcaattttacaccaattccactagaaacaagtaattttgataaataaaatccaatcttacttccacctatgatcattgcttcatgaacctgattctttctttccccaatcttcctgaaaaattccatggcacagtttggccttccaacaaatgaaattatatctttctctcttaactgaaaagaaccatttggaatgatcaattctttcttacgctctaccgcagagatcaatatctcacaatttaactgattactgacatcgatcaatgtcattccatctaatttagaattatgtgggatacggtattttaacatctcgatcctgcctttagaaaacttattcacttccattgcagaagggaatcttaataatcttgcaatctcatatgccgcacttaattctggattcagcacaacagaaattcccatctcttcctttatgaaactgatttcatcataataaacaggatttctcactctggcaaccgtctcacatcttcctgccttcttcgcgatcagacaacataaaagattcaattcgtcagagttcgtaactgcaataatgatatctgctgtctcaactcctgcgtctgacagaatactataacttgctccattcccgatcacacctaatacatcatgtgtttcagcaagtttctgtacaacatgtgctttctcatcaataatggaaatgtcatggttctcgccacttaattcctcaacaagcgtagaaccgattctaccacacccaacaatgataatattcattttttaccctcaattcattaacactttcttaacaaatttttatactttttttaatacttgtcctattctatcacagtctgtcagaaattacaatttaagaaatatccttttaattatgacatctaaaaatatcctgtaagaccaaacataatttatctgatcttacaggatattttcttcccacacatcatctttcaacgcatggatatcattattctaaatctgcatgccgcataaacatctgctccgatgtctgattccagttttccataagttttaatacgatcgcatcgaagattaaaaatgacatctgttcaaactgacttcccattggctgtatcgaatgtttctcttcattatttcctttggagtcacctggaagtatgatcatcccatctgccattttccccagtgtggattgcggattcattgtaacaagtccaagatatagtccagattctttggctttttttgcaatactgaccaaggcatctgtttctcctgacccagatgttatgatcaatagatctccagctttcgtatgtggtgttgaaatttctccaatgacatacgcctgaaatccaagatgcatcaatctgtttgcaaaacccttcgccgccaaccctgatcttccttttccagttaaaaatatctttttgtctggtgctatcagttttaaaacattttcaatctgttcttcttctattttaaaagttgcgtcttgaagttcctttaaaatatgttctaaattttcttttactttcacatctcttctcctgcatccataatcttgtgaattcgttcttcgatatttcctccaaatatatagcttcctgaaacaaaaatatctgcgcctgcctttttacacacaatggctgtttgatcattaatgcttccatctacctgaatctgataagaatatcctttttgttctctcaattcacaaagattctttactttgtctgcaactgatggaataaaactttctccaaacacaccgggattagtggtcatgcaaaggacaagatcagccattggcaaaatctccttgatcatagataccggagttccgggattgatcgcaattccggctttttttccacactttttgattgtctgaatagatcggtagatatgcttcgttgcctctgtatgcacggtgatgatatctgcccccgcacccgcaatcactggtatcagattttctggattttcaaccatcagatgacaatccagtacaaaatcagtatgttttctcagatcttttactgtatttgcgccaaatgagatcattggtacaaaatgtccatctgtaatatcaatatgaatgtagtttattccacatttttctaatgcttcaaactgttccttaatctgatatgtatctgaatttaataatgaaggactgataattttcatttttattctcccatcaccataatctgtacttttcttgttcgttctcttaactgatcccagtctacaaaatagacttttcccaaagctccaagttggatttctccgtcttttacgataaatgttaatgacgggctgccaaaaatggaagatttcagatgtgcatctgtattaagcattgtccatttttctgctggataatccttagatccaagacttaatccaaattcaatatgttttggtcctggactatgatactgattttccattttcatggatggcgcaattttttccatcacatcattaatatctgcctgcagatattcatctccccagtaatttgtgtcatgcatacattcgtcaaaatacagagaacatgtggtatgcgcacttgatatgacaacacatccattttttaactcagattttttgatattttctctgatttcatcagaaatgtcatgataagatgctcttcctttaactgtttctaatgtcacttctccaaaaaaaactcccatgatctgctcctataatccaagtcttgtttttaactgatcgtatacctgatctactcccattccgtttaataatggtaatccctgaatgactttatctttgatagaatctggcacgatcgttgttgatatcaccgcatcataatcatcaattttatttaattcgtcggcaatcttagactgataaatctttactttatcgctgtatccttctttttctaaccatgcgctgacttttgctaccgcaattgtggatgttgcatgtcctgctccacatacaattaataattttttcatgatactacctcctatgaaatatcttattttataaagattctaattttctttctgtgctctgattttatttacatatactagtagtgcgatcacgacaactccaatcactgctaatccaatatttcctaatgattttgttgcaactgcgaataatcccgctggccagataccgcaaagtacggatgttacctgtccacttgttccaacattataatgtgcgatcttaaatacatttgtaatgattggtgcaagccatgtagaaagatacagcatagataccatataaatactacatcctacaatagatctcacaacatttcctctaaaaattgggatcattagacagattccaaatgcatagaatgcaagatctccgaatggtaaggtctggtttcctggtaagatgatcgctaatgctaaagaaattggtaccattaataagtttgtactcataactgtagaatgtccaacagttagagcagcatccataccaatatttacacttcttccacctaatctcttattggcgaattctttggcagcttctgcaattggcattaacccttccataaacattgctaccatctttggcatgattttcataaccgcacctgttgccattcctaactgtgcagcttttgcgaaatcatattttgccaagaatcctacgatcattccaatgatgattccgataacaactgtatctccaaaaaatccaaaacgttttgcaatcgtttctgaatcagcttcaattttattaaatcccggaattctgtcaaaaatccagtttaatggtactgcgatcaatgctcctgataacgccatcatatgagaaattgcaattcctggatatccaaaaaattcactaactttcttctggaaaatgtctgctaataaccactgaagcataactgcaactagtgctcctaaaattcctgtaacaaaatttcctgtaactgcctgtgcaactaatccaaggaaacatggaaaccagaagttccagatatctacatttaaagtttttgtccacccaagcatgacaaataataaattaacgatcaatgacattgggatcaatataattccaagtgttgttgagaatgccaacggtccaccgacaccacaaccaatatccataatatttagtgaaaatccgtaatgttctcccattacctgtattgccgttccaaggttatctgataataatccaatgaccagattcagaccaatactaccaattccaactgtaaaacctgaaatcgctgcttttgctggttttactccaaaaataatacctaatatgaaaataatgatcggtaaaaataccgttgaccctaatccgataaaccattgtaatacacttaacatttcttcttctctctttctctatcgcttattcaattcctgatgcatttaaaatctgcataagttctttctctgtgttacattctttcaactttgctactttttcatcatcctgaaacagtgcgatcaaattctgtaatgtatttacctgctcatgtggctgtgccattgctaacataaataccaattccactgaaatcttatgacttttatccaccatatcttcaaattcaattggctcatctaatgataaaaagcaaatctgcgatttattcactcgctcagagtctgtatgcggaatcgcaaagcctgtctgatttactaataatcctgtaggatattctttttctctgttactgattccttcatagtaattttcttttacacatcctgcttctaacattttatctgtcatcatctgaaacaactgatcctgactttccactttttgatgaaagaaacacaatctctggtcaaaatacattcaagttctcctttcatatcatgattcatgaaatacttttaaaacttcttgtattgtttcgaatcttataaacgtatttacatcttctttttctccaataagctgatagagttcattgatcacatcccgaatctggttcatttcttcttctggaaatgcagttacaacgatcagtgatactaaagttccaccccagtcaacgggatgttttaaagttaataggattattctggattttttaatcgtctgcggatctgcatgtggcagtgccacacctgtatccaaacatgtcacaccaagtttttctcttttgtaaatagcttccctaaattcatcatacactgcattatctttttctaatacatcaataataaaatctagacacttttctttactatcaagatcttgtttaaggaaaataaatttcccttccaaatattttttcaatgtcggtgctttaattccatttttctggttatcacacacattatttttgatcagtaatacctgttttgtatatgcatctaggatattggcataatcatcttttgtaagcagcggatttaccttcacataagaaatctctggatcttcaatatcaacagatgatatgatcagatctactttactaagatcgatctcttttaatttctttgtggttgtcaccgtaatattatcttttgccggaagtatttgttttaccctgcttaaaatgagctgggaagaactaactccataggtacatacaacaacaatatttccaacttgttcaaattggtctaatgccacttgaaaatgtaataagattagtgaaacttcatcttctgttaatgttacctgataccttaattctatttgtgtaagtgcataccacatcgttgtaaaaagttccggatactcctgtttgatattatcaagcatcggatttacgatctgaatattattttgcaatcttaagatcatcggtggcagatgatataacaatgactcatataatttcttgtcccttgtcagatcaagcttttgaatctcactcattctcttgatgacatctcttaccgtttcttcatagtctgtccgcatatgttttacatgatgtgtcactctgtgggcatataactgtctgcataaatattccatatcattattactgtatgtaatatgaagctggtatttcagctgttccgcaatactatttgccacgatgtatgtctccatatgccggatattgttgtaagaaatttctgtttcctcattcatatgtttctttttgagcaatcttgaactttgcatgatcaatgttaccaataaagatttcagataatattctgaaagcacttcggtcagttcttcaaaatcatttaaaataagatctgaaactgcttttatcacatcaagttcaaaaaagtttccaagtttgtgcgtaaaatcagaaaacatttcttcctttgattctgataacaaataattgttcactgcattttgtatctcgatttcttctcctaaaatacagattccacattctccaacttccagttttacatctgactgactttcgattgatttattgatcactgcaatgtcctgatacagtgatgttttacttactaaaaattcctttgatactaattccaatgtgattgtttcacaatcgatcaataccttctttaaaatccacaatctgcgatactccggtgtatatttttcatcttcagacagattatccttttgaaggtctcttaacatatgctgaatgttttccttttcaccttccagacgaattcctattcttggagctctgaccagatcaactttatacttttcaacttcactttgaagataagtaatatctgtgtaaatcgtttttgtcgaaacatctaatgatttactaaagaaagatgcgggtttatattccctttgttttgacaaaagttttaataattcgatttgtcgacgaatcaaatcaatcacccctaatctgttaattaacgtttttctttctgtaactagaataccattgatatcttatttcttgcaattacattagcttccatattaatgtggaaacgaataaaaaaaggagatatctatgatcatttcctgatatatgatatctcctatatgtacgtttgtcacacttatgttttataaccagtctttgctgttcttatcttctaacaatatcgtttcctgttcttgtttctttgtaatacgatccctgattccctgcattctctcatcaagtgctgcactttgtcttgcacaatcataaagttcttcctgaaggatttccacttcttcatcagacaactctttcttataacgcatcttatggtcaagacttgcccagaaatccatagcgatcgttcgaaattgcacttcaacattcaccatcttcttttcattttgtaaaaagatcggtacttgtacgatcagatgaagacttcgatatccacttggctttggattcttaatataatcttttcgctcgatcagtgtgatatcatcttgctttaagaaactttctgctaatttataaatgtcatctgggaatgaacagataactctgaccccggcaatatcttttaaattatcttcaatcgcccttagatttaatggaatattttttcttcggatcttcttcaaaatgctatcgtatgatttgactcttgtcttaatactctcaatcggattattatcatattccaaagataattcatgatttaatactctgaattttgtttccacttccatgatcgcgcattcataatatgacattaaaagatcaaacggcttcttattttgttgcataaaattcaaaaattcatctgacaaaagactttgtctgacaaagttatctcttctcgcatctaataatgcttttccctgtttttttaattcctcgatcacaaccagatttttcttcattaaaaattccttccttcgtaaatattctttatgaaagcatagaaaatcctaatactacaatccctaagatcacaaggatcacacctgtcgcacgatttaatgtctctggtgttgctttattggcaaatcgtgctgcgatccttgcccagatcagcgtaaatacaacacataagataaatactgtccaatccggtgctccaacaatcataaaatgagaaacagctcctgtaaatgcagtaaatgccataataaatacactcgttccaacagctgtttttaattcatatcctaatacactcgttaaaatgagcaacatcatcattccaccacctgcaccaacaaatccacagatcaatccgatcatgatcccacagaccactgactgaattgcacgtttctttgctgaaactccttgcatggcttctttggttgtcataactggtctcacgataaatttaattcctaataaaaatgtcataaatacagaaaagcttcccatcgttgcagctggaagtaagcttgcaatatagcttcctactactgtaaatgttaacacacttatcatcatgatgataccattttttatatcaagattcttattttttccataaatataagctgatactgcacttgctaatacatcagaggacaatgcaattcctattgccatatacgggtccatcttaaggaatgtgatcaacatcggactaattacagctgctgcactcatccctgcaaatcctgttccaagcccggctcccattcctgaaaaaaatgttactgcgattgttaataatatattcatcttagtttccacctttcaaaatatcatctaaattcttatccatatttttcattacatggataaaaatttttttatcttcttgtgttgtattatcaaacaactgatctacaaatccttgttgtaactgctgtccttctttgatcactggatgtgctttttctgtaataatcagttttgtttttcttcgatcacctttgatctcttctcttcttaaataaccttctttcacaagtttctctacgttgatcgatataagatttgctttgatatttctgatctttacgatatctctggctgtctggtattgtggattgtttcctaaaaacattaaaatatcaaaagctgtctgtggtaattttaatttcttgcataacggcttacatgcatcgttatatacctctaacaactttctcggaaattctatattgatcttcatgaatttatccctccttgttaattatttcatatttggactattcatttttgatttattataacagattgtcatatattttcaactttttgttacttcaaaaaataaaaaacagctgacataatttttactttttatgccaactgtttttatatatttatttattacaattaccactatgatcaaatgctggattgatcgcataaaaatttttagaatccaaatgatcctgtacaatcctcagtgcttcaccaaatctctggaaatgcacgatttctctttctcgtaagaatttcagtggctctctaacatctggatcatcaataagccttaacaaattatcatacgttgttcttgctttttgttctgcagcaaggtcttcacttaaatctgtaatcggatctcccacagactgaaacgtcgctgcgctaaacggtacaccacttgctgcttgtggccatacacctgctgtatgatctacatagtaagctccaaaccctgattttttcacctgttctggagttagatctctagttaactgatgcacgatcgtacagatcatttccaagtgagctaattcttctgtacctatatcagttagcaccccacaaacatttttatatggcatcgcaaatcgctgcgacaaataccgcatcgaagctcctaattccccatctggaccaccatactgcgtaatgatcaattgtgccatcttgggatctgttcgtttgatatttactggaaactccaatcgtttttcataattccacatatcaacaacctcccctcttcatccatggccaagaatccgttgcccatgtaaaatgatcatctatatctgcactatcaatcgtcaatggttcaaaatttcttgcatattcttttaatgcctgctttcttgccttctgatattgattaaaatggtccattgcttttttgtcatttgggtgtgtatcaagatacagattcgtatcaatcaatgcaaagctgactgcatcaatataatttaacaactttttcttatcatactgattcactaccggcacgcccctttcccataaaatggtttattcaactctggaaagattgttccacattgtaatccttcttccggactataaatcctgctccaatgctgccatggaacatactgcatagcaaccggcatagaatccactccaccatgccgatgaccatgctcacacattcctgatgatcgatcacaataacattgattcatctctattttccttttcttcttttatactatcatggtatgtatacaaaaaagaaaagtgctttgaaattttaagttgtataatggaaatgtatcgagtattcataaaaacacaaagaaagatagaggtacgaaaaacgaattccattgacggattttttgcaaaacgctgatccgccaacactcctgcacaactcactgcgttcaaacagtgcccgtgttggctgcgattttgcaaaaaatcctatg

SEQ ID NO: 622 - DNA, 25664 bp, Unknown
  gut microbiota DNA sequence
aaaaaaaaggattcaaaaaccactctctcaaatggtctatttgcatattgtcgacacaattagtagtatatacttttatatttatgttttctaccctttcaacatagtttttttcaatttttccaattttgtcaaaaaacatatgaaatctatttgtttacatctaaatgttgtttaaattgtatagtaaccaggaattgatctccgtctattcttatcgaaaactctcctccacaattctttgtaaaactgtctgcgatggaaagtcctaatccgtttccttcgctggtacgtgatttttccgctctggcaaaccgttccatgatctcttcttctgtaaaattcatctcataggatgctgtgtttataacttctaattttatattttgatctgcttcggtgatccttaggaagatcctggttcctttcagggagtattttaaggcattttctatgacattttgtaccactcggtacatgcggctgctgtctccgataaatcttgtgtgtgtagcttcgcactgatatctgatcgcaaatccagattcttctatctgatctgccatatcccccagtgtctgttctaccagacgtttcatatccatttcttccagatctactttcgcatctccacttgttgctttcgcaagttcaaacaggtcagaaatgatagattttaagcgttcggtcttgttgatcaggatggttacataatctcttgattctgcagataatgtctgatctctgcttaagagatcgacgtatccgatgatagaagtcagcggtgtcttcagatcatgtgatacatttgtgatcagatcgatcttcattctctcgcccttcatctgtgtttctaatgctttttccattccctgcccgatattggtcagtttctgactgtattcataatacgcagattcttgtgaaatatcggtcgttgccgtcagttccccattggaaatacgttcgatctgatcgaccagcatgtttaaatctctctgttcttttgcatatttgtctgaatatcttgaaaaatatctgataagaaaaacaaagatgactgctgctataaacaagagtggggatgaaatattcattccactcattcccatgatgatacaagcaaatgtaccgacagttaaaatatatcgtaagaccctgtactgtctgatcctgtctcttgcatgtttttgtgcaaatgacatcgcttcatcttccagctttcttcttgtctttgcctgacggctccattttcgaatatatcccagacaaaatgttgaatcgagaagattcttctggcgaatcctccataccgtagtctgaatacatacggcaaatgccatgataaaaaatgggactgagatataactcagcgtcatgatcatctcgatcgttgaacctgtgatcccgccctgtgtatattctatcgtatattcccagattgcaaagcataatgcgatcgccagtccaagcagcgtagttgctgtcactagtatgatctcccaccagagcctgtcaagccctctaaaaaatctggttcgcttttcctgaagtgcaaataagatgcacagcaggatcgttccgattacttcaatgatcgaaacaacgatgatcgttttgattcccgtcgtgatctgttttgttgatccttttcggaaattttcaatctctgttagtgctttttttgtcaaagaaatctcaatgtctgcattttccagacgctgattcttctcatcattgatcagaagctgttccgggaatatatcctgcagcgtataattatccccatagaattcatagtattctgtctgatccgcattgtactcatcgtattcgtcatacggatcccatcctttgaaacttccgtctttgtttagtttctctgtcttgcctctttctatatgaaaatgttcaatcctgcccccagtatagttcgcattttctgttccatatgttgatgttgtcgttaccatctttttatcatatggtttgaccttcatcgttactttcacaaatgattctttttttatcttattcagtaaactttctgacacatgatttgcctgtgtataatagactttatcaccttcttgatccgcccatttatcaaacagtgacatctgtgtgtttttgatatagtctgattgatcctgttcatccagactgaagctgttatctcctgtcactgccatgttatggatcgtatcgagtccatatatccctgacagggtcatagcgatcatcacaagtgtgatcaatactttgttagtccattttctcgatcttgtatccaattccccacaccacctttaaatatcttggattttttgcatctatttctattttctcgcggatacgacggatgtgaaccataacggtattctctgttgcataggcttcttcgttccatacgcgttcgtagatctcatctgctgaaaatactctgcccagattgttcatcaggagacttacgatcttgtattcggttgcagtcagtttcactggctctccgtctaccatcatcctttttcctttcatgtcaaggatcagtccgccattgatgatctgttccttattgctttctgcggcgttcattcctccaaactgcatgtatcttcgcagctgggatttcactctcgctactagttcatctgggcggaatggtttgctgatatagtcgtcggctcccatagatagtcccaggatcttatcgctttcttctgtcttggctgaaagaatgatgatcgggatgttcttgctttccctgatcttcatcgttgcggatagtccgtccatcttcggcatcataacgtctatgatcagaagctggacttcttgttccatcaggatatccatggcttccagaccatcatatgccgttatgatttcatagtcttccatttccagacgtttcttgatcgctcctacgatctctttgtcgtcatcaacgactaggatctttggctggttcatacttttcctcctcgtatctttgatggttttagtgtatcaggtggttctttcgtttctacagatataattcttacaaatttcttactatgacttccttaattatagtaatttcccgaataattatcaatatcctgtccagtgaccgtaggagtacgcctgcacttaacaagtgatgagatattgataattattctcatttatagttattgttcactaaccgttcgtgtggtatcatatttttcagcagttagagttttctaactacatacgcgctattattttatattgcagaaaaacggaggaaaaactatatgcgtaaaagattaatcgggaaagcttttgctatcgctatgagtggtgcaatggttttaactgcgactcctgtgacagcgaatatttttaacgttgctcacattgttaaggctgctgaaaaagaaacgtctgacggatatcattattgttatgttggacttacttggacagaatattgggaaaacgaaggagttttaaatcctactgacacaagctcttctgatgtcgcagacagtcatggagaatacgacaagggtgggtatgatgttgtaactcgtgccactctaaaccatggaatttcacgtacttctttccagagtatgttttcaatcaacctaaaagatgatgctggaaatattcattctgttgacattgctggatttgaaagtggatcatcattaagttctgaatttgttcttaaagatgcagccggtaacctgtactcattccataagaactatgcagaagacggtaaaactcttttatatactgatgttacttgtggatcagataaatatacattcgttaatttccaaatcaagggaacaaaatatgttcctgtcaaggtttccaataatgattgggctgctttttctgaggcatatgccggcaaaattattgaaaacggtgaaactttaaattgtggaagtaatggtgaaggagctatgaaaaaagcaactcctactgcttccgtcgatgctacaacacaaggtttaaaaactgctgtaaaaaatgaaaatggtactttttcattcagtgcccgtgcaaataaaggtacaacttccggacttaaagatacagatttaaaaacagcaactaatttaattccagaggtaaaaactactccaggatctttcggtgaatttctccgtgttgattttacaggaactggttatggtgctttaggtgctaatatgcaagctgtaaaatggacatactacggtaatgacaacacacgtacaaacgcactagctacttatggaacaaaattcgaagctgataactggatgcacagtaaacagggaattcagttaggattaactgattctgttcgttgccagcttcctaaaggtacagatggaacaggttactggagcttaacaatttatgctcttggatatgaagattatacatatgattttgaagctacaaaagataatattgcccttaaatctaatcctgctagtgctgaagaaaaagccactcttcagaaattagttacagaagctgaatctttcaataaagatgattactgtgaaagcactgctgctaaagctgcatttgatagtcttctggtagaaacttctgaaacaaaagatttacttaacaaagaagatttaacttctagcgaggctacggaacaagtacctcatattacagatgcaattaatgctgtaaagtctttaaagaaacatgacatcgaaacaatcacaactcctgctactacaacaaaagaaggttctattgttgaaaaatgcaagaactgtggtaaaataatttctactaaaacaattgcaaaattacctgctactacagcaaaaccatctgctacaacaacagtaacaaacacaacaactgtcaaagctccaactaagacaactgttaaattaagcaaagctaagaaaacttctctgaaagttacatggaagaaagtttccggagttgctgcttaccagatccagtatagtacttctaagaacttcaagaatgcaaaaactgtaaaggtttctgcaaaatctgcttctaaagtcttaaagaaactgaaaaagaataagaaatattatgtaagagttcgaagctacaaagtaacaaaagtaaacaacaaatctaaaaatgtttactctgcttggtctgctaagaaagctttaaaaactaagaagaaataatttctcttaaataatatcaattacatctcaatcttaaaattattacaacataaaaacaggaactgcatttggtctgcggttcctgtttttatttctcattctatgtttttttgcagttgataaattgatgatattctattttgaaaattatttactgataatcctatagatttcatcaactgataactctggattctgtttgatcatttcataaatcggctgaacaaattctatactttccataagatcatctattatcttctccatagaatcccctcttagggattttttttgaatgagtagaattttatttttgatttctcctttgatttctccttctcttcttccttctatccttcctttttcttctaattcctctaacgctttgcacatattcatctgtcctccttctttctctagctttattgcatcatcaatcaatttctgtgattctgtaatcgcaccaattactaatcccaattctgaaggtattaattgctctttgtacatatcattaattttatcatatcttttatcataaatgaatctactgatatcaaaaactgtactgacatctgaattctgaaatttcagatattcactatttcttacctctataagattcatcttataatctgatactaacgattgaaatctttctggtactttcaacatgtctatcaatgaacgaggaccatcccattctttttcgccataataaatacagatcgtaatcattggatgtaaacgatcctctgctgttaaccctgataaaaattcatctgaatttctccaattcttttgctttttattttgagctgctaattcattgtattcttttaaataagaaaatgcatcacctaccatgtgacgcaatggcattgcataatgaactttctgttgattttcaattcctagaattacaaaatcaataccaaatgctgttttcttaactacatctaagactttctgtattgtttctgcatgcccattaaattgaagaaatgatgaaatatccgtatctacttctgtcaggtcattaggttttaacacctgctctccatcaaacatacaagcattaaataaatctgcaaatctgctattatctttccagaatttttttaaaatatgatctgcttttatatggttctttattttcttttgctgtgccatttgaactgatttcctcccatcctgttatataactgtatatttttcatgtttttaatatactatatttatttcatattttcaatacctgatattttgcaattcaaccaattcaacaattccatcaacctaaaaacacctaaaaaacacacaaaaggagagaaaaactgccttccaacagttttttctctcctttttacttatttacacttttatattcttttatactgttattctatgcctgatccgttggaacaataataaaattgtctggtaactcgacattctccattccttcgaattcattgcaaatgatcgcatcaaagtttgacaatttggagaaattgtaaaatcctttgaccgataatttggaagaatcaatcaacagataattgttcattgactgttccatcgctttttccttgaccatcattgtctccgtctccgtcgtataactcatgcccttttctaagtctacgcctgcacagcctaaaaatgcatagtcaaagttaaatcttgagagattcccgatcgttacaggtcctgctgacatgttatattccggaatgtattttccacccaaataaaacagttccgctttgcatgtcatattctggtaagcttctgctacgagaaagttgtgtgtaacaatcttgatattcttgtcctttaaatatttaaccatcggaacaaccgttgtaatcccatcgaggaagatacagtcaccttctttgacaaaggatgctgctttcttgcatacgagttccttgctttcggaaaattctgtgcgatcccgtacattcttctcgtcgcggtttgaaacgatcttattctggttgattcctttggccccgccgtgaacgcggattaatttgccctgatgttccagttcttcacagtcacgccggatcgttgtctctgttacctgcataagtttcgcaagatctttcactttcacgattccctgctcctggatcagatttaatatggtttcataacgttcgcttgctatcatcttttttgctcctttattattccctctcattttaccctactttcgaacaaaaaggaacagaaaaggacaattctaatgataaattttcatgaaattccattcttctggaaagataaagttgttcccgcaatagagattactgcaagctgcatcactttatcttttagttcctccagactcatttcttctttataacggataacctgctcaagaactggcagattgattccagtcagtaacagacttttctttgagatattcttctttctcaacaattcgatgacggccgtacaaggagttcctctcatactgtcaaataataaaataagctcatcttcttctggaatcttatccagtttgtcactgatcgtcttctcaaactcagcgttatttgtaaaaccgatcgtgataatatcattctgcggtcctaacatatcttcacatgcggatttgattccttctgcaaatatactgtggctcatgatcataatctgtttcatatggtgttctccttccttcatcgtgctaggttgtccctactgacagcgggcaagatactctggcatcttgtctgcgattatttcaaacgaacgatttacttcttctggtatatcgacatgtcttaaaaatcctttcccttttggtccataaccattctcatcatcacgaagacggtatacttcgcccaatgctagttcgtaaagccttgttccttcccataaatatggcgtatcattttcaatggttccatccgaattaagttttggaattattggagcataatttatgatcttttgacgatcattgaacatatctaatgctgttacataacttcttttttgaaggattggatcctgaatgaggatcatagtttcatgttttattgtatgatcgttaaatatttgtatggcattttttatattctcggatgtattggttgaggttttatccatgaaaatggatgaactttcaatctggtatttgtcttttgctaaacatgcgtatatttcggcttctgactctggtaactgatctgtttctacattaagaatctttgcaactttcttctttaaattcactgtggaatgaccgattcctccacaaaacattaatttctctccgtatcctgccttgtaaagttcacaagctgtctcggctacgactggaaggtcgcttcctaatgcaatgatcacatctgcctttgatgccccacaagctttcttgagggcatcttttgacatctgtgctaaatctcttacagccagaaattctatgatgcagttcaatgcatctgcgatttctttattcataagctgcttacttgtctaagtctaatacaactggtacagaacggtatccaacacccattctgtcgattcccatatcgatcagctgtaagaaatgttctcttgtacgaatgcatccgcttcctttgactttacatttgtctccgacttcttcctgcattactttgatgatctctggtgttgcaccatgtgcatcaaatcctgttaagaatcctgtacttgtcttaacaaaatcagctcctgcgtccattgcacaatggcatgctttgcgaacctgttcttctgttaatgcgtctgtttcgaagattacttttaattctcttccatatttgtgagctgcatctacacatgctttgatgtctgctgttacttctgcatattttcctgcacggatgtgtccgaagtttgctacaacgtctacttctttgactgtgtcatattttgctacgtcttcaatctgttctactttagattttgttgagcttgttccgaatgggaagtctgtaactggacataacattgtgtctgttccttttacatatggctcacataattccatatatcctgggttgatacaaattgttgcacatccaagttttactccatcttttgttaattctatgatctgttcttctgtaaattctggttttaatacggagtaatcgatgtaagctgctaattcttttgttgtcatttcggctgctttttttgttaattttttcattttgtttctaaataacacggtgtgatttgtttgtttttgtgtgttattttttcctcctgattattttataccatactttcaaacatttgtaaacacttatttttcatttttgttcgattttttattttatttttgcgtttttgtttgttttgtaagttttttagtaatttttatagtttactgtgttcgttttgaggggtataatattgtctgtaaggagatttcgaacattttatttctgaaattccttttgtatatagtaaaaacagtttgttattaagtaagaaaggatttatttttatgaaaacaaagactttatatatttcagatcttgacgggacactgctggcttctgatggtcatatcagtgatagaagccgtaatatcttgaataaagtaataaaagacggggcaaaagtaagtattgcaacatccagaaacttatttgcttttgatcaaagagttgctggcgttgatttttcgattcctgtcattttaaatacaggcggatgtatttataactgccagacaagacattatgatgtgatttccgatattccttttgatcgcgtccttcaattaaaaaagattcttgatgaaaatgagattgcttcttttatctatggattagtcgatgaggaattgtatcttctatatgagggactttttgatgaagctgatcaggcttacattaaaaagcgtggaccgatgtatcatacattcaaaaaagatcttgcttctttatctgaaatgtcggattcatgtaaggtaattttctttgttggttatggttcttatgaaaaaacgaaacggattcttgatctttccgcttctgttgatggaattaaggcaacgatcacgaaggatatttatactggaaattattttattgaaatttgtgaggaatctgtatcgaaggcttctgcaattttgaaattgaaggagatgtatgacattgatgagatcgttgcatttggggataatgtgaatgatgtggagatgcttgaattatctgatcgatgttatgtaccggaaaatggattgccgcagattcgtgagatggcggatatggtaattgagaaaaatgatttggatagtgtggcaagatttattgtggaagattattataaataactaatggctatcctttaggctgtagatgaaaaattcaactatatatgggcagaaaccgtatatagttgaatttttctttaatttagaggtattgaaatgttgcttatagaaatagtttttataaaccacttaaatctatcttgtagatagtattttctaattctgtattcttcaagaacattatcatgtaaattggcatatagatcttctgatcttttatttctacgtttccttctgagaagatatatgctctttctatttcgtagtttttctcttttaatacattttccaaagcgcagtgttttttgtaatcttttcctgattttatttctagaggagttacttttccatctagttctatgacgaagtctaattctccttgttttttgttgttaaagtagtatagattaaatccgtttgctaatagttcttgtgctactacattttcgaagagtgctccgttgttgattgatttttctttatttaatatggctatttttacctgatctgaatactgattggtcaggattcctacgtctgagaagaatagtttgaataaatttctgttctcacttatgatcagtggcagctttggttcgtttatgttgtatacaggaattgctacgcctgcatctttcagccatagaaaatcatttgctacccggtcatagttaagcccttttccgagtgtgttgatcttgaaccttttgtttttgctgtctagctgtcctggcatggaatcgtagatttctcttaatttcagtttgtaggttgtttcatattttgtaaagtctgctttatatagtctcatgattttttgatggactgctgctactcttgcaaggtcgtttgtttctgtatatactgcaactgcttctggcattcctcctacgatcagataaaggtaaaatacatccagcattttcttgtgtacgaattcatcgacttgttgttgtttcttatagcattcttccagcatttctagtatattttctttgattccaacagctttcatgaattcttttactgttaatggatacatatcttcgattcttagatagcctactggagctgatcttaagtcgtttagttcaacacctagaagtgaaccactcataatgtatctgaaacttccttcttctacaagaaatttgattcttgtcactatgtctttaaattcttgtatttcatcaaaaaagatgattgtctttcccttgtttagctgtttatctgtgattaggctcaatcgcattaacagatcttgtgcatttgtggcattctcaaatagttctactaattctggacgttctataaagtttaattctacataatcatattttgattcttttaaacactctctgatcagatatgtttttcctatctgtcttgctccagttaatagaaatgcctcttttccctgtaaaatccagttattgattgtggttttcatctcacgatcgatcatcatatcacctctgattttattttttccatcctcttttttgtttattctgcaacttttctagccttattttacatagtttttgcaacttttccaaccttttttattgattttttacaacttttctaacttttatcacataaacattcattatggagcaaaaattttatacttttccaataaggatttcataaaaaaaagttgttatatgagtaacatctatcatataacaactgtttttctattcttatactaccttataattcctcgtcttcgtcttctgattcttcttcaaaaatctgaatggttcctgcactgattgctttgacctccgattttaattgttcaagcgcggaatcatctttttgtaataataactgtacaagtactggcatattcattcctgttaagatcaagcttctttctaagaatccttcctgtcttaataattctgcggaacttgtaaatggagagcctccaataatatcacataacagtatgatttcatcttcttttggaatctgattcaaaatttcaagaaatttttctctgaacgttttgatatccattccttcttctaatcctaatgctgtaatttcatctgccattcccatcacaacaccaatcgcactttttaatccgcttgcaaattgtccatggcttactaaaatgatatgtttcattttttcctcctatacttgtctgtctttcatgatttctttgaaccaatataaggatttctttggaattctgtttcctgttttaagatctaattccaataatccatatcgattcttgaatgcattgatcgctgacagattatcaacaaatgaccaaacaaaatatccaaaacagttagatcccatatttcttacttttaaggctctctgtaaatgtccctttagaaaatcaatacggtaatcgtcatcaatgtatccttctttgtttcgatatctgtcttcgccttcgattccgattccattctcactgataaaccacggaatgttgtcgtagtcttctttgattcgcattccgatatctacaactgcttcttcataaatctcccatcctctgtcggcattgtattttctgcccggcatcacccatggttcatagtagaattctggatggaatacatctttgtcgtatgctgtttctcttgctttgacacgaattgggaaataataatcaattcctaacatatcaatacggtattttttgatgtcttcaaagtcagcttgttcatacgcaaacatacagttatgttcttctaattttcttaataattcctgtggaaattctccctttagatatggatctagataaatccttacctgaaacagatctgcataataggctgcctgtacatctcttgcttctccacttcttgcatagattggtgtcatatgtaacataactccaagtctgcatccatcttctttgtatggttccatcgctttaactgcttttgtcgtagcaaggatcttatgaaaatgtgcctgatatgcttcttttggtgcgtgtttaaatggataccagattccatccatatagccattatcgattggaatattgggttctgtgaaagcaaaccataatttcacttccttatgaaattcttttaatactgcttttacatactgttcataaagatatactgtctctcttccaacccatccattatatttttcaaataatattgctggaatatcccaatgttccagtgatataactggttccattccatttttctttatttcatggatgacatctctgtaatattccactgcatcatagtctacaattcctgcgattggatctttcataaatcttgcccattggatcgtaaagcggaatccggtcattccaaaagatgccattgttttgatatcttctttgtaatgatgataaaaatcacttgcttttttcggtcctacatcatcataccagatatctggattggtatcgtaaaaaagttctgcccagctctcctgaccttccttctttcctgcacatccttcaatctgccatgcactgcttgaagttccgatcaaaaaatctgctggtatccgctgtttttccataactttttatctccttatgatctcattttatatgtgaaaaagtctcgatgcaaaacatttaaatttccattcaatgtttcgcaccgaaactattttcactttttattcagaggttttatacttatgattaatagcttaatcctgggttaaagaatccaactaatacacctacgaatgcaactgctaacatgattgccattgtagcaagtggagacattttcttcttgctcattaaccaccagcatagtaatacaaatactacatttaaaatcttaggatagattccatctaaagaactctgtaatgtaataccttccgttccggctgctttcttaacgataacaagtgatgttgtaatgttgatccatgttgctgctactgcaccgattacgattgttccgaccatgatgatcgcttctcgtatggccatcgcgctctcaccgacgacgagtgcaactgctttttctccaagattatatcctttgtagtataagaaacgcattccaagtacagaaattaagttccatgctacaatatagaatacagctcctaaaggacttccatttgttgacatactaagtgcgatacctaataataatggaatcaatgttcctacaacgatggaatctccaattcctgctaatggtcccattaatccggcacggataccattgatcaggtcaccatctacttcttctccatttgctcttgcttcttcaagcccagctgtgactccaactaccagtgatccacctaactgtggctctgtattaaagaaactagaatatgttgtcagtgcttctttctgttcttctttgctgtcatataattcttcgatcagcggtaacatagaacacatatatccaaatgtctgcatatgttcatatgtaaaacatgttaaatgtccatgaaaccataaccagaaggatttgtttaacgcttttttagataattttttcgctgccatattagatatcctcctcttcttcaaagtcatcatcggctgccactgcaacatgttttgctgcatttgcttttacctgatagtaaatccatgccatgaatccaccgatgatcgctgctgctacaaggttacatcccataactgctgctaatgtaaatccaaacatgaagatcagaatatcgatcggacggtttgctacctgttttaataagattgcaatacctacgcaaggaagaaggcttccaagtgttaagatcgtcatcatgaaaactccatccattggaaggtaagtctggataactttgatcatgtctgatcctaaatatgtaatgataaatgtcggaatgaaggaacaaataatatgtgagatccatggaagtcccatatcaactgcatataatttctttaattttcctgattccagacacttccatccatatgcctgccagatcaggttcatcgttgctgttccatacattaaaactgtaccaagagttcctactgttgatccaagagctgttgccatagatgtagctttggctcctgtaagtcctatgtttgtgatcgcaatgattgacagcggtaccccaatataagaaatcgctcttacatccgctgcaactgctccacctggcgtgatcagtgcgatatatacgatctggattgctgctccggcaatgattccggttgcaacatcacccatgatcagtccgcagatcaaacctccaactaatggacgacctaatgtatagtttccaacaacagttccacccataccaggcaaagatgccagacaggcgaaaattccaaatagtgtagcttgccaaattgaaacgctcattttctctctcctttcgtgacctgttatcctttagtatccaaatttacctctgaatttttcccatgttccgatcgatgcctcttttaccagtgcaaattcaatctcaaatccagcctgatacattctttcaaaagcttctgcttcatcctgtgtgatggactggttatttccaagtttgactgcacctggacggtctgggcatggtcctacgataacttttttaatcggtgtagcaaatttaaaatctactaataattccgccatatccacagagttctttgtgattaggaagtactggtctttgcttgttaatactttatctgcatttttcttaaaatgttctttgttccacacgaatgtcttctttgagcttgcacctttaaatgcggatactaaaagtttatttcctgctgctgcatcattgacaccaatcagtcctgtgcaaggatattcatttgcccagcgcgtaaccgtctgtccatgaatgattctgtcatcgattcgaataaatgaaattgccatatatattctccttcctgatcctttgatcagatttcatcgtcttcgtctgtttctaatacaaaacgttttgcctgtgtatcggctaaaacaagttcatcaagtttatccagtgttgtcgaatctttcgtcataactacgttgatcgctaatggaagattcattcctgtatagatcacacaatgttctaacatttccatctctcctaaaacagcaatcacattcgtcaatggagaacctcctggcagatctgaaagaataatgatctcgtccttttgtggatcgatcacttctaatttcttcttgagattctcaacgtatttatcggtgtccataccattttccagattgcagtacataaggtctggtgtgtcggaagcaaacattgtcaatgcattatgcaatcctggtggaaattgtccatgtccaaccatgagtaaatacttcatcttgttcctccttctcatcatgtataaattcactttgataccatacatatgactgggccctgtcatatgtatcaaatgtatgatacatttcttttatgtattgaattatatacatggataacgactcttgtcaagagttttttgtgcattttatatatttagtatgcaaaaaaaagacaggattcgtatgattttttgtattcatacaatcctgtctctgaatctttcttctatattagtcccgccgaaaattgcgctggatatttactggattttttcctgctgtctgatttttatataattctaattgaaagacatttcgatcggaacggctggttgattctgtatattcatagattaaccctgtctcggtgtgtgagattcgtttaatcctaaatgctggaatattttcctgacatcttaaaatctttcgttcatcttctgtcatattcacagcttcgatcgtctctgtcgcatgatatggttctaaaccataaagactatcaagaatatagtacaatgaaatggatgaaaaatcatacgattcgattccattacatagataatatgggatatatgtatgctccacgagcatcggctcattatttccacaacgtattctgtgaagataaaatacttttctctgttcttttggaagctgaagtttctctctgacttcttctggtatctttgataatacttctgcattcagaacaacagaagatgcctgagctccaatatcatgcatgctttctgtaaagttgtataaatagttgatcggacgtttcattcggttgtccgcaacataggaaccttttcctctatatcttacaagcaatccctcgtccagtaactctgccatagcaagtcttacggttgatctgctgacatttagctcattgcagatcgtgacttccgggatcatctgatctccctctttcaagatgcccatctggatcattcgtttcaggtaatttgatatctgtttatacattggctctgaacttgttgagtcaagtttaaatgtctttttaaaataatctaaatccatgggtatttcctttctgctaatttattagttttattctatcacacttctttgtctttagtatgcttaattttttctttcttgtcaattttttgtatgaattgtattgaatgtatgatacatttatgttactatgtactcagaaagaaacaatttatataactatatactctttatcgagtgtattttaaatttatggaggtatcattatgaataatccatcacaatcaatccactggacgcatcgtgcagcgagtatcttccagatcatatttggcatcgttggttttattgctgctctggtctttattcttccgatcgctcgtccgatcatcaccgtttttttatgtatcttgtgtatttatgaactactgcttggtataatgaacttatcattattaaacaaaaaatcttattccagatttttaaaaccttgcgcacagttcttagatcattatcaacattctagttcttccagaaagaactaataccttgaaaggagagttatattcatgagaaactttttagaatttatcccacaaacagatgatatcgatctttctcgtattgatcgtttccagaagaaaatgtcaaaccgtgttgcaagtatctgtagtgaacgtgctgttttatacacggaaagttttaaacaaacagaaggtgagccttacattctgcgcaaagcaaaagctttcgctcatacactggctcatatgactgtttatatcgaatctgacagcctgatctttggaaatcaggcaagttctaactttgctgcccctgtctttcctgaattttcgatcgactgggtcgtcgatgaactggatggaaccaatggagccactgcttttgacaagcgaagcggcgatgtcttccagtgttctgagcaggtaaagaaagacattcgcgagatcgctccttactggcatggccatacacatcaggatgaagtcgcttccaaccttaccgatgagattcgtgatgcttctactcagggagttttacatcttggcggtatctcaagttccggagatggacatatcgttccaaagcatgagcttgtccttggacgtggtttccgttctatcgctgatgaagcaagagaaaagatggctgatccttctatgagtgattcacagaaagtattttatgaatctgttgcaatttccctggaaggtgtactttatttcttcaaacgttatgccgatgttgcacgtaagatggcagaatctgctgataacgaaaaacgtaaagaagaacttcttgccatggctgatatggcttctaccatgatggaacagcctgcacgttctttctgggaaggatgtgaagtctgctacatggttcatatgctgcagatgattgaatctaacggacattctttctgctatggacgttttgaccagtatatgtatgatctttatgagaaagatattgcttctggtaagatttccaaagaaaaagctttggaatatatcattcatatgttcttaatgaacagtactaataataaagtccgtggttatggacatacaaaattctctcagggatatcctttatattccaaccttgttgtcggtggttataaaaaggacggaacggatggaaccaatgatctttcttacctctgtgttgaggcaatgaacatgactgctatggcagaaccaaacttctccatgcgttataataagacaacacctgtcgatcttcttcgtctggctgcccgcctgatccgtactggatgcggtatgccttccatgtttaatgatgaagttgcagtcaaaggtcttgtagatcttggaattcctcacgaggatgctcttgattattgtccgatcggctgcgtggaaactggtgtccctggtatgtatggacatcgtgcaactggtatgacttatgtcaactggggaaaagttcttgagatcgtcttaaatcatggaaatgatccaaaaacagatatcaaactgatcgaccttggtgacaaagagtatgcttcttacgatgaagtatgggctgcatgggaaaaagccttaaaatattattctgatcttgcggttgaatccgatgcgatctgtgaccgtgcgcttgtaacttacgatgcagatccatttgcttcctgctttatcgataactgcatggcacttggcaagactttaaaagagggtggatgtaaatatgatgtcatctcccagtccaacattggtccatgtatcgttggtaacagtctcgctgttgtgaaaaaattagtatttgaagacaaaactttaagcatggatgaattaatgaaagccatggcttctgactgggcaggtgaagaaggtattcgcatccacaagatggtcatgaacgttccaaaattcggaaacgatgaagactatgttgatgaaatcgtcgctgatgtcttccattcttatttaaaattactgccagattaccatacagagagaactggaaaaggtcctgaagtttcctgctatacaatgtctacaagtaatattacatcttatgtaccaaatggttttgatgtcaatgcaaccccagacggacgttatgccggaactcctttaaatgaaggatgttctccaacacagggaaccgatactcacggaccgactgctgttatcaactctgtatccaaacttccaaatgatcaggttgctgccggacagctgttaaatatgcgttttgcttccggagcacttgctggggaagaaaacttaatgaaatttgttgctttcttacaggctagtgtgttaaaaggcatttaccataaccagtttaatgtcctatccacagagacacttagaaaagcacaaaaagatcctgacaattaccgtgacctgatcgttcgtgttgccggttattgtgcccagtttgtatcactgatgccggaagctcaggaagcgatcattgcacgtactgaaaatgaatggagctgatcaaaatgaaagaaggttttatctccaccttacaatcttattctacgaaagatggtcctggaatccgcacgactgtcttctgcatcggatgtaacctgcgctgcgcatggtgtgcaaacccagagcttatgctccccggtgaaaaatacatgtattttaaacaacgctgtatccggtgcggttcctgcatcaaacactgccatggtgaaatatccatggcagaaaatggatgcgtgatcaatcgtgccaatatagatatggacactctaaggcaatgtgaagacgtctgtccaaaatctgcatatgaaaaagtaggaaccaggatcacatctgctgcccttgcccaaaagttactgcgtgacaaagaattctacacagtctctggcggcggtgtgaccttctcaggtggagaagctggacttcaggctgattttgtctatgaaacagccaaactccttcgcaaggaaggtgttcctgtaactttagataccgcaggactgatcaaatgggacattttatcccatttgttagaagaaatcgatcttgtcctatacgacatcaaatccatcgacgaacagattcacaaaaaatgtaccggtgtcagcaaccagctgatccttgataatgcaaaaaagattgcagatatccccaaaccaatgtggatccgaatggttctggtaccagactggaacgatgatcttgatgatatcaaaaaacgtttcgaatttataaaatcattaggtcctgccgtgaaacgtgttgatgttttaaaataccatacgcttggtgaaggaaaatattacagcttagggatggaatatccaatcgcacctggaactgtatgttctgatgaatttattgacaaagtatctgaaattgctgatatggtcggtgttccaattaatattgagaattaaaagaacctcctccttatccattttgcaataccaaaagaaggattttcaaaagcttacacaactttgaaaacccttctttttaattattgctaatatgcttttactgatttaacttttgaatatgttccatataccttcttgtttgtagaatcataatagtaatagcgaacctgtacataatacttcttacctttttttagtcctgtttttgtatatgtatttttagctaatcctgttgttttatattttgcagctttcatctttttacttgtagaatagcggaatctaaatcctcgcttttctccatatttatttgtgtatttgatagattttgctacaaatcctgttccttttccagattttcctttcaaagatgatagttttgctgtttccactttgatcttcacaaattttgcttttagcacaatgtttttatctgaagcaggtactttgtttacaacttttcctttataagtccatcctgcaaatacataacctttcttaccagcagatttatattttgttttgttccatccaggtaattttactccagcctttgttttatttattgttgtaacagtttttccaccattaccttttaatgttactgaaattgtttttggtgtttctgtcggttttgttggttccgttggttttggtgtttccgtcggttttgttggttccgtcggttttggtgtttcttcttttttatctacatataagttcttgaaactgactgcaccatcccataaaccaagtcccatatgtccagttttgatgttgaagaattctttgtctgactctttatctgcatcaaaagtataattcaaacattcattatcatctacataaactttcacagcatccgcttctttttcaatcttcacatgatgatattttccatcattgatgttggatgacatctctcctaatgcaatatcaccatctctatacattctgaacagtctcacattcttgctgtttggtgcaaattggatacaatatgctccattcggatctgttgatgatgatgcaaaaattaagtttaccaatccatttgtaaatgccatgtctgtttctattgttgatttttcattaactattgcatcttcagacatataaaaatcatttgcagactgattagaatctgataaaacttctccatcaattgcccaattaccacttatatttacaaagttcttaatgtttgttttaaagttattttcttttacattaatcgtaaatatctttttctttgatggatctgatttactcgatgcagtaactgttgcttttcctgattttaatgctgttacaactgcttttccatctgactctttgatacttacaacatcttttccttctgtaacatcccatgttatcgtctgatccatagaaattggaaatacatatgcacttaattctacactatcaccagcatataatatctggttctcattctgcatagatccaacagattccacatctgtcaattcttccttatctgtccaaattgacttcattggataaatatcaatatctgcttttacaggatcaccttctactagaacagatgctcctaaacttgttggtgttgggaatatctggttcgctcctgctgctgtattattactgctaaatacttcgacactggctttgtctacataaatatgtaattctacagaaccatcttcattctttttcacattagactgctcatttatttttttgaattcctgactgataatctttcctgatttacttctatcgatagatagtttctcattttctaaatcataaattacatcggtatattctgtatcattttgattctttcttagtctgaacccaactttctttgttttctctgatggtttaaatttagcaacaatctcatatgtatcctttgcaaaatcctttaagagatcattatcttctgaaattgtaacatctttataagaaatcttattttctgcatctcttaaactctcatattcactaattggtgtctgtgttaaaacatattttccattttcctgttttagtcctactttaagattcagattataagttccattaaaattctgtcctacagtatctgcaactttattacaataatcatcccatgtattcatccaatttccttcaataatctctggaatcgttggattttcctgtgttccgaagtcttgtacataatatgtcattgctgcataggaatccttaccaaagttcataacaccgtcactgtttttgtaagcttcatctgcaacaaatttccattttccatcaacttgtttaaaatcaccgactttataaaatcttccaccgcgggaaagtacccatttcacaccatcttttgtttcaattggataaaggtcagggcattctgtatgaagatctgcatatgtagattcacatttccaatctgtcagattgtctgatgaataaatacgaagtggtccgcctgcaattaccatgaaccatttattttcccatctaaaaactttaggatctcggaaatctctattgtttaatggatcttttgaccagtctgctgcaattttatttgtttttttccaagtttttccttcatctgtactataggcaactttaatacgttgtccatttccatctgctgtgatcaatgcaactaatccaccttcattgccgtcaccaaaaagtcctgatgtattcttttcatccgctacaatacatcctgaaaacatagctccatttgcatctggatataatgcaattggctgttcttcccaatggatcaaatctttacttgttgcatgtgcccaatgcattggcccccattttgtatcatcatagaactgatagaacatgtgatatgttcctttatacttaaccaatccatttaaatcatttccccatccgtcctttacagaataatgatactgatttctgtatgcttcattataataagttttatctgctgctcggcgatgcacatttacacgatatgttaaagttgctgtctgtccattttctccctgaactgtgctctttactgtaatgtaattcttaccaactttaactggaatattctttccatcgttatatatttttccatcatattcaacctgtacatctgcatttttatttttcttttcgatattcaagtctactgtttctgcattattctttacatactgaatcataattggttctgtggatgtaaattgtgctgctttctccacatctccagttgaggaagataccgagatattttttaactctggtgtgttttgatcatttaattccgtataataggtattttggaatgtcatctcaccattccaatttaatagaccaagagaaccttctgtcaaaacagtactctgtcctttgtcgtctttttgaagtgtataatcacctgtacttgctaccaaagtatcatttacataataagaaatccatgaatcgtaagccactacttttaaagtatatttctcatcatccgttgcttttacttctttttcatcaatcaactgataatcactattttcctgccatcgccaaagcttgcatttatgcgaacctccatcgatatttaccgcatagcattctttattatcaagattattattaaaacggaaaattaatgttgctgcaccttgatttctcttaaatgttacgtctgtagaatatacaaaattcttagctgttgttttactgaatgcaaaacagtctcctttatcaactgcattgctgtacagaccatcttttgtttctttccaatcacctttcttataatcaaaacctgttaaattcgtttgatatccttgcgctgcctctttctcctgactatctgttgcagcatttacagtaatcgtttgatatcctgttactggtgttatggaggtaactgtaacagctcctgccatcattag

SEQ ID NO: 623 - DNA, 48972 bp, Unknown
  gut microbiota DNA sequence
aaggagccaaaggcgaactttcctataaagcaaaaaaggagcaacgaaaattcgttgctccttcaacttatgagcttagtatagccatatatgaccactctgtcaatatttattttaaggtcataccaatgctttcccgatcatctcaccctgcctgatctttgtctcacactggttcttggtacgttctaacagttcttctctgatctcaaccttatccttttctaataataaaatgatcgttgaacctccaaactgaaaatatcctttctcaatcccgcgcctcatagatccggctccatcgtgattaacaatctttccaaccatcaatgctccaacttccatctggagtgcatctccaaaatgttttgtcttcatcaatgtatattctctggtattctctttatagattttcacatgatcatttgcgatcggattgacggtatgataaactccatcaatcctatgattctcactcttaattccatcatcaaaatagcagtatctatgataatcatctactgtcaggcgtaagatcacggcataaccgccctgaaaatgtcttgcgatcttgcggtttctgatcaatgaatccaacgtatatcttgtatcctttacaacaaaagatgtcttctcttcgattggatacacacttactttacagtcgcaaggacttcctaagattgttttatcttccggaaatggacgttttccttctttgatctttcttgagaagaattcattataagatttgtaatttttcttctcatattcactcatatcaatatgattattcttgacaaatcctttgatcagacatttggagatgggagaacttaagaaagctccccctagtttggatacccaaggtctgattaatatttttagactggctcgtcctgccatagttgtatacatccaatgaagcaaacgatcttgcccattctcttcttcgtaaatattcccatctctatcggcatatctcatctacgattctcctatcatcttacagtaagaacatctttactgcgatcaatgctccaataactacaaatgcaagcatacatttcttatctggtttaaagactttaaaatcaaatacaaataagaaagcgatcactgccaacattgcaacatatatgtatggaaattcttctggaaagaatcttcgaagctgatatacgatcggaattatcagtgcaaccgatgtaattggcagtccctgataatgttttcttctggaactgctgtgtgcctgacgctgttcttctgtaacattaaaatatgccagacgaataactccgcctaaaacataacacatataaatgatccttgcataccattggtccattccaaggcagtaaccgatcacaaccggatacactccaaaacagacaagatcacataaagaatcaatctcgattccaaacttcttggcgtcttcacttctcttgatcatctttgcgatcgttccatcatacatatctgttaatcctgagatcatcaaacataaaattgcgatcttaaagtttccattgaatgcctgtgacattccaaatactgcactgacaactcctaaatatgtcagtattacagatgcattataaaatcctatcatacctttttccctctattctttacgctttatcgtaacatgtgcgactcctgtcatcactgcactgatcaataccagtgcataataactgattcctcggcttaatagcattgccggatataataatccgccaacaaaaatcttcttaaagatatttaaaaataagccttcactgattcccattccgcctggcaacggaagcatatccacagaaattgaaataacactctgtaaagcaactacatcaataaatcctaatgcagaaagtcccattgctctgtatacaagatatgtaattgaaaaatggatcagtctctgaatcaatgtgacaacgaacatccgaaaaataaaaatccgatgtccttgaatgattgctgctgctttatgatactcgatcatagaattctgaagtttttcaagacgttcttcttttttctttaaaatatggaacttttctaatttctgaaacagccacagcacgattttggatgctaacgttggctcaaatacaagaatcagcatgaacgcaacacaaaacacattcaatgccattccaaggtaaaagaagaatgctgccttcccaatatattctgccacaagaaaatgacggaataaaaagatcagtgctcctaaaaataccagaacaaatttatataaaatggtaacgatcatcaaaatgacggttcccacggatatgtcaactttatcgcggttcatgtagtaaagctgcattggctgtccgccagttgcagacggtgtaatacaactgaaaaagaaacctacaaacgaatatttgacgcaatttctcttcggcacatcattgtaatgaagcagccgtagcatgcgataaataatatacgactcgcagcacacaaacacaacgatcataaccaatcccgcaatataatatgcaggttttactgattttagaacttccgccagctcagaaagttcctttcctttcaatacggcatatgcagtcaatccaaataatgcaaagaaaaagactgtattaccgatgacttttttcttattcttcatctttcctaccctttgatctccgataattttcctttgtatttcacagattttctctctaaaccaactcgttggttgatcttctcaaacaccttccagagtccttgatacaaattggtctttcttccgatcagataacaaacttcacttaaaatgatcccgccaaacacatctatgatataatgctgcttggttacctgcgtggaaatacagactaaaattgcaaaaacaagtgaaaatctctgataccacactggaatcttcttctgatgcctgatcccaatataacaaaaccagcttaccagacagtgaatcgatggaaataagtttgccgattgatcgatcgaatacacaaatcgtaatgcctgatcccaaaatcctgttcctgtgatctctggtcttaccagtgttgttggcaaaaagacaaagaaaatcccacatacgatccttgacagataatctgctgtcaaaaatctatacatatgttctctactgattctcgcagtcataatgtagttcacaacccaaaacacataacatatcaaataaatacttgtaaattctgggatcaccggtaccatccggtcaaatgctgttgtaaaatcatgatgatataatcctttacaaagcaccattgttccactgtaaaccaacgtattcagtactaacgctgtgatcagcggaatgatagaatacttcggaatccatctcagaacataatcttttttctgattcatatgtctgctccttccaatgatctatcctctttcttttctctcttatggttcttccatatatcaaagaatcatgtcaattctgacatgattcttgtactattatatcttttctctttttaaaagtaaaggaaagcggtcatatttaatagttttgtaagatttactctgctttcttttttcttctattgaagagtccataaatacatggaaccactaataatgttagtaaagttccataaatcaaaccaccgatcgtaacgatcgccatcggctgcatcatctcggcaccttgccctaaaccaatcgccattgtagataatccaagaatcgttgtaagggctgtcatcaagatcgggcgtacacgcatcgtacctgctgtcaggattgcttcttcaaattcgtatcccgattctcttaactgattgatcgtatctaccaacacgataccattatttacaatgatacctgcaagcataacaaatccgatcattgcgatcgcacttaagtcttttccagtgatcagcagtcctaagaatcctcctgtaaacgccattggaatcgtaaataaaatgataaatggcgatttcagtgactggaactgtgctaccatgatcaaatacataaatgctactgccagcaataacatcaggccaatctgtcctgttgtttcctgaatggattccatctcacctttcattgtaatactgtatccttttggtgcattgtatttcttaatcttcttttgtacagcgctgctgacttttcctacattgtagccatctttgatctctgatgttacactcaatgttctttcctgctggtttctattaatagaagataaactgtcactatttctgaagttcgctacctgatccaatgtaacttctttttcttttccacttactgttcctgtaagtttcactttcttaagatcatctcttgtcagtgtattctttgcactatttccaacattgacactatactctttttcattgatcgtgattgttgttgcttcactggcatcttttaatttctcacttaactgttgatagatcgttgcaactgttaaaccattttttactgcctttttcttgtctaccacaacatgaagatctggtgttgtctcttcacttccattcgagatgttctgtgttcctttcgtatcctctacaatctgggcaatatcttttccaatagaccttagtttatttaaatcatttcctttgatctgtacggaaataccgcttccaccaagtgcactcatatccatactggattcctgcacttcaacctcacaatcaaatttctttgttttctttaggatttctttcttgatctctttgtttgtatgtttcttcttttcttttaataaaacatacatactggattggtcttcatttgaagatcctcctgatgtcattgaagagattccggaagagccagaggatatcattcctgctacactatcaacatctttgatctcttttactttcttcattactgtatctgtcattgatgctgtttcttccattgaagatccctgtggcattttgatcgtcatcgtcatctgtgtgctgtccatgcttggcattaaagaacttccaatattcattgctccaaaaatacttcccgcgaatagtgcgagtgttacagctactacaataatcttacgatttaacaaccttgtcataactttacggtataatatctgcagtttattgatcactttactatctttttgtgtgactttgttgagtactccagctgacatcattggcacaaatgtcaccgctacgatcaggctggctaccagagagtaaccgatggttagtcccatatccacaaagagctgttttgtaagccctgtcgtgaatacgatcggcaggaatacagaaattgttgttagtgtcgaagatgtgatcgctcctgcaacccctcttgctcctgtgatcgctgcttctttaactggaactccttcttttcttaatcgatagatattctcaataactacgatcgagttgtccacaagcattcccactccaagtgcgagtcccgacaaggagattacatttagcgtaattcctgtaaagtacatcaacaccaccgcaaaaatgacacttaatggaatggagcatgcaataacgatcgtcggtctgacgtctttcaaaaataataataggataaagactgcaaggattgctcccattaacagattctggatgacagaacctgtcaccatatcaatgtatacaccctgatccataatattaacataatggaatcctttattttctttggtaagtgtcttcatcttcgctgcaactttgtctgctacatcagctgtagaataattattctgtttctggactgttaatacaacaccgttatttccattcacacgacaatatgtatctgctgagttatctacaatcgctacgtctgctacatcacaaagtttgaccggtgggattcctttgattccaagatctaataattccatattggcaagatctttttgattcgtcaccttatctccaacacgtaccagatactgtgtattcccttcactgatatatcctgccggcatctcaaagttctgtgctgttaacagtgctttgacattcgcaactgtcagcttattcttaatatttgcagcttcttttgcctgctctttactggaatcaagttgctgctggctggaattcaactgtgcttctccctgtgccagtttgatctccccatcattcatcttctgggttgccgttgctgattgtacattaaactgtgtcagtttagaattgatcgttttctttccttttttgatctgttttaatgcattgtttaatgtttttaaattcttatccaatgctttgatcgaactttttgctgttgtctcctgctttttcagttcttcgatctgagccgcaagctgcatctttgttgctgcatccggaacttgttttgcctgttcttccatcttggcgatctgtgtttttaatgtcttgagggatgtctgcaacgattgtttctgcaccttcaaattcgtgattgaactcgttacctgcacctctttctgagcaagacttaactgtccatccgtaagtgcagtctgagctttcgcaagctgagtattagcctttgttctctgtgcatctaatgtgttctttccagattccatctgggctcttgcctgatcaatcttattttgagcttcatcaaactgaccattcaatgccttctcgatcttctcatttaatttattgatcttcttctcgctgatgatcgcattgatctgttctgttacaagtcctgtactacttacagatgcgactccgtcaacagcttctaaagatggtgcaatcttatcattgatcaactctgataattccgtattacttaacttatcagaatccatagctgttaccataaccggcatcatatctggatttaatttcacgatcgttggattgcctacttcgtctggccagtagcctttgatcatgtcaagcttctctctcatatcaagagatactgcattcatatccgtgtcaccttcaaattccaaaatgaccattgacatattctcactggaaattgaattaacttctttgatatttgaaatcgttgccattgattgttccactggttttgtaactgtcgtttccacagtctccggagatgctccctgatatgtcgtcataacgattgcatatggcagttccatacttggaagcaagtctgttgtcatctttgtaaatgatacgattcctaaaatgataactagtacaaccgctacaatgactgtatacggtttctttacgctgaattttgagatcattttcttacctttctcatatttcttttcttattccttatttgtctcttttgattactattttgataaccaaagtaatttaatgatattcctgtttcttaaagaagtcaatcacttttattgataattgtcaattaatgtatcggattgtgaactttttttcacacaacaaaaagaaaccagaatacatcttcttatgtactctggcttctgtatattcttgatctcttattctacactgtagtttggtgcttcttttgtgatatggatgtcatgtggatgactttcttttaaggatgcagcagaaatcttaacaaattctcctgtctcctgtaatgtcttgatatcttttgctccacaatatcccattccagaacgaagaccacccatcatctggaagattgtgtcttcaacagttcctttatatgcaacacgtccttcgacaccttctggaactaacttcttagcgtttgtctggaagtaacggtctttactaccattctccatagctgctaaggatcccattccacgatatactttgtattttcttccctggtataattcaaagtctccagggctttcgtcacatcctgcaagcatacttcctaacatacatacatcagctccagctgcgatcgcttttgtaagttctcctgaatatttgataccaccatcggcaataattggaattcctgctttcttagcttcttcatatgcactcatgatcgctgtgatctgtggtacaccgataccagctacgacacgagttgtacagatagatccaggtccgataccgatcttcacacagtcagctcctgcttcgatcagtgcttttgctcctgatcctgttgcaacgttacctgcaatcacctgaagatctgggaatttgtctttgaccattcttacgactcttaatacgtttgcagaatgtccatgtgctgagtcaacaacgataacgtcaacatgagcattcactaatgcctgcacacgatctaaaacgtctgctgtgataccaacaccagctccacataataatcttccctgatcatctttcgctgcatttggatatttgatctgtttctcaatatctttgatcgtgatcaatccttttaaattaaagtcatcatcaacgattggtaatttttcttttcttgcttttcctaaaatctgttttgcttcttctaatgtaattccttctttagctgttactagtccttcagaagtcatagattctttgatcttcttagagaaatctgtctcgaactttaagtcacggtttgtgataataccaacaagctttgtaccttctgtaattggtacaccggaaatacgatacttcgccattaagtcgtcagcatcctgaatggtatgttctggtgataatgaaaatggatctgtgataaccccgttttcagaacgttttaccttatccacttcttctgcctgttcttcaattgacatgttcttatgtataataccaattccaccctgtcttgccattgcgattgccatgcggtgttctgtaacagtatccatgctggcactcatcagtggaatatttaactgaatcttgtttgtcaatcgtgtacgtgtatccacatcattcgcaatcacttctgaaaatgctggtactaataaaacatcatcaaatgtaattccttcaccaattaacttacccattttcttgttttcctcgctttcttgtattttaatatctgatttgtattgttagatatgttaacaaatagtttctttgatgtcaacagattattttatactttttttaaaacgtatggattattttctgtacatgtatgaaattatctgaatattctaaatatagcaatccacactttacatctttttaagtacaagaaaaggaattactgctttcacaataactccttttctatgatcttgatatcaatccgcttgatatctcttgtaatctctactcttctacgatagaaattttacttccaatcgcaagttttggcattggctttgcctcaacacaaatacttccaggaagacctgcttctttcgctccactgaagacaacggttaaatgtcccagtgtctccaaattagactgggcaatatctcctacggcagtgatgagatattctttctgatccacaaccagtttatctccttttttgattgttccgtctaccttcttctgatcgatgaaatgacagaaatcttttaatgtatctggtacattgtctccgaataatacaaacataccttcctcaaaaaaagcatctacctgttctcccagttcgataatctcagtctgaaatattgcttttcccatttggaatcctccttttatttaccctgtaatttctgatcgattgctgctgctgctttctttcctgctcccatggcaaggataactgttgctgctccagttactgtatctccacctgcgtacacaccatctttgcttgtctccattgtctcttcgttgacaatgattccaccccacttctgagtgtcaagtcctggtgttgtgtgacggatcagtgggttagggctctgtccgatcgcaatgatgactgtatcaacatcaagatcatagttagatccttcgattggctgtggagaacgtcttccagatgcatctggttcacccagttcctgtttaatgatctccatgctgcttacccatccgttttcatctgctttgatcgcagctgggttatttaagaatttgaagataattccttcttcttttgcgtgatgtaattcttctaaacgtgctggtgcttcttcctcgctacggcgatatacgatataaacttcttctgcacctaatcgttttgctgttctggcagcatccattgctacgttaccagcacctacgactgctactttcttaccaactttgactggagttgggcactctgggaatttgtatcccttcattaagtttacacgagtcaagaattcatttgcagaatatactcctaagtggttttctccaggaatatttaaaaatcttggaagtcctgctccacttcctacgaagactgctttgtatccatcttccattaattcatcaattgtgatagaacgtccaacgataacgtttgtttcaatatctacacctaacttctgaacgctttcgatctcttttgctaccagatcttttggcagacggaattctggaataccataacttaatactccacctggtttatgtaatgcttcaaagactgttacatcataacctttcttgatcagttctccggcacatgtgatacccgcaggtccacatccgacaactgctactttcattccgttcttctcaatattaacttctgtttctttggcgtttgccatatgccagtctgcgacgaaacgttccatacgtccaataccaacaggctctcccttgataccacggacacattttccttcacactggttctcctgtggacatactcgtccgcagattgcaggtaatgcattctctgttgtgatcacttcgtatgcaccttcaaaatctcctgctgctactttctcgataaatgctggaattggtacgttaaccggacatcctccaacacaaggtttattcttgcagtttaagcaacgagctgcttcttccattgccatctcttttgtatatccaagagcaacttcttcaaagttcttattacggacatttgggtcctgttctggcatagctaccttcttaagactcatatttgccatcgtttacatcccccttccaattctacattcatgttcttcttctctgaacataccctgacgctgcatacattcgtcaaagtttactttaaatccatcaaaatctggtccgtcaacacatgcgaattttgtttctccaccgatgttgacacggcatccaccgcacattcctgttccgtcgatcatgatcggatttaaagataccatagttgggatgtcatattcttttgtgatcttaaccacattcttcatcatgataagtggcccgattgcgataacttcatcgtattttactccagctttgatctggtcttctaatactgttgtaacgaaacctttggttccaagacttccgtcatctgttgcaatatatacattatcgcagaattcttcgaataattccttaagaataacaaattctgcactcttaccaccaatgatcacatcaactggtactcccatcttcgctaacttacgaagctgtggatataatggggctgcacctacaccaccggctacaccgatgacacggtcacacttgtgcaaaggagctggctgacctaatggtcccacgaaatcctgtacataatctccttctgctttcttgcttaacaattctgttgtatatcctacaacctgataaatgatcgttactgtctctttctcacgatcataatctgcgatcgttaaaggaaccctttctccatcttcatctactcggataataatgaactgtcccggttcacattttcttgccacataaggagcatgaatctccattaactcaactgcctggttgagtgtctgcttcttgacaatcttatacaccacgtacacctctttcttaaaatatcttctttttattatacatggaatctgcacaataagaaagtatttttttatttattttttgtcggcaataaaattatataaaattttattttatgttgcgatatttaatgaaattttattttatgtttttgttgttttttatgtaaaaagcagcataactgctttctttgctgccatgctgcttactttctacattattatagagctctacattattatagagctgcttcgtaaatacttacaatatcttctttactcaatggtacaaaagatcccttgcatccatcggccgctttctgtgccataatgtcaaaatattctttatcaattccaacatctgttaacgtctgtggaagtcccatcttcttaaagtactctctcgtatatgcaattccttctttggctgctgccatgtcatcgtcatttacaacatcccagacatttcttgcatagtctgcaaatttatatgctgtatcatcattcaatgcaaattccatccagtgaggtgttaagattgctaatccttctccatgtgtgatatcgtagaatgcgcttaattcatgttccattggatgtacacaccatgcgacttcagctccatattggatcattccgttaattgccatacttgctgtccacatcagattagctcttgcatcataattgtctggttcttctaaagcaacaggaccatatttaaaacagttctttaacagtccttccgcaaatcttgcttgaacatctgcattcttcacattggtaaagtaattctcgcaaatatgactgatgatatctgctgttccagccgctgtctgtttttttgatacagaataggtatattccggatcaaggattgacatctttggtttcatatgatcacttgcagttccccatttttcattctttgacatatcggagataaccgcaaatttatccatctctgatcctgtggctgataatgtcaggacactgtaaattggcaatgctttcttgatccatcttggtgtaataaccagatcccatggatccccatcatagcaagctcctgccgctacaacctttgcacagtcaatgacagatcctcctccaatagcaagtaccatatcgatgctgttttctttacaaagttttacaccttctctaacagattcaatctttggatttggtgcgattcctgataattcaaagatttccatatcttcttcttttaaaatcttgactgcttcgtcataaattcctgcttttttgatacttccaccaccatagcatagtaaaactttgttaccgctctctgaaagttcactaagatgagaaatctgtccttttccaaaatgaatctttgttggaatagaatacgtaaaattgttcatggctacctcctgtttttagtgtttcatttattcttcgtctaacatgacactgaccctgtacattccaggtttgcttgcctcttcataagcttcctgcagtctgcttagtggaaatttcttctcttctaccaatttagacacatccacagccttggtacttaatgcttgggcagcttctttgaagtcttcatgatctgccccgaatgtcccgatcagttccatctttctatagtgtaacatatttgagtcaactttcaactctggaactggatatcctgccgcaaataataacattcttccatcattttgttttaacatctcaagtccctgactgttggcactggttgctccaacagctacgatcacagcatctgctccaattccttccgttaactcttttaccttttctacaggatcactttcattacagtctatcacttcaaatcccatcgctttggctgtctcaatcttcttagggatcatctctgatacgatcacacgacatccgtaagctttcgctgtctgggcgttaattaatcccatagttcctgcaccaatgactacaactgtttcaaatggctttaatcttaatttgtcggtttgtattccttttgggcatagtctttgttcttatgacaaacttacatttcatgatctgaatggttataattggtaaaatcttcgactttgttttgtttttctacgaattatgcttcttatccggatgagattttaaatgatcggaagaggattccgatcgtgaatgattgtgcgaatgtggaatattgggtagtttggaagaaagggaagacgtatcgattttagttttttatggagaaaaaaaatcctgcagaaattcattcgaatttctgtaggatttttgatatttagtctttgagtcgcttcgctccctgtagacgcccactcaactaagctcatctttcgcctgtggctcggattcgctaaggttcgggatcggctttctcactaagttcaaacttcgcttgtcagcttgttttcactaagtgttcaatgcctacatcattcccattccggctggtgctcctgctggcattgctggggcttcttctttgatattcgcaacaactgattctgttgttaataatgtagaagctacggatgttgcattctgtaatgcgcttcttgttactttggctggatcgatgattcctttttctaccatgtctacgtattctccatgtaatgcatcgaatccttttccgatttctgcttcttttactttattgacgatcacagctccttcaagacctgcattgactgcgatctggaataatggtgcttctaatgctttgaggatgatgtttgctcctgtcttttcgtctccttctaagtctgctactttctcagctgctttcttagatgcatggatataagcagatcctccaccgaagatgattccttcttctactgctgcttttgttgctgctaaagcatcttccagacgtaatttgctttctttcatctctgtttctgttgctgctccaacacggattactgcaactccaccagataatttagctaatctttcctgtaatttttctttgtcgaattcagatgttgtttcttcgatctgtgctttgatctgtccaagacgtgcctggattgcatctttatctccttcaccgtctacgatgactgtgttttctttttcaactttgacagattttgcacgtcctaactgatctaatgttgcgtcttttaattccagaccaacttcttctgagatcactgtaccacctgttaagatagcgatatcttcaagcattgcttttcttctgtctccatatccaggtgctttcactgcacatacagagaatgttccacgtaatttgttaacgatcagtgttgttaatgcttcaccttcgatatcttcagcaatgatcagtaatttcttaccactctgtacaatctgctctaataatggaaggatttcctgaatattagtgatcttcttgtctgtgatcagaatatatggatcatctaattcagcaaccattttttccatatctgttgagaaatatgctgataaatatccacgatcaaactgcattccttctactaaatctaattctgttttcattgttttagattcttcgatcgtgataactccgtcgttagataccttttccatagcatctgctactaattctccaacttcttcgtctgctgcagagattgctgctactttcgcgatctgatctcttcctgtaactttgctactcatctcagcaattgcttcaacagctgcttctgtcgctttcttcattcctttacgaagaatgattgggtttgctcctgctgctaagtttttcattccttcgttgatcattgcctgtgcaagaactgtagctgttgttgtaccatctcctgcaacatcatttgtcttagttgctacttctttgactacctgagctcccatattctcaaatggatcttctaattcgatttcttttgcgatcgttacaccgtcatttgtgatcagtggtgcaccaaaggatttgtctaatacaacgttgcgtccttttggtccgattgtaactcttactgtatctgctaactggttaactcctgcttccagtgcttttcttgcttcaattccgtatttaatctcttttgccatgatcttcattacctccgactaaattttttaatgaaattaaataattgtgtattataataaaactattctacaactgctaaaatatcattctgttttacgatgatatattcttcatcttctaattttacttctgttcctgcatatttagaataaataactttctgtcctacagaaacttccatcttcacatcttctgttccaggtccaactgcaacaacttctgcttcctgtggtttttcctgtgttgctgttgtaaggacgattcctgacttagttgttgtttctgcttccagctgttttaatacaactctatctcctaatggtgttaacttcataatgatattacctcctaaatatattagaattattgttctttttatcttttgttagcactcgcttatatcgagtgctaactctatgttctttagtataacaccagacaaaaaaaatgcaaccccctttttataaaaaatccataaactgagattgcattctttggtattttacttattctttgatgtatttttttgcttcttctgaacttcttgttggaacagtctggaaatatacatgtacatgttttttgatcagttcatgaatagcttccatctccatggcatcacacgcaactcttcttgcaactgctttacgttctccacgaattcccatacctccgatattaagctgattgatcttgattcctcgtttgatcaattcttcaaataccagtggggattctgcaattacgatcacccgctctccatcaaaggatggggcttcttttaatttctccgttgcacgatcgatcccatatacatgaattataaggccttggggcgccatctctttgatcactttgcttcggaatttatccttcgccacaacatcatctacaataatgatcctgttcgctctgacttccggcacccataatgtcaaaatctccgtatgtatgagcctgtcatcaactctcgctaatacaatgtttttcattcttctacctccttatataattcacgcacatctttcactgtccctggcgctgccttaagaagatctttgcacacctcttgtgcgctctttcccgcgtaacgtcccataactacttccatcatcaacggaagattgattccagttacgtggtagagatcgtattctgacattaaagaaattaccgtattaaacggacttccataaaacagatctgttaatataaggacttcttctccttctgatgtctgttcaatactctctctgatcttctctctcaaagtatccactgattcttctggttcaagcccaaatgcctcaaggtcttcctgttcccctgcgatcatctgtgctgtatccacaagtcctcttgcataacttccatgagataccacgattaccttcatcaattttcctctcttctctctcatcacatcttgcctgttacggcaaatttgattaatttggtttgtaagaactctttaagcttacaattctattaaataccatgtgttcttttgtagaatctttggaatctaaacagaaatatcctgttctcataaactggaaactgtcttccttatcatatttctctaactcaggctctacatatgcttccttgatcacagtcagtgaatttggattcacattgatacttccatcttcattatatacacctttttcttcatctacaatgttttcatacagacgaatttctgcttttttcgcagttggtacagatacccaatggatcgttccgcgaacctttcttccatctggactgtttcctcctctggattctggatcatatgtcgcatatacacaggttacattgccgtcctcatctacatcgtaccctgtacatgtcacaaaatatgcattcatcagacgtacttcattacctacatataaacgacggtatttcttaggcttttcaatcttgaaatcttctcgttcgatatataattctcttgaaaatggtacctgtcttgttcccatctcttcgttttcctgattatttggaacatcaacgagttccccttctccttctggatagtttgtgatcaccagtttgatcggatctaagatcgctgccatacgtggacgttttaatttcagatcatcacggatgcagtattcaagcatcgctgaatctacagagctgtggctctttgcaactccgacaagttccataaacttcttgatggattctggtgtatatcctcttcttctaagtgctgataatgataccagacgtggatcatcccatccatctacgattccatcttctaccagtttcttgatataacgttttcctgtaacaacatttgtcagatataacttcgcaaattcgatctgttttggtggattctcaaattcgcattcgttaacaacccagtcatacagtggtctgtgatcttcaaattccagtgtacagatagagtgtgttaccccttcaaatgcatcctctaatggatgagcaaaatcgtacattggataaatacaccatttgtttcctgtattatgatgttccattcttgcgatacgataaagaattggatccctcatgttgatatttccagatgtcatatcgatcttggcacgaagaactttgcttccatctgggtattttccttccttcatctcgcggaataactgtaagttctcttctggtgtacggtcacggtatggactgttctttccaggttctgttaaagttcctctgtattctctgatctgttcagcattcagatcacagacatatgcttttcccttcttgatcaggaattctgcacattcatacatcttgtcaaagtagttggaagcataataaatatgttcgtgataatctgctcctaaccattctacgtcctctttaatagaatttacatattcttccttctcttttgttgggtttgtatcatcaaaacggaaatggaaatctccgccatattcctgagccagtccatagtttaataagatagattttgcgtgtccgatatgaagatatccgtttggttctggtggaaatcttgtaactaccttcttgcaatgcccttcttctatatctttttctatgatctgttcgataaaattcttagaaatcgtttcttccatgtcttcctccatatagttttttctattctgattataatgtatcttctatacacttgcaatcatataatttctgtatcattgtgaaatacagataatccttctatataagatctaatgcctccatgacatttgaaactcctacaagtctcatgtctgtctggaccttgatctgatctacattcgcctgaggcagaatgcatcgtttaaatcctagtttctgtgcttctttgatccttgcttctccacctgatacggctcttacttctcctaccagaccaacttctccaaaaatgatcgtatcttctaagatcggccggttcttataactcgatgcgattgccataataataccaagatcgatcgctggttcgccaagtttcatacctccagccagattcacatacgcatcacagccgccaagctgcagtccaactctcttctcaagcactgccatcaaaagattcaccctgttataatcaattccaactgctgttcttctcggcatctgaaagcttgttggtgataccaatgcctgaatctcgatcaggatcggtctggtcccttccatggaacatacaacaacggatcctgacgcatcaagaggtcttccattaagcatcgtctttgacggattctccacttctacaagtccattgttacacatctcaaacacaccgatctcgttcgtggatccaaaacggtttttgacacctcttaagattctgtatgccgcttctctttccccttcaaaataaaggaccgtatctaccatatgctcaagtgttcttggtcctgcaaccactccttctttggtcacatgtcctacgataaaaactgcgatattattctctttcgcaactctcatcatcgctgcagtcacttctcttacctgagacacactgcctgctgccgaggaaagatcctcgctgtacattgtctgaatcgaatcaatcaccgcaaattctggtttcgtctttaagatcgcattcgtgattgcatcaagatctgtctcacaatacagaagcatctcttcttcaaatgttccgatcctctctgctctcatcttgatctgatgcatagattcttccccagaaatatacaaaaccttacgtttgctgttcgcaagattcctgcatacctgtaataataacgtggatttcccgattcccggatctcctccgaccaacgatagggaacctttgacgatcccgccgcctaacacacggtccagttcatgaattcctgttggaatccgctcttcattctctactgttacctcggatatattcataggagaggcagaagtctttaaagacttcgcccctccttttttcgtttctgtaactttctcttctgtaaaagtattccactgcttacaggcaggacactgccccatccacttggaagactcatgaccacactggctgcaaaaataaactgtcttttgttttgccattggtgctcctttatgttactactgtttctttacacgaacagctgctgctgttccctcgcttaactcaacactcagagttagttttcctccaagatttgctttcatcattcctacattcgtattatcaataaaaactttatattcctgtccggcttctacttctaaagtaacctggacatcagatgaagattcaatctcaaatgcaactccatctgttgttgcaacaaagttatgtactgctgaacctggaactgattcaaagatcagctgtccgttcttgtccagttttgtcattgtcttgaaagtcttgatcttatagatatctccttcaaactggatatctcctttcttcgctttctgtgctaatgtatagtcaccaaagctaagtgttccattgtcttcgctgcggaataattcagttaccactgccattgtcttttcctcctaatatctgtttcggtcgtcgtatgtatattataatatatttcagtattatttactagttttcctttaccgaaaaagtaagttttttatcttttttaccaatcgtcatcgtctgtccattcgtaagggttccttctaagatcttatctgccagtacatcttcaatctcattctggatgatccttcttaatggtcttgccccataattctcatcatatcccttatctgctaacagatccatcgcaccagatgtgatctttaatgtgatctgatgttctcttaataaacgggctctcaattcatccataaataattttgcgatcttcttaacttcttcctttgtaaggatggcaaatacgatcgtctcatcaattcgatttaaaaactctgggcgaaagatctgtttcacttcttccataacaccctttttcatacgttcatgagtcttggctttatctgtatcatccatagaaaatcctaaatgttttggtgcaatgatacggtttgcacctgcattggaagtcataatgataacagtattcttaaagtcgacttttcttccattggaatctgtaatatgtccgtcatctaatacctgaagcaggatattaaatacatcaggatgagctttttcgatctcatcaaaaagaaggacagagtaaggatgtcttcgaatctgttcactcagctgtccgccttctccaaatccaacatatcctggaggagatccaatgatctttgatacactgtgcttctccatatattcagacatatccacacggatcagatcttcttctcttccaaataaagcttttgctaatgtctttgacagctctgtcttaccaactcctgttggccctaaaaataagaatgatccgatcggacggtttggactcttaagaccgactctgcttctcttcacagctttggcaactgcattgaccgcttcatcttgcccgatcacatgtttgtgaagttctttctctaaatgtcttaatcgttccatatctccctttgtaagctgtgttactggaatctgtgtccataaagaaacgacttctgcggcatcctctgttgtcaattctggaatctcattttgcttcttctgatttctcttcatcttacgttccagagatttctcaagtttgttcttctctttcttaagctctcttgcttctgtaatatctccatcagaaagcgctgcttcgatcttctctatgatctccctgatctccttgcgttctttcttaaaacctgcatgacttccaagctgttccattcgtttccttgcacaggcttcatctaacagatcgatggctttatctggcagaaaacgatcactgatatatcgatcagaaagagaggcgatcgcctctgccacatcttctgataccaggatcctatgataatcttcaaaacgatgtttgatcccttttaagatcgtgatcgtttcttctacggttggttctttcactctgactggttggaatcttcgaactaatgctgcatctttttcaaaatattttgtatattcttcactcgttgtcgcaccgatcagctgaaaatctcctcttgccaatgctggttttaagatattagatgcatccatagctccctcagaacctccagctccaatgatcgtatgaatctcatcaataaacaaaataatagaatcatcctgtgttgcttcggttacgatacgtttcattcgttcttcaaattctccacggaatttcgttccagcgatcactttcgtaaggtctaaggacaaaatcctcttattcttaagaattcttggcatattgccttcggcgatcctttgtgcaaggccttcaacgattgctgttttaccaacccctggatcaccgatcagacatggattattctttgtccttctgcaaaggatctgcatcagacgttccatctcactttcacgtccgatcatcggatcaagcttcccaagcatggctttctctgtcagatctgtactatactgaagcagcatatattctcccgctccatcttccatatcaccgccatcagagattgcttcattatattcattcttcgcacttctgaaatcaattcctgcagtaactaaaatatctgtatagattccttcggatgaaatcttatgatcttccagaaaacggaatgcttcattatctccatctttgatcatcgccatcaagatatgttctgatccgatcgcttcacacccgtatttcattgcaagttctcctgcaatttctaacaggtattctgtcttcggagtatccattaccgttcttcttcggtcttttggcatctttgacttctctttgatcgcttcttctattaattctcttgtcactccgtgcatcttgagcacttcacttgcaagagatccgtctgccccataaagtcctagcagaacaaaaatactgctgacatctttaaatccaagatatccagcaatctctcgtccttcattcaatgctttggaggcatattttgtaaatggtaatcggttcataattcctcctgttattactttctgtctaatttctggtacatatcatgaatcaaccggttcatctcgtcttctgtaactcctttacagacagcttccgcaactaacatccttaaattcccctgaatgcttgctaattcctgctgtttttccaaagtttcaacacttatgactgcaccttttcttcggtctagtttcaggtatccttcttctcttaagatcgcataggctttgttcaccgtgtgcatgttcactccaagcacctgtgctaactgccggacagatggaagtgattctccatcagcaaattctgcacatgcgattcccataatgatctgatttcttaactgtacatagattgcctcgtcactattgaaatcaatctccagtatcattgtgcaacccttctttcctctttcgaaatttacaacttatctatgatattttgttatacatagactataatataaagcacagtctgtcaagagcttctcttccagatgataaagaaaaagatgcagtgtaaaaaactacatctttctcgtctatttttcattcagatctaaaattctttgatttgcacttcctcggaattttaatgtgatatctttctgggattcgataaactgtccatcaactagcgtatcaatataagataacatctcttccgtaaactgtgtgtatactttaccaccttcgagcaaatccttgtcataagtatatcctgtatagcaccagatattcttctttggataattttctttgatctcttttaataatctaaccagttcttcctgattctccggttcaaatggttcccctccaagaagcgaaaaaccttcaatataatctggctttaacaattccatgatatgatcttttgtctccgtcgtaaatggctttccataacaaaagtcccatgtctccttattaaagcatcctggacaatgatttcggcagcctgatacgaataagctgactctgactcctggtccattcgcaatatcacattttttaatttctccgtagtgcatatgatctcctctgtcatcgtgtcttataaatgaaggactcgatccttgatctcctgtgtacgtccctgattccagaactgtgttccgatatatccacaagtacgtcttgcaacaaacatatgatcctgatctgtatttccacagtttggacattcccagatcagctttcctgattcatcttctttgatctgaatctctccgtcgtatccacagcattcacagtaatcactctttgtatttaactctgcatacatgatgttatcgtaaataaatttcatcacagataagacggctggaatattatcctgcatgtttggtacttcaatgtagctgatcgctccgcctggagataatttctggaattctgactcaaatgccagtttgctgaatgcatcgatctcttctgttacatgaacatgatagctgtttgtgatgtagttcttatctgtaacccccggaatgataccaaaacgtttctgtaagcattttgcaaacttgtaagttgttgattccattggtgttccgtatacagaatagctgatgttctctgctgccttccattcattacatttatcatttaatttctgcataacttttaatgcaaattcttttccttcatcggatgtatgagacttgcctgtcatgcgaacacacatctcataaagtcctgcatatccaagggaaatcgtggaatatccatcgtataataacttatcgatcttctcgcctttcttcagtctcgcaagcgctccatgttgccaaaggatcggcgcaacatcagataccgctccctttaatctctcatggcgacatcttaatgctctgtggcacaattccagtctctcttctaagatgtcccagaatttatccatatctccattagaactgcatgcgacatcaaccaagttgatcgttacaacaccctgattaaatcttccatagaacttatgacttccatctgcatttctctgggaatcttcaaccgttaagaaggatctgcatcccatgcaaggatatacttcaccatttttcagttctctcatcactttcgctgagatatagtctggaaccatgcgttttgctgtacattttgcagctaattctgtcagatgccaatacttggaatctggtgtgatgttatcatcatctaatgcataaataagttttgggaaggctggagtgatccagactcctttttcattcttaacaccctgaattctctgtttcaggacttcttcgatcacaagagccagatcgtctcttgtctgtccttctggtacttcgtcaagatacataaagactgtgacaaatggcgcctgtccattacatgtcattaaagttaccagctgatactggatcgtctggattccctgtttgatctcatcatacagacgcatctctgtaatcttgtcgatgatcgcatcatccatagattctccgatcactttacgttccttcacgacattcttacgcagcttctttcgactgatgtctacaaatggtgctaaatgtgctaatgtaaaagactgtcctccatactggttgcttgcaacctgagcaacgatctgtgttgtcacattacatgctgtaaaaaatgaatgtggtttctcgatcaatgtctcactgatcaccgttccattctgaagcatatcttccaagttgatcagatcacagttatgttctctctgtgcaaaatagtcagaatcatgaaaatggatgattccttcttcatgagcacgaatgatctcatttggcagaaggacacgtttacttaagtctttgctgacttctcctgccatataatctctctgcgtggaattgatcactgggttcttattcgaattctcctgatttacttcctcattaatattatcaagtaaagaaagaattccatcatcggtcgtatttgattttcttctcagttctctcttaaaacggtatcttacatacttctgggcaacttcatatcctctcatctccatgattcctgtctcgaccatattctggatatcttctacattcaccgcatgagaagagtttgctacctgatctgcaaccttctctgcgattgccatgatctgatactgattcatctgatggatctttgttacctcttcattcgccttcgtgatcgcattgatgatcttatcgagatcaaaggttacctcctcaccgtttctcttgataatctttgtttttacatcaccattcatagtttctccctcatttatataaaattacaagattctgtgtgtttccattttctgacacaaaatcttgttgtcgttctaccaatcagcactatatcttgtgtcattgcctttattatattacactctttttcataaaaaagaaagagctaatttttcattttagagaatatgaagatgctcaaacagaatcttaaatcccaaaagtatcagtattatgccacctgcgagctctgccttggatttatattttgttccaaaaatatttccgatctttactcctgcaaatgaaatcaagaaagtacagactccaatcatcgacgctgcggatacaatatgcacatttaaaaaggcaaatgtgatcccaactgctaatgcatcgatacttgtcgcaacagcaagcatgaacatttctttcactgcgatcgaatcatctgcctgttcttcatcatttgataatgcttctttgaccatattgattccgatcagcccaagaagcacaaatgcgatccaatgatcgatcgatgtgatctggtctttaaactgtgttccaaggaaaaatccgattgttggcatcagtgcctgaaatcctccaaaccataaaccaacaatgatcccttttttcaaaactttttctctcatcgccagtcctttgcagatagaaacagcaaatgcatccatcgccaatccaacagccagtgttaataacgtaagtaaatccataaaaacgtcctccatatcgtaagtttttcatatcataggggattccattggaatttcctatgatatgaaaaagacccacagacgaaagccttgttataaacaaaagcttatcgtctgtgagtctcgttaattaagacagcaccagatgtcgttcatcattatgttgatactgtcacagattctctgctaactactccctcacggaaatatctataagatcataccggatgtgcttccggcaaaatgtgcctatgtatcatatctcaactgagaatctttgtcaatatctttcctttaatttttgattacgtttttcaagatctaacaggtattctttcatttccagaccacctgcatatcctgtcagtgaaccgttcattccgatcactctgtgacatggaacaacgatcacgatcggattcctgttattcgccatgccaacagctcgacatccttttggaatccctactgattccgcaatgtctttgtaagtacaagtttccccatatggaatcttctccaatgctttccatactttgatctgaaattctgttccatgataagaaagtttcaggtcaaacttctttctccgcccatcaaaatactgtgataattgcagtgctgcttccctgatcaattctgtattcttcttctcgccttctaatatcttcgtcccaaaatatatcccgcaaatgccatgcccatcttcctcaatcgttaaattaccgattggaaaactataatcataatagtacctcatatgacaatcctcctaaaaataggtataccatattcttccatggttggcaaggactaacttgacatgtacatatttcttgcgtacaatgaaaagaactgtataaaaatgaacagatatttattttaggaggaattttcattggaccccagtatgatattacagataatcgcaattatcattttattaatgctttctgcttatttttcatctgcagaaacagcacttacaaccgtcaatccacatagtatgcgtgccatggcagaagatggcaataaaaaagctgctattgttttaaaattgatcgagaatccaagccagatgctttccagcgtcttagtcggaaataaccttgtgaatatttcattaacatcccttactacaacgatcgctattcgtatctttggaagcatgggagccggaatcgcaactgctgtgatcacagtacttgtattgatctttggtgagatcacaccaaagacttttgcaacgatcaataatacaaaacttgctctaagctatgcttccagcatttatctgatcacaaaattactgacaccggttgtttacattatcaacaaactttctacagcgatccttatcatcttgcggatcgactcgaaacaatccaaacgtatcatgactgaacgtgaacttcgtacgatcgttgatgtcagccacgaagaaggcgttatcgaagaatctgagaaagatatgttaaacaacgtttttgattttaaggaatctcttgccaaggatattatgatcccgcgaattgatgtaacttttgtgtctgtagatgcttcttatgatgaagttcttgatattttccgcgaagccggttattctagacttcctgtttatgaaggaagtaaagatcatgttgttggtattgtttattttaaggatgtttatttctaccgcagccagcacagaggcgagatctttcatttgaaagatgttctgcgtaagccgttctttacgtatgaaactcagaaagtatcaagccttcttgcacagatgcgtgaaaaatctgttagtttctccattgttttggatgaatatggagtgactgcaggtcttattactctagaagatatcgttgaagagatttttggagaactgcgtgatgaatatgatgattctgaggaagaaactttcaaaaaattatccgatggatcttatatggtatccgcttctttaaagcttgatgatcttgatgatctgcttgacgtagaccttgattctgaggattatgattctcttggcggatatatcatcgaactgcttgatcatctgccttcagagggcgaaactgcagaagatgaacattttctttttaaagttgtttctgttgacaaaaatcgtatggaaacaattcatatcattccaaaagagcagtaaaaaaagaaccttgctttttcttgcaaggttctttttttgtactcttatttaaaatattctactccggattcgaagatcttctgatctttctgtccgtaaatattgattcctacatagctgtcacgacgttctgaatgtcccatcttaccaaggactcttccgtctggacttgtgataccttcaatcgcatggtaagaaccatttggattgaattcttcattcattgtaggatcaccattgaggtcaacatactgtgttgctacctgtccattttcaaacagtttctggatcacatcttcatctgctacgaatcgtccttctccatgagatactggtatactgaagatatcatctacatgtacattgttaaaccatggtgacagattagaagcaattcttgtataagcaaccttagaaatatgacgaccaatgcggtttgttgtcagtgtaggtgatttcgcattctgttctacgatcttaccttctggaacaagtcctaatttgatcagggcctggaatccgttacagataccaagtgccagtccatcacggttatttaacagatccatgactgcttcttttaatttttcatttctaaatgctgttgcaaagaattttgcagatccatctggttcatcaccggcactgaatccacctgggaacatgatgatctgggattctttgatcgctttttcaaaaacttccactgaatcacggattccctgtgcatctaagttcttaaatacctttgtgatcacgttcgctcctgcacgttcaaatgctttcgctgaatcatattcacagtttgttcctgggaatactggaataaatacatttggttttgcaactttattcttgcatacgtaaatatttccttttatatagtgtcttgttgtatcaacgatgctctgatctccttcagatcttgttgggaatactttctctaatggtttcttccatgtatcgattgcttcttctaatgttacaacttcgtcaccaaatacaaattcatgtttgtctgtaacctcacctaacattaatcctggaatcgcaagtttatgaacatctcttgtgctcatttcaacaacaaatgatccaaacttaggatctgttaagtcttttaattctacttcttcatcaaagatcacacctaatttattaccaaatgccatcttggcaactgcttctaaagctcctccgccgccaattgcatatgcagatttgataattccatctttgatcagttttgtaatacgttggtatactttcttcacttcagaatatattggaagattgtatgcatctgttgggatacagatacggatcagacggtttcctgctctcttaagttctggtgtgataacatctgttgtcttcgctacatcgactgcaaaagataccagtgttggtggtacatcaatatcattgaatgttccagacatactgtcctttccaccgattgatgcaagtccaaatcccatctgtgcctgatatgcaccaagcagtgctgcaaccggctgtccccagcgtgtcttatcttctccaagacgcttaaagtattcctggaatgtcaggcggatattgctataatctccaccagtagccacgatcttcgcgatagattctgtaatcgcataaactgctccatggaatgggctccatttggacagatatggatcaaatccataactcatcattgtgactgtatcgcattctcctttcaatactggaagttttgcgaccattgtctgaattggtgtcatctggtattttccaccatatggcattgtaactgttgctgctccgatagagctgtcgaatctctctacgagacctttctgtgaacatacattaagatcagataatgtattcttgcacacttcttcaaatgtacctgtctcgtctttgcgattaaagtaagattctacacggtgagggatctctacaaatacttctgtttcctgatgtgctccgtttgtatcaaggaaagctcttgagatattaacgatctcttttcctctccatttcagtactaatcttggatcttctgttacaacagcaacttctacagcctctaagttctcttctgcagagtatgcaaggaactgatctacgtcttttggatctacaacaacagccatacgttcctgagattcagaaatcgctaattctgttccatcaagtcctgcatatttcttaggtactttatcaagatctacaaccagaccatctgcaagttctccgatcgctacggaaactccacctgcaccaaagtcgttacatttcttgatcagacggctgacttcttctcttctgaataatctctggatcttacgttctgttggtggattacctttctgaacttcagctccacatgtctcgatagattcttctgtatgaactttagatgatcctgttgctcctccacaaccgtcacgtcctgttcttccacctaataagatgatgatatctcctgggtcagagttctctctgatcacattctttctaggtgctgcacccataacggcaccgatctccatacgttttgcaacatagtctggatgatatacttcattaacatatcctgttgcaagaccgatctggtttccgtaagaactgtatccattcgcagcttcatttacaatcttatactgtggtaatttaccttttaatgtgtcttttaatgggactgttggatcagcagcacctgtaacacgcattgcctgatatacataagaacgtcctgataatgggtcacggatcgctcctccaagacatgttgccgctccaccaaatggttcgatctctgttggatggttatgtgtctcattcttgaaactgatcagccattcttcttccttaccatcaatttctactggtacaacaatgctgcaggcgttgatctcatcgctttcttccatattgtcaagaattccatcttttttaagacgtttcatcgccattaatgccatatccattaagcagacatatttgtcatcacggtctttgtacatctcttcaaagtcatccatgtaagaataatatgcttcttctaatggtgcacgatagaatccatcctggaatccaatgcttgtaagttctgtggagaatgttgtatgacgacagtgatctgaccaataagtatccagtacacggatctctgtcatggaaggatctctcttttcttctcctttataataattctggatatgaaggaaatctttgaatgtcatagcaagatttaaagaatcatataattctttaaatttgtcttcttccatatctttgaatccatccagaatcttaacatctgctggttcttcaaaatccatcactaatgtctctggtttgtctgcagctgcctctcttgagtcaactgggttgatgcaatattctttgactgcttctaactgttcgtcagttaagtcaccttttacaacataagttgttgcacttctgatcagggcatcttcgtcctcattcaacagtttcacacactgctgtgcagaatctgctctctgatcgaactgacctggcagaaactcaacgctgaaagatatttccccatcggcaagtggtaatgtctcttcatacacgtcgtcaactggtggttcactaaatactgtaaccagtgctttttcataacttgcatcggatagattctcgatgtcatagcggacaaggacacgaacagattcgacatccagtccaagatactgcttcaatgatgcatgcagctcttttgcttttactgcgtagtcttttttcttttcaacatagactcttctaacttctcccatgatttcctcccatttattcatgtagtttcttaatcacctgaaatgcagatgcattttccaaaatcgttggctgatcctcggcatagaatatgatcccatctgccgttgaacggatctctgataaaatctctccattatatggattaatgacttcaccaagcagctgacctcggttaacttcctcattgatcgtcacaaaacgtcttaggaatcccggagcacttgctttgacggatacaagatcctcttcttctataatactcgcaatatacccgttatggcaattatattttaaaatacccattcgagtcaagaagcgaagcacggcagatacagccttcctggccagattcacatcgatattatctgtttccccagaatataccgaaaatgcatccgtcccattgatctgccagttataagttaatgtctttttatcaaaatttcgttgtttgcttgttaatacataaggcagcccgaacagacttgcaaggctggtgctttcttttcctgttgcaggcattcgcacatgtggcacaaaatccccgcttctgaaaaatgatgcaaaatggattccatagcggaatcctttaacccgttcaaataaatgtgctgccagacggcttgttggttccccgtcaaaattcccaggaaactgacggttgatatcactgttatcagatacccagtatttcattccgacattcattgaaaaattattcacacatggaatgaccagaatctgattatctccaacgatcgcaccactgttttccagttcttttaaacgtttgactaactgagaacaaatatataactgctgatattcatttccacgcattgctccgacaatacatgccgctggttctgatccttcactttgttttccaaagagatatccttcgatcttaaactcatctcttaagtaatttcctgaggaatatatgatttcttttttcatagtgcattccctccgatcactctggctaccaaggacccttccgttacacttggatgttctcttaatgtcatcaaaataccatcggttggggcaaccacttcttcttccgttgctcccattaaaggattctgtacgatccctatgatctcgcctttctttaccggatcctttaatcgcttgtaagaaacaaacaatccactggattcacaatttaaataaaagatctggtcttcgtggataaacggaacctttgttttgccttgaacctttcccttccagataccaagttctgccatcaccgaaaaaattccatctatgatctggcggcagtactcgtaacggatacgaaatgctgcaccggattccgtaaccatagttgggattcccatctggtttaaagtgaaagctaaacttccttcattcactgtctgagaaggatggatccagacaagatccgtattcatatattttgacagatgaagtaatgtctcatcgtaatcgttatttaaacgtacttgaggaacttcctgcaaaaagatattactagaatgaatatcaatgcaacaggatgctcctttgatatcttcgatcaatttagctgctgtataatcttccagacctccattgatgtctcctggaaatgcactgctgtaatcgatatctgagattggtactgctcttgttcgtgcatccagtcctaatggattgaccgctggatacacatcgacaatacctgtcagattctcaaattctgccttgatccggcgaatgatctctccgcagatatactgtccgccaagctcatctccgtagattccagacaccagacagattctcttctcctctccagtcaccacatccggcatcagacgatttcttttgatccttagcatctctccgatcggaagttttacagatacgactgtgtctatcatattaaagcctcttttctattgttttatctgtatcgtaaatattttacttttcttattttgcaaataacatttttaatatgatcggtgataagagtgttgtgacgaggaccatgataaccactggtgcaaagaaaacttctgataataatccaacagaaattcctttctgtgcaacaatcagtgcaacttcacctcggcataccattcctgctccgatctgtacagattctctcttcgtatatttgcacaacaatgctccaaaaccgcatcccgcgatcttcgagatcactgcgatcacacataaaatgatcgtaaagatgatcaacgtctgtgtcattccatgaatgtttacattcagaccgatacttgcaaagaatactggtgtgatcagcatatacgataaaacttcaatcttgttgtatatataaaatcgttctgggagcctgcataaaatgatccctgcaagatatgcacctgtgatatcagcgattccaaacacttctgcaagaaatgcaagtgctaagcaaaatgcaagtgcaaacaccggaactcttcttctatgacgttcaatctctggattcttataagtagaaagccactcaaagaacttcttgatcccaactccaccgataatagaaatcgcaaagaatgctgccatctggatcaagatcttaaggattgcctgaatatggaatccagatgctcccccaaggcttgtcataattgataataaaacaattcccaagatatcatcaatgatcgctgccccaaggattgctgttccgactcttccttttaaatgtcccatatcctgtaatgcttctactgtgatacttactgaagttgctgttaggatcactccaataaagatcgattccatgatattatttccatatataacggataaaacagctcccatgataagtgggatcaatactccacataacgcaatgacgaatgcgggaattccactcttcttcaactcatcaatatctgtctcaagacctgcctgaaacattaaaacaactacacctacttcagccagatttaaaactgaatctgaaggactcactacattaaggaccactggtcctaaaatgattcccgcgatcaatgctccaacgactggcggcatgttaaacttcttcgacacaagactaaaagacttggtcattgccagaatgattgcgatatccagcaaaaacttatattcttccattgttttacctccattagttcgtatcgtatcatacctgttttttcttgtcaattcttagacaaagtgatctttttttatccttttcttgctttttttatgatcctttagtatagtggagaaaagactaagaaaagaggtatcaaaatgagtgaatttaacgaagtagataatatcattgaagaagaaactcctgtgctccatttagaattagaagatggaactgaacaagactgtgccgtgatcgctttattctctgtagaagaattagatgatcaggaatatatcgcattgatcactgttgaagacttagaaagtgatgacgaagaaggggctttacttttatatcgttacaacgaagaccctgaagatcctgatactttcagtcttgacaacattgaaacagacgaagaatatgagacagtcactgctgtcttagatgagatcttagaagacgaagaataatatgatattaataaaaaagcccttgcatcttatatgcggggctttttttcatattgaagttttgttcggatcactttgtcaagttcataatacttttcttccagagtttttccattcaggacacaatccattgccatacccatggattccagcatcgtttctgtgatctgatctctatactgtaataaaatattcaggcgctcatgaagatctgtttcatctaagaatttcaacagtggttcaatgtctgctgtttcttctgtctcatcacattcattttcctgtgctgtcacttcatcaaccagttctgcttctgaattttcacacagttctactttccgaaaacggtatatctgttgcacatctgggtatttttcatgatcgacttcacttaagaacatcgcaagtggtcttgcatatgtcttaaacgttccatacattgcctgatagaccaccaatggttcttctgtctctgtatgtattgcaaccgtaacgatctgataaagttttcctttaaaatgcatataaaattcgcctgctcttggcatcgctctattttccatgcaaaacacctcttttctcctgacggcttcttagttcttctacgaaccttgacggcctgctgtctttgttataaagtttctttactgacaagatgtgcagatatttcttggctcttgtaactccaacgtaaaacaaacgtctttcttcttccacgtcttcttctttcatggacttcttatgtgggatcacgtcttcattgacatctggcaaaaagacacgttcaaattccaatcctttggtgctgtgcatcgtgctgaccacaactccttctttttctttctgattctcttttgactggcggtttaattcttcggtgtattctttgatatgatcaaaccatgcctcatatgtatcatagccttttgcgctctcctgaagttcttctaatacttgcgtaaattcttcttcctgaatcttgcgaaatcttgcatattctgctaaatacgcattatatcccacggatttccggatataattgatcgccatcaacggagtcatattcttcatgatccgaagatcttccttaaaatcttctacatattcataaagccatggtttatctttgaccttctctaacagatcatcaaatgacacttgtgattcggtcagatattccctgctgatataacgcttggggcggttcatgactcttaaaaatgtgcttcttttgcgatctcccattgcaaggtgcatataatctatgatatttttggaaatccagtgatcaaacagattcggtactgcatcctgcatataaaatgggatattgtatgccatcaatgcagcgatcagctgtcttggtccctgattggtccgataaaggatcgcgatctgggataacggtgtcttctttgccatctcttccttgatcgtgtaaatgatatgcttattctcctcatagtgatctttaaatgtacggacctcaaccatacttgcagcatcttctcttgcctgcatcttcttttcaaaacgttttgtattataagaaatgatatcttccgcaacctgtacgatctcttccccacaacgatagtttcggtttaagatcacctgtctggtattctcaaaatcctttggaaaatttaacatcagttctggtcttgcacctcgaaacttatagatagactgatcatcatctcctacgataaagaggttctttgtctctcctgctaacatcttgacgatctcatactgaatcttattgatatcctgaaactcatcgatcaaaatatatggaaacttctgctgccatgctttcctgatatcctcacgctcttttaacaactcatacgtataaaccaaaatatcatcaaaatcgatccaacggttctcatgcagtttttcttcatatgcccggtaaatttctttaaacacttcatccccacagcatccactgtgataataggcaagatagatcatctgccctttgactaagctgatctcttgtatgatctgacgcataaaatctgcttcatcatcaatctccaactcatgatctgtgatgatctcacggataaaatcatattttttatgttccggcagaatattatctgcactatagtgataggcatattttaaaatcgtaaaaaacacagaatgaaaggttccaaaagaaaccggcagggtttcccctgccagccgccaaaaccgctctttcatctcattcgctgctgctctggtaaatgtaatgaccagaatccgctgcggtgggatctgatagtgcgatatcaaatattgaattctctttgtgatcacaagtgtcttccctgaacctggtcctgcaagtaccatcatcggtccatctttgtgcatcactgcttctttctgtgccttgctcagctggctatgcaagtgctgcctccagtttcgcgatcgcatcattgattctctttaatgattcttcttttcccagaagttccattaattctgttgctccacctggtgtcatctgctttccagagactgctgtacgaactggccacatcacataaccattcttgtactcatgtccttttgcaaaagatactaacatctcatataatgcatcatttgtaaaatcttcctgtgcttcgatcactggatagatctcttttaatacggttaatgaagtctcaggtgttgtcttcatcttcttatgtttgtacatctctacatcatattctggaactgcttcgaagaagtcaatgtgtcccggaatctctgtaaataactcaattcttgtcttcaccatagaaagaatcttatcaaaatccatctctctgtgaattgtctctgttacatatggcatagcaagttctttgaaacggtcaaagtccatggctttgatatattcaccattcatccatttgatcttgttcatatcaaagaccgctggtgtcttagacatatgtttgtaatcaaagatctcttctaattcttttaatgagaagatttcctgttctcctcctggactccatccaagtaatgcaacgaagtttacgatcgtctctggcaagaatccctgctcgatcagatcttcgaaggaagaatgaccttttctcttactcaatttgtgatgttcttcgtctgtgatcagtggacaatgaatgtatactggtttttcccatccgaatgcatcatataaacgattgtactttggtgtagatgataagtattcattaccacgaactacatgtgtgattcccattaaatggtcatcaactacgtttgcgaagttgtatgttggatatccatccgatttgatcaggatcatatcatctaattcgatattatccactgtgatctctccgtaaatctcatcaacgaaagatgttgttccttctgttgggttattctgacggataacatatggtactcctgcatctaatttcgcctgaacttcttctttagataagtttaagcaatgtttgtcataatgactgatcacaacatctcctgattttactttcagtgtgtctaatctctcctgatcacagaaacagtaatatgcttctcccttgtcgatcagttcttttgcatattttaaataaagcccctgtgcctgtctctcactctgaacatatggtccgactccaccatcgatgtctggtccttcatcgtggttcattccggctttcttaagagtattgtagataatctcttctgccccttctacctgtctttcctggtctgtatcttcaattcttaaaataaaatctccgcctgcatgacgtgcgatcagatatgcataaagggctgttcttaagttacctacatgcatacgccctgtagggcttggtgcaaatcttgttcttactttgctcatgatttcctcccatttggttttaattctatctttctattctacaaaacttatctttctttgtaaagaagcagtcttattgattttcgttaatttatgttgattttttgaaacaatccgtcttaaatctcatttaagatcctgctagcttcctcaaatggctctaaggttctctttaagattccctgcgttgccgcgataaagattccatagttcacgatcggaacacctgcatctttgactcttgcgatacggtttttcatctctcttctatttaaagtacatccgccacaatgaatgaccagatcataagtatccagatcttcaggaaaagagtttccactgcttgtatggatatcaaaatccttacctgtatattgttttaaccatcttgggatcttcaccgttccgatgtcatcgcactgtctgtgatgagtgcatccttccgcgatcaagatcttcgccccttcttctaaatgttccaaggctttcactcctctgacttcttcttccagatcacctttatatcttgcaaacagaatcgaaaatgaagtcagtttgacatcttctggcacaatctttgagacttcgccaaatgcctgagagtctgtaatgaccaatgctggtttcttaccgatctcttctaatgtcttttctaattccgtttctcttacaacaatagaggctgctcctgcttctaaaaggtcacggatcgtctgctgctgtggaaggatcaatctgcctttcggtgctgcactgtcgatcggtacgactaagatcacaaaatcattcggacagactaaatctccaacgatctttagcgtgtcatcatccgttggaaccagtttcccaatctcttcttttaactcccagatcccttttttatcctttgcactgacaaagcaggctttgtcttctttccattcttgggcattggcaagatccatcttattgtagactttcagataaggaatcttccggtcttcgatcaaacgtatcatatcttcttcaaactctgtcataccagctgtagcatccatgatcacaagggcgatatctgccttggccaagacttcttttgctttcttgactcgcttttcccctaattctccttcatcatcaagtcccggggtatcgatcataactactggtcctaatggcagaagttccattgccttatatacaggatctgtcgttgttcctttgacattggatacgatcgctaattcctgattcgtcatagcattgataacacttgacttcccggcatttcgtttcccgaataatgcgatgtgaattctgtctcctcttggtgttgcatttaaactcatatgatttcctcctgtctgtctttatggatcgttaactctttcttttatctttgtgccttatgatatcccgctgcctttgcttctttctcactcttaaatgtgactaaatattttgatgttcccatacggtcataatctctttgacctgggcagtggtatacctttgatctgctgtttccacggatcttctgtgaagcagttgtttttgtatttgtttttgctgctgttgtatttttgttactgctgtagtttttgctgttattagatgaattctggtttgtgtgatatttctggcttgcttttgaattctctgttgttacctgcacgctgctgtctgcttcactgtctcctgactcgtaatcaatcttcactccatcctgtacattatatacaaagacattaaacttgatatcttcgcccttatcttccacagacatcgcttccatctgtacccctttggctaccaggtcatctccgtcaaagactggtgtaactctgtataatacatgattgcctgtctcacggacatagtcaccaaccatctcttcatatggtaacattccatccacattaaaagatcttgttcctgtgatcaggttcttgttatttgcattctcaccggtcagctggtaagcgatcaaatgacagcggttatatagatattttccatcaacgttatcgtattttgctgtatgccatccggttggttttaccataccgatcgctccgcgttttccttttggcatgatatcttttccaacacacgcttccgccacctgacatcttccttcagagtcaagtctgctgtaagactcgtaggattttgttgtcagatctttggatgtaaaatctggattattattgtcaacagcaaccgtcatattccctgaaaaatccggaatattatccgatgatacagatttggtggaagaatttgtacttcctttgctgctttgttcgctctgtgcgtttccgccattactgctattgcctgtactctggcatcctgccagtgataccgccatcattcctgcgatcagcagggcatataatttctttgttactctcatcatcaacacctcttgttatattcttttctgatctagcttattattttggaagatagatctgttttgtgatctcgtgagtggaaccttcgatctgttcttcttctgcaagtttccattcctcaagatccacatccagtacctgatcggacggatagactttattccaccggaagatcacgatctcttcgatctgatctatcactggttttaatggaagattctctacaatacaagtctcccattttcctgccttgtgtaagaaatcttcacaaacaaccggatcattgatctcttcatacaacttctctgtatatgcattcatatagaccttctcccctttggtcatctccgcaatatactctcgcaagcctcgatcctgactctgtcttcgatcattaaacatcataccgttgttgttgtctaagcatagaattattatcattctctccatcctccaatcgtacttatgttctatttatgtattatatcttgtgcgagaggatattgcaataaaagaagctctgaatttctccaaagcctcttcttacttttcattcttttttgtattctaattgtatttatgatactgctttcatcactttttctctcataggctgtgtcattttctctggttttaagatctcttttaattcttcttcctttaacaagccttcttctaataccagctcttttacagaaattcctgtttttagtgatttctttgcaatctcagcagactttgcatatccgatatatggacataacgctgttgagattccaacacttttttcaatatattcttcgcactgtcctttatttgcggtgatccctgtaatgcagtgttttgtaagtgtggctgccgcctcttttaaggtatcgatggattcaaataaatgatgaaataagactggttcaaatgcatttaattctaactgtccggcttcggctgccatcgtgatcgtatagtcatgtccaatgatcaggtatgcaacctgtgatacaacttctggaatcactgggttgatctttcctggcatgatggatgaaccattctgtcttgctggaagattgatctctgataaaccagttcttggaccagatgacattaatctcagatcatttgatatcttggaaatatcaacggcacatgtttttaacactctggatacactgacaaaaccgtctaagttctgtgtggcatcgatcagatcttctgcctgttttaatgaaattcctgcaactttgcttaattcataagaaatgttcgcaagatagtaagggtctacattgatcgctgttccgattgctgttgctccgatgtttaagactttcatctcatccataacatttttcagtcttttgatatccctttttaagacatgtacaaatgctccaaaactttgtccaagtctcattggaacggcatcctgaagctgtgttcttcccattttgaggatatcatcaaactctgcttctttttcttccatggctttttctaatttctcaagttctttgatcgtctgtggaagtaattttaagacggtgatctttcctgccgttgggattacatcgttcgtagactgtgacatattgacatgatcgtttggatgtacaatgctgtaatctcccttggttccaccaaagatttctatcgcacgattggcaatcacttcgtttgcattcatattggcagaagttccagctcctccttgaatcgcatccacgataaactgatctcttaaatttccatccagtatctcatcacatgctttaatgatcgcctgagcaatctgctgatctagttttccagactttttatttgtgatcgctgctgcttttttgaccattacgatgctgtcgatcaatactggatgtaatggacggtgtgtgatctgaaagtttgtggctgcacgcatactctgaactccatagtatgcttccgctggtacgtttaatgctccaattgaatcgtgttccattctgcttaacattgtcttcctcttttctgattactcatgctgtcgttttgtttcaagattttatgtgttggagcttaacacagtatgcaatgttcgtaaaccttaatcctgtctttccaaatttaaagttcaaattttgtgtttcatcttttcttttttaatgaaagtcttgatttactttaaataattaagcggttggaagcggaaggaattctgactggatttcatgcttctgttgacccgatccaacttggttatcatattaaagcatatatcagtcttgagatcagccctgcacaaaaacccgaagtttatccttttcttcgagctcatccaaatgtactggaatgtgattgtgtaactggaaattattctgtgctgctgaaggttgcttttcctagtacgatggaactggatgaatttattgggaaattgcagcactttgggaagactagtacgatgatcgtgttttctacgattgttcagaatcgcggggtggttcctgaatagttgatttgtttttaatttctgttatctaaaataacagggtaaaattttacatatggaacattttcttttataatttgtgcaacctttttacttattataatttccctatactcatcgtaaaattcatatgtcttatttacatcctttaaatttttttttccttcttctgttattcttttcggtatgaaatagaaaatgttttcattttctgtcatatttattctttcacatttttcacattgattttcaaatttataattttcatcaatataacttttctgtggtaatatattatcagtaataaaagtatatcctaatatttttttacttttgcttataatcggctgaaaatattttttatctactcctgattcttttaatttctccaccagttttggtaataacaacaactctcctgttccatccaagcctgcaaacccataatcattctcatgtttttttatatatcctttcggttgtgcataaaataagctatttgttttttctttactatgacaactttcacattcactatattcattttcaatatcttcgtattcttcacagtaatattctggaaaacataaaacgaatgcttttgccttttcaaactcttcatctgtaattttaacaccataatttaaacaaataaattctacatcttctttgtttgatttataaaattcaattatttgtttatatagttctgaatcttgattaatcttatatgtatattctccagaaaatcgatttcctgttctgtatttctttaatctgtatatgaatctagaaatatttttttttactttccaatctgtttcttcatcattataacttaatacaatttctacattaacttccaatttcgtctcctcctgttatcactacaattttgctgcttttgttttctctaaaccgacttatctttgcttttatccaaaatataatttccattaatatagctgtatacataataataaaaggatctattggaaatacactacttttcaagattgtaattttacctttgaaaatccagaaattaccaaccaccaattcattgggtcccgattttatatgatctaaatctgtttcacttatttctttttctattatttttttctctgttatatgataatccgtataatcaaacttgcctgcatatacatgaattccatctctttcattcttaatcatatcaatatcatccttaattaagatactcttaataaagtcgccattcttgttaaatttctgaacgacacctaacattccagtcgcaacatatatattccctttgtcgtcaatggttgctttattccctggaaaaataccaacaggtatggaatatgattttttaataaaagaatcttttttattttgtaattgtatattacatactatcattgttacaaagtcttgaacattacttacagtaaaaatatttcccgaaaatattgatctatttccgaattacttggaaatagttttttaatttctcgtaaataccattttcttttttttatccatttttttctctttccttgtaaaatgcaaatataaaaaatatatacttcgaatttttcttgattattatcatatagtttttttattatattttttccttcatcaactatattataaatatcattttccttatttaagaaaaataaatattccgtggtcgcataaaaataacctgtaagtaattgtattttgatattttttttaaaaaaccttttttgatattctactaattcaaaaaaaagttttttttcataacaatctttcttataataatctataacattctccatataaacttcttctaataccatccaaagctgtgtatataaaagtaagaaaatatcatctctcttattttgtttccacaaaatatataactctcgattcgtttttccagtttgatttgaagaaaaaaatggttgattatcataaaccaattgttttaacccatgcatcacttaattttacaactcctttcttagctatacatgtaccttcgataattttctctttataattgtatacaaatttatatacaatttcttttcctttagtttttcctatagcttccatttttccacttttcatttccttttttacaattggttttacatacttccactgattcttttttgttacttttgtccactcatgtttactctgcataatgtgccttactttattttgatcagaagctactcttcttattgcactattgactccttttaccgctaatccactacttgatgatgctcccatagcaaccgataccataacctgcaaatgctcctataatggctcctactacagctcctttaattccatatgttgctataaataaatttctttttttccctttatatcctaatcttttagcaactaatctacctttatatgaaccagctactgcaccaacaattcctcctacttcgacacctactaaaactgctgtacttactaaaaaatgtccactaggatccacataattcaccggattattcgcacaatacacatataaatgtcccgtctccgatttagtcgtatctccacggtaggtatcctctgtcataaatctaccatcttctggattataataccatgcattcagataatacaatcccgtactctgatcatagattccaccagtataacacacttcatttttcgcctgatcatctccatgaataattgtctctccaaaatccgtatactgataggttgcatctgcacttccatcttctttcactaggctagttgtacttccctgaatatcttcattatacagataatattgcgtatcatcccctttgaatctctcagttgcaaggacatttccttctgttccaatcaagttctgtgtaagtcatctcttttacacggtcaaaactgtcataggtatagactttttaaactgcctgatcactgttatttaatagatttctgtggtctttaatctctttgacttttccataagcatcataagtgtaacttctgtgacttcgtaaggtctcagggaacttaagttatgaaatctcaagttactcaaactttttcttaatgtccctggaaacttaagtaacttataatataatgcatttaaggtacctcagaccttacgatgtctgctggttgatatcatatatctctaaacaattcagctaatccaaaacacattccttcatgtgctattgtttgtaaaataattttattttctgagacaaaacataaatctatccagtctgcaaaagcataaatattaggatattcttgtaaaacttttcttacatccttgttatatttatataaataccaattatccgtcatataatatcc

SEQ ID NO: 624 - DNA, 23548 bp, Unknown
  gut microbiota DNA sequence
catcttaatttttatttttggaataaatcccctatttttaatatatttacaattcatcatttgtgactaaaaatcaagattccgagattttgtaaaattatttacttctacacattcttatttttttgttttttgatacagcaacttttacaaacatgtttcccagaaaatatattaaaaaactatttactttctttttaataattgtatatcttcttcatctactcccaaaaatgaaatagtgtctatattttctttttttaatattgcctctccatcatcctctccgtattctgttaattttgaaacgattactttattatcgtcaattttatttataactcctttaattgggcattcatcatcttgtatcatttcaattgatactatatacttattattcatacaaatttgaaatatgttattctttaaactaactttatcttgtagttttaaatcaatatgtctttgattctttttagaatataatttttctatttttttttcatactgcccacttatctctaaatgcataacactatctatttttttcagaatatacccatctgctaatccatgaggtgttatatgtttaattaaaaaatcttgtcttccaattgcgtaaatatatccttccaaaaacatcgaagtatcatcttcatcgcaaaatatactaactatattattattttcttttatctttatcaattctttaatcatatttactccttcttccatcatatcttgtcttcagactatgatctttccatgtagaataaaatacattccactagtatagcacacttcatttttcgcctgatcatctccatggattgttgtctctccgaaatccgtgacttcgtaaggtctcagggaacttaagttcatacagtatcctgatatgtcgttttcattctccccttatgcttggattgtaacatttcaccattttacaggcaatcagatttagttttttcatcgtttaatacaaaaaacttttttatttttgtgaaatattatggttgacttttttaataagtatacctacttaatatattgttccattactatacaaaaaaaagaaccctgataactaaattaccaaggtcctttccatattcccgtaagaaactaaatcatataatcttagcttcttgctctttcttctaataaagcttttacttctgcttctgtttctaactgcattacttcatcaactaatgctttacattcatccattgtccacagagacattacttttcttgtagcaaggattgctgtagcacttactgagaattcgtttaatccgaatcctaataatactggtactaataatggatcgcttgctgcttctccacacatacctgccatgatgtcttctttgtttgcagctgagatgatatttctgatagaacgaagtacagctggattgtatgcagagtacagatatgcaacatctgggttacctctgtcggctgccattgtgtatccagttaaatcgtttgtaccgatactgaagaagtctgcttcttttgcaagaatgtcagcaattaagcttgctgctgcagtttccatcataacaccaacctggatatctttgtcgtatgcgataccttctgcatctaattcctgtttcagttcttcgatgatcgctttgactgcacgaagctcgtctacacatgttactaatggtaccatgatacgaactttaccgaaggcacttgcacgtaataatgcacgaagctgtggtttgtaaatatcttcttttctctgtaagcagaaacgtactgctctgaatcctaagaatggattctcttctgttggaagtccaagatatggaagtgctttatccccaccgatatccagtgtacggatgatcactggtttaccgtcaagagtttcagctactttcttgtatgcttcaaactgagcttcttctgatggaatcgcatcgctttccatgaataagaactcagatctgaataatccaacaccttctccatcacgctctaagacaccttctgcttcgtctggtccaccgatgttagcaaccagttccacaacgtgtccgtctgctgtctgggatttctgtccaacaaacttctgaagggcagctttctcttctaagaattttgctttcttagctttatattcttctacaacagatgcttcaggattgatgaatgcttctcctgttgatccgtcaagaacaacttcatctccatcattaacgatagaaacgatgttttcgatactaagaactgctggaatttccatagatctgcagatgatcgcagagtgagatgtcttaccaccaatctctgttaatacaccctgaacgtttgcaggattgattcctgctgtcatagatggtgttaaatcttctgctactaagattgttccttctggaactgcactgatatctacttcttcaattccaagtaagatcttaattaaacgagttttgatgtcgcctaagtcagatgctctctgctgtgtcagttcatcgtctgccatagcgaagatctgtgcgaagaaatcgcaagcttcttctacagcagcttctgcgttgatcttctctccatcgatcttagcttcgatctgttctgagatcgctggatcctggatcatcatgatatgaccttctaagatctctgcttcctgctcaccagcagttactttcatggattcaaccatcttctgagtcttctcaatgaaaacttcaattgcatcgcttaaacgttttttctctgcttctgtatcttcgatagactgttttgtgtaattaagttcttcttccttaatcttaacgatcttaccgataccgataccagcagatgctcctatacctttatacatgttgccacccgtcctttatcaaattatatgttacactcgttatgagcagtgattattcacctaacccagattcaatcagttctgttgcatgtgcaagagctgcttcttcgtctggaccttcacatactaattcgatttcagaaccacatttgatgcaagctccgatgatgtttaataagcttttagcgttgatttttttatcttcgaatacgatagttacgtcagattcgaatttagttacagctttcgctaaaactccagctggtctcatgtgtaatccctgttcgttttcaatgacaaatttctttgataccataattgtttctccttctcacatataaaataattttaatttatctggatctttaactggcttatctttgtactcatctaagtgcaatttcttaaaaaagcataaaaaaagacctactttaacaaatgttcacacttattaaataggtcttgcctgcctcaccagtcacaatccaaaattcgataatattattatatcaaattttgccttataagtcaacctggttttatgactgatgccccatttctaagatcagtcttttgacataaatgatcagatacatcttctcatctgctgaaagtttgcagttgtaatgctgctcgatatgttccacgatcttctgactgcacacataggcttctggatacttcttctgattacgttcataaaattcaacatcatcttcttcgtcttcttctatcggccgtttctttgataagatttccgtctcaagatattgtaaatgtgttgcaaatctctgatatgctggatgttccgtatctagcacgatttcataaaactcctgaatgatcgccatgacttcctgtacaaaagatgatttgccactgaggtccaaggtaaaaatcttctcaatcttcgtcttatctaattcgtccccggttttcttgcgaaatccaattccttttcccatcaaaataacttcttttccgtttgaatcaaatgtactgaccacgttattgttgattactttttgtatgatcactttctcgcctcctagatacttccaagaatctcttttggaatgtatgcttctacgtaaattccatcatctctgtattcttctttcaaaagctgtccgtgacttcggatcagctggatctttcctgcttcctgatatccatacagcttttctaaatataatttctgtttttgcagtattttctcaatctgctctaacaactgatcggttccttcaccatttttcccagaaatccttaccaccgcttctgcatttggatcttttaagatctcatcaccatttaacagatcgatcttattgaatgctgtaatgatcggtgattcgttagctcctaactgctttaatgtatcatagactgcttccatctgtttctctttctgcggattggatgcatcaactacatgcaggatcagatcactgtatttggcttcttctaatgtacttttaaatgcttcgaccagatgatgtggaagtttgcggataaaaccgaccgtatccgtcataagaattgtctgcccgccacttaaatctaaactttttgtcgttggatcaagggttgcaaacaactgatcttcttcataaactcctgcattggtaaaatggtttaatagtgttgactttcctgcattggtatatccaacgatacaaaccactggcaggtgattcttctggcgttgttttctctggacttctctgtgctttacaacatctcttaactctgcttttaatctggagattcttgtacggatcagtcttcggtccatctccagtttcttctctcccggacctctggttccgatttctccacctaatcttgataaagctcttccttgtccggtaagcttggatgctctgtattttaactgggcaagttcgacctggatcttaccttctcttgtaaatgctctcttcgcaaaaatatcaagaatgatcagtgttcgatccatcactttggtatctaatgcttcttctaaattgctgatctgtgctggtgataattcgtcatcacagacgatccctgtcgcattagttccgtataacaaagcattgacttcatcaatcttaccttttccgatataagttcctggatgtggtgtttctcttacctggatcacccttgctgcaacctcggctcctgccgttttaaccagttcttctaactcatccaaagattcttctgcttctgttgtgtcttgatcagcaaccgcaaccaagatcactttctctatgatttcttttttgatttcttccataatatgtgttcctgtatctattttcctaatttccctaatatctgttggactgccatgtcaaatgcttgcttcttcgctgaatccctgcccaccgtctgattcatcatttgacttttttcaattctttcctgattctctttataatatttgatcaggtccattcctatatattcttcacatgaccgacagctattctccatctcctcttgcgtaacttcccatgcatctacaactctgtgatcatccttgctgactgccaacattaatgttacggggtccgtaaatgcattcgtctgtgcataacccatagagatcactgatcctctcccatattgtcctttaaatactttgtatacttcggatgtgtattttgaccgttgattttgtttataagaataacaaataaatactattatacaaaatacaattccgattcctacagccagaattaacattttattcttgtatgatgtttttatagaaacgaaaacatcatatttcctttctttttaatttgtgatgctaagaatcattatacaacgattctttttttgtagcaaccagaaagaaaccggctttgccatactttcttatatcatagagagttccatcggaatttcctgctatattatgttaaaaaaagatatcagctgatcctaaaaccagctgatatctttatcttctatatcttctatcagaaattattctatcctcttgtcttaccacccgcaacgttaaccgtcacaccatgtacgtaagaagatctcttgcttgcaagatatacacacagatctgcaacttcagaaagctttccagaacgtcctagtggaattgtggatgttttggaatatcctgctcttaactgttctactgtgatccctcttgtataagccagagctgtttcataaccgatcgtacgaagtcctgtagcttccatgatcccaggtgctactccgacaacgcgaactccctgttttcctaattcttttgcccatgatcttgttaaagagtttactgcattctttgtagctgcgtaaacactctgtccttcggatccttccagaccactttcagaagacatgttgataatgacaccttcacctttttcaaccaagatccttccaactgcctgcgcacagaagaaaacaccttttagatttacattgcatactttatcccatactgcctcatctaattcatattgtccttttggatcctttggatcaactaacagacgtggaatattgattcctgcattattcactagtacatcaattgttccgaatgtttctattgtttttgctaccatagcttcaacatcagaaacttttgttacatctgttcttacatataataactggccttcttttgcatccatctctggtgcattctctgccatatcagaaataactacattcgcccctatattcaaaaactcctgcgcaactgctttcccgattccggatgctgcgcctgtgacgatgactgtcttcccttctaattctaaccaatcgttattcatcgttatgatctccttttataatttttcttctgcaacagactgctcgtgttgtgccacattctcaaatgaatcccattttgtggagaacagtaataagaacagtgtgtcgatcactgacatcgctgccattcttgtgaaactaacctgatcatggaaaatgtgttctcttgttgctgtcagcaaaacatgatcacataactctgcaagtggcgatttggattgattggtgatcgcaattgttgttacaccattatctttcacgatctctaccatcttcacaagtcttttggatgccccagaggcagaaatcgcaaaaaatacatcaccttttctcaaagttctggaaaatgcttcctgactctcccaaattgttgaactaactgctttcaatcctaactgattgaacttgtaagatccatccagtgcgatcgggatcgtatctcccatcgcagcgaattcaatcagattggcatgtatgatcaaatccacgatctctcttaattcttctggattaaaattgtgaaacgtcgctttgatctcttccactttactgatcatgatattattgagtgatttgtccatctgatcgatatcgatctcgttcgatatcacctgttcttcctgctgtcgttgttctccggccagcttaatcttcaactgatgaaatcccttacacccgatcttcttacaaaaacggatgatcgttgcctggctcgcatcacagtgagatgcaagttctgatacagacatctcgatcgcttcagatggatgactgatcagataatcggctactttcttctctgcatcatataaactatcatatgttgaaaaaatctggtctctaactaagatatcactactcatactactcccttctaaatctcaggagcattctgtatgaaatacctttctgcctctgcgctccataaattaccattgcgttctacgattgattttaattctctgatatactcatcatcgctgttttcatcgaatttgtcaacctctgttaatggaaattttttgtgcgtatagacaatttttttacttccttcaagttctggtaacgcctttgttgtttcaaccgcatggtcaagccctaatatatgtgttgcgatctttgcaacattgactgtcttgctctcgatcagttcaatggattgtttcatatcttccgtatttccaccacttgttcccacaaaatgtgtagaattataatgaatattatagaaatttactctggatgaaaattcttgatcggcaggccctgagaagaaattcaaacatccatcgaatgctaacattttcactccgtatgttaccatttcttcatttggtgcaaagataaagacatcatcaaatcctttttctgaatatttacgtagctctttattgacatctgctatatctcttgtattgacgtatacaagatctacaccattcttctttgcttcttctactgtgtataaccttgctgccatatcaatcttcttctgtgttcttcctgtgacaaccagcgtctttggtttctttggtccatggattgcaaagtcaatcgctaaaaatcccattggccctgttgcaccgagaagtgcgatcgctccaccttctttaattcccatcacatgttcatatgaatacattttcttcatatgatactgtgcattaaatgcacctacgacacatgacagtggttcaacgagagatccttcaaagaaggaatctccgttgtattttaatagtgaaccattttccataacctgatcagaaaagatgatcgttgtggcatcccctcccatatgatggaaagaatatcctggggcatagcctctgatatctccaatgttaggctgaatgacaaatttgtcaccttcctgatactgatctttccattttttaccgacctttttgatcgttccacaaaattcgtgtcctaaaatgatcggattttcactgatatcatctggtacttttttgtgtttttgtgcctgggtgatcgctttgtaactggacatacacaaactgtctgttacaacctctgccataatttcatcatcttgcatctctggcagttcaaattcatccagtcttaaatccatttctccgtaaagtcttactgcctttgttttcataactttccccctaacagattatgccaaaattcctaatccatatccaacaattcctactgcaaataagataaagataattgcgatcggactgatgtttttctttaataatttagatacgaccaaggttaaaactaatgctaataatcctggtaataactgatctaagatattctgtactgttgttactgttgtttttccgtttgttgttactctagatactacaagtggtacgttgatcgtcgtccatttagataccagtgcacccatgacgaacagtccaaggatagaagctccttctgtgactttctgtaacatgtttcctgctaaatgttttacaaagtctaatccttttttgtatccgaattcaagtccaaagtaaagtgctgccatacgtacgatgttgaatgctaagaagaataatactggtcctaatgcacttcctgttaatgctaaggatgcaccgatcgctgctgtgattggtcttaatgttccccagaagattggatcaccaactccacagaaaggtcccattaaaccaatcttgatacttccgatcgttccttcatcgatatctgctccatttgcttttgcttcttccatcgctgctgttacacctaagactggtcctacagctgctggtgttacgttgaagaatgtcagatgtctctttaatgctgctacttgttcttcttttgtatcatataatcttttaatagctggtaccatgtcgaagcacatacctaatgcatgcattctttcgtagttaaatgatgcctgctgaaggtttgttctcatgaacatattaaatctatcgccttttgttaatttcttttcactcatctttaaattcctcctctttcttagtcaagttcgtcgtctagatcatcatccagatcatcgctgccacctgcacctgctgttactggtgctgccactggtgtctggaatttaggatttaactgtacatatacgattgcgaataccgcacccatgattccgaatgcaactaagttaaattctgtaaacgctgcaattacgaatccaaggaagaagaatggcattaagtattttgcacccatcatgtttaataccattgcgtaacctacgactacgatcattccacctgcaactgttaatccaccagttactactttcggaatgctgtttaataatgtctgtacaccttctggacttacaactgctgctactaagaatgtagggatcgctacacgaagtgcctgtacaaccaatgcggctacatgacagatatcaagcatcttgaagtttgcatcttctgcatatttgtcagctgcgtgctggaagaagattgttactgtacgagcaaatactgttaacacctgacctgcaactgcaactggaagtgcgatcgcgataccatttgctacagactgatgtcctacaactacaagaatcgtagaaatgatacttgctaatgctgagtcaggagactgtgctgctccgatgttcatccatccaagagcgatcatttccagtgtacctccaagtaagatacctgtttttacatctcctaagatcaatccaacaactgtacatgcgatcagtggacgatgtgtctggaaggaatcaagcacgcttcccattccagcgatacatccaaaaataactaataaaacgatttgaactgtagatattcccatttttaaatcctcctttgtatctctcttatccttcgatgccttcgatcttgctcataagatctacttttttatctgtggctaccggacggatctctaattcaattcccatctcatgaagtttcttaaatgctgcgatatcactttcatcaacagatactgcctttgtgatctgagtctttcctgtcttgaatgccattcctccaatgttgacactcttgatcggaacccctgcttctgccattcgcagaacatcctgtggacatgtatataagaagaatactgtgtccttttcatattttggattgttgtaaacacgaactgcttttgctacgtctacaacgcttacttttactcctggaggtcccacctgtaaaagtaatgttttacggatctggtcttttgctacttcatcactgcaaatgatgattcgctgtgcgtttgcttctttggaccaaacggttgcgacctgtccatggatcagtctgtcatcgattcttactaaattgattttcatagttcatcatcctccatttcatcttcgtttgtattaccaagcaatttcttgcatgatttcacataatctcctgaaagtttgtcatatacttcgccagccttgatatcttcttccattgttctgattcctacaacatcgatcagcattggtaagctcaatcctgtaataacatccattcgatcttgtccgatcacggtctcaaatgctgcattataaggacttcctccaaataaatctacaaggaataaaatttcttcgtcttccttatagccatcgatcaattctttgtatctggcttttaatgtctctgcattctcacctggaacaaatgttacgatgtcaagatcatcaattgctccgaacaccattcccgcagaattcacaacctcttttgccaacattccatgggctgatacaattaacttcattgctctccctcctttaacacgaaatttatttttttacttttgtctcatgtgaaattttattttgtatcttgattatagtcataaacctaaatttcgtcaacttatttttcgtaaaattttattttttgtataaagtcatgatttttgctttctatttttgtatattttgcacaattttcaattgatcttttctgtttctgcacaaaaaaaagaaggactttcgtccttcctaactcttatcatgaaattgtcacgaaattatcgtgtctccaaaaatgtcagctctttcttgccatttgcatcctttggataggcttttacataagcttttgcataacgatatgctgtatcaaaatcaaacatggattcatacgcactgatcctagcgaataaaacttccttcttattctcaagctccttctgttttaatgctctctcgatcacttttagcccttgtgtatacttctcctgctttgctaacaccgcatattttgtacaatagatctctccatcgtctggatgctcttttattccctgatcacatacatctattgctttgtttagcttcttctgctgggcaaggcaatatgctttcaaagaatatgcccggctttctccatgatcgatcagctcatcatagatctctatggctttcccatactctcccatctgataaagagcctctccttcgtagaataaaacatctttcttttgctttgtgaaaatgagagtgaatttccctgctgcatggtcaaattgttcgtatgctttctgatattctttcttatcaagatatgtaattccttcgcttgctgtcattctttggctgatatatccaaatccgcaaaaagcagccagcgcgatcaggacaactataactgctgtaatgattccttttcctttactgttcataatctttctcctgctttgcatttttaattcttctgcctcttagtataacaaattctcttttcgcatacaagctaagccttcctatatctttcttcccttattttgtaatatagaatccagaactctttcgctgtgtgatatttccacatttatcgataaatcttgcatagatactcacttttttattcttctttttataggttatcttattcgccgttctccatcgatatttggatgcttttttgccttttggcacgatcttatattgtgtctttgatttcccgctgattccataggatgctgaaaatacaaatttggctgactttttgatttttttattgtaagacgtttttgttgacgttttcaatgtcttgattcctgatctgttaaccttgatcttcgtctttgttggtgcttttttatctactgcgattcctggaagctgcatctcatctatccctgcatctgtgacaaacctcacatagaccctgcctatcatgccgtctttgagcattaatgtcgtaccggttttgtatggtacacttcctttggaagttccttttttcacaaatttgtactgaatctgttttagatttgtgaagctttttgcctgtgctgaaatcctgatcttgatgttttttctctcataatgctgatatgctgctgaggcatcggaacgaagtggtgtcattttcttctttgtatttgcctgcactgtaactttctgcatcaaaggggtacgcttctgtttcactacatatcccgcatgacttggtacattaccgcctttttgtgctgacacacttagattcttaccatcggacgatactacgatcgttcctttatctgatgtctgataaacatccattcctgacagatcacgaagtacattgctctctggtgtctgatttacatttttatatccattactgatgatcgcaatacttgcacctgttcgatcgatcagatacttatgatccgaatcgtatacataacgacctttcggtttatcctgcaaacgaacatcctgatatccatgatgtggctgctttaatacctgtgcacttaaatcgtaacctctagctacaatctttttgatcgtttcctgctgtgcatcgcctgtcattaaaaatgaattactgccataaacgatcctcgtcactatcgaatatttatttacctgtcttgtatttaaattgggtgcatcctgtgctcttccatacctgtaggtattatctaacggaccataaaaggtcattaccgcttcgcctaattttacggatgttccggcctgtggcacaacatactggatatgcaatgatgcatctttgtatgaattcctcttttctagtttcttcttgaatgtctgataagtctgtgtatcaaatgctgtccatcgggctgtttcttctgtttgcttttctttatcttcgctgctttccaaatattcaaactccaatggattcccataaatcgtatcaatcgtaatattcttatcttctagtatctttttcattccaccgatatgatctccatgtggatgagtaagaacaacaaattccagatgctttactccatgatccagcaaatactgatgcacacggtctgatacatcgatcgtatcgtgatctgtcgtctcataagaataagccccagaatcaatcagggcatacttcgcgttttctccttctccatattgaagcaaagctccatcagcggcccccacatcgataaaatgaaccttaaatgtctgtgctgcattaactttgatcgtttgacctcccgatacgtgcaaaacagtgatgcctgtaagcatcactgtcagcagtaccgctatgatcttctttgtaaaatatttcatacttctatcctagcgttttctttgttatttcttagttacgtaaaatccgtttgtcttctttgttgtgatatttccagatttatcaatatatcttacatataaacgaacttttttatttcttttcttataagttacactatttgctgttttccatttgtacttggaagctttttttcctcttggtacaaacttatactgtgtcatggattttccactggttccataatttgcactaaatgtaaatttgacagacttcttgattcgtttactgtaagtattctttgcagatgttgacagtgttttgatccctgacttattcgctttgatcttcacactggttggtgctttcgtatcaactgtaaatccaggaagtttgatctctgttgatcctaatggtgtattatatcttacataaaaccttccacaatttccatttttgactgtataggaacttcctgtcttatatgctatggttttattattcacaccttttggcacaaacttatattcaatgcttgtcaactttgtaaatccttgagctgctcctgaaaatcttacagtgatattcttcttttcataacgatcataagtattcgcagcatccacactcgttgctgtcaatggctttgttgtgtttgctgtgatattcatggatttcatcactggagatgatgtttcatcatcactttcttttcctttgacacttggctggttatctcctttctctgtctggatagataactgtgagccatcggatgttacaatgatcgttccacggtctcctgtctcatagacatctaattttgataagtctcttaagacttttgtatatggaacaccacctgtattcatgtatccattactgatgatcgcaatactagcctgtgatgcatcgatcactgttttatgatcagaatactggtagccattggctaactcttcttctgtgacatcctgaaatccatgatgtggctccttgagcacctgtgctgtcagatcatatcccttcgcgatgatcttctcgatcgtttctttctgggcatctccggtcattaagaaagagttgcttccgtaaacgatctttgtaacgatagaatatttattttcctgtcttgtattcaaatcaaccgttctaccatattgataatcattctctaatggaccatagaatgtcatttttgcttctccaagactaattgtttctcctgcagttggcactacataatctacttttagattttctttctctgttttgtcttctgcttcttcggcaagtttatttcttgcttctaaagctgctttaaagttcttgtatattttggtatcaaattctgtccaatttgtttcatctgaagactgcttgctcttatcctcgctgcttttcaagtactgaatattcagatcattcccataaatcttatcgatcttgatcgttgtatcagaaagaatcttttccatacctccgatatgatcctgatgaggatgtgtcagaagtataaattccagatgttttactcccatcttatttaaatattcatagactggtgtctttgttgtgtcaatcgtcgtatcctttgtattatgatactggtttgctcctgtatcgatcaatgcatactttgcttctgttccttctccatactgtaataatgcagcatctgcacatccgacatcaataaaatgaatcttaaatgtctgtgctgcttttgccgtatgcattccatgcccagttacaactgttgtgcagaccaatatccatgccagaaagcacactgcaagtttccttataatgttcctcatttgttactccctttctttgtttttcatctttattcttgatatttctttttacattcgaattttaacacattcttaatatttttgcaatttttttgaaatattttatcatctgtttttacatgaataaaggaagaatccctcctttgggaactcttcctcttaacttatcatattcaatactatatttcaatactctatataagactatctgatcttatctaagtgccagatatcatcaacatattcctgaattgtacggtcagatgagaacttgccacatcctgctgtgttggtcatcgccatcttagcccatccttttgtatctctatatgcttcttctactttcttctgagcttctgcatatgaacggaagtcttttaagatgaagtacatatctgcctggcttcctgtatcaccaaataacagactctggtacagatctttgtaaagttctggatcaccatttgcatatgttccatctaccaactgatctaagacttcatggatgtctttatcattctggtaaatctcatatggatgatatccaccgttattctcataattgataacttcttctgagctcataccgaagataaatgcattctcagctccaacttcatcaacgatctctacattcgctccatccattgttccaagtgttggtgcaccatttaacatgaacttcatgttacctgttcctgatgcttctttggatgctgttgaaatctgttcgctgacatctgctgccgcaaagatccattctgcattggatacacgataatcttcaataaatacaacctttaacttacctttgatggacgcatcattatttactttatcagctacagagttgatcagtttgatcgtctgttttgcacgaaggtatccagctgctgccttcgcaccaaaaataaatgttcttggatagaacttcatatttggattcttctttaactgattatacagatacatcacatgtaaaatattcatcagctgacgtttgtattcatgaagtcgttttacctgtacatcaaagatggatgttggatcaacttctacgccattgtgttctaagatatattttgcaagacgttttttattctgcagtttgatatccataaattctttctgagcttttggatcatccacatatttcttcagtcctgacattaaagaaaggtctgttgcccatgtgtctgttccaagtttctttgttacccaatctgcaagtaatgggtttccatgcattaagaaacgtctctgtgtgattccatttgtcttgttgttgaatttctctggcatcatctgatagaaatcttttaattcctgattctttaagatttctgtatgaagttttgcaacaccattgacagaatatcctgctgcgatcgccatatgtgccatacgtacctgtccatcccaaaggatcgccatcttcttgactttctcttcgtttcctggatacatctcacggatcttgtttacgaaacgacggtcgatttcttctacgatctggtatactctaggaagtaattttgagaataagtcgattggccatttctctaatgcttctgccatgatcgtatgatttgtgtatgcacaagtctttgttgtaacttcccatgcttcatcccatccaagaccttcttcatccattaagattctcataagttctgcaacagatactgttggatgagtatcgttcatctggatcgtcatcttctcgtaaagttttgtaatgtcatcgtggtttttcttatatttggctactgctgcctgtaaacttgcagatacaaagaaatactgctgttttaaacgaagctcttttccttcgtagtgattatcgtttggatataatacttctacgatgttctttgcaaggttcttctgttctactgctttgtcatattcacctttatcaaaagaatccagctggaagtcagtgatcgcttctgcatcccagatccttaatgtattaacgatatgatttccatatcctacgatcggatagtcaaatgggactgccataactgactgatagttctcctgaatgaagttggttcttccagttgcttcatcatattctgtacggatatttccaccgaaacgtacttctttggcatattccggacgttttaattcaaatggatttccattctttaaccattcatctggtacttctatctgatatccgtctttgatcttctgtttgaacattccgtattgatagcggattccgcatccatatgctgcatatccaagtgttgccaatgaatcaaggaaacatgctgctaatcttccaagaccaccattaccaagtgctgggtctggttcctggtcttcaacggcattcagatctacgcctaattcatcgagtgcttctttcacttctccatacatactcatgttaatgaggttatttccaagtgctcttcccatcaggaattccatggacatataatataaaatctttgggtctttctcttcgtaggtcttctgagtatccatccagtcctcaatgatccactctttcagggcataagccacagcctgataaatctgctgctgggatgcattatcaagctcaactctgaactgagtctttagattattgagtacttcctgtttaaacagtttcttatcaaatctttctgttttcatgattgtctcttcccctttcgtgttcccagtgtgttattaattttatcatataaattggaaatatgatacaaaaattacaaatatcatttgtattttttttcgtaagttcttctaattatacaaactagctgccacgcataattttccatatccaatttcattgtttggatagtccaaaaatccattcattttccttgcacctttatgaaaataagctttgatccgctctccatacaaataaggatcattttttcttatgatcccccattccatcaaaagagctgccgctcctgtgacaaatggcgttgccattgacgtcccggacaaactgttttcaccgcctcccggtgctgctgccaaaattccaactccaggtgccacaagatctggtttctttacaccatatctttgatcaccccgccccgaaaaatctgcataggactgatatctgacatcatacgcacctgctgagatcactttttctgcagttgatgggattgttaaagtaaactctttatctggctctaaaaatctagtttcctgattacttcctaaggataccggaagccacatctgatattccccatttctgatatttcgtggaatcaatgtaagattccattgtccactctctatatgatttccttcctgcacaataaaactaaggaatatttcctgccttacattgtacggtgttggataaccattgtatacaaagacgatcgtatttccatatgcatattgtgactttccctgtttatctgtgatctcataagatattcccgatggagattccagctgtattcttaactcatccacgaaatctttccatatctggagatttagattctgctcaaatggtgcaatatccaataagattttttgttcttctttgatcagctttccttgtttatgctttccactatttccctcatttcctgttccaatgcagatcgtacatttccattgctgtgcgatctgtgatataaatctttctaacaaggaatttcctctgtgatctccataattatgtccataactgatattgaccgcaaccggccgtcctgcctgtgatgcttcattgatcacatattgtaatgctgtcatcaattgtgtcgtccttgggaaacctttttctctcgtatctcccaatttcacaacgatcagttctgcctctggtgcaaccccgtttatcccggcacagattgaagctacatgtgttccatgcccagatcgatctctgctccgaaaatcgtatcttccactttctgagtgcaatactttattgatttcttcttttgtatagagatttccgttaagaaatggtttaggcggacttcctttgaccgtttgatcccatagtgcataaatcttagtatctccattttcatctataaaatccgggtgaaaaatatcaatccctgtatcgatcacagcgacaaaaacacctcttccagtcaatgaaagaggtggattcttgaccgacaacatacaagatgcggctatcgatggctgtcgacttaataatagatttttcggtttttctatataaataacttgttcatttgccccaaatgcttccaactcgtcttcttttatataggcgatcgcataacccatactcaacggttcgatcctcgttgtgtctgaccatctgatcgtatcaagtgtgcctgcgtagcgaaatatgatctcccactgatccgtttctttatcgtatcctgcatctaaatctttggatctctcccgttcttcttcgctaagatccagagcaagatttaattgattttcaaacttttcatcctgttccatacgatacctgcacactttcgtttttcttatcttatgcaaaatctgtgaggtttattcttagattgctcatatctcttttttgcagtatttccatacggatgcacaaattccgtaaacagaagatgctgtcatgatccctgccgcaaccgccactgcgatcagcaatgttttttgcccatataaataaaataaatgccactgttttgccaagacataattcatcgtatagtataaatttccacctggtactaatggaatgattcccgtgatcaaaaatactgttacaggagtttttaagatccttgccattgtttctgcataaatcgtcgcaactgcggccgctgccagattcgccacaaatgtacttggcatctcattccacacgataagataggcgatccatgataccatcccagaaatcccagccatacaaagttttttccctcgaagattataaagtactgcaaatccaaaacttccgacaaaacttgccagtacctgtatgatctctgctttcatttataacacacctcctaagaacatcaatgccataaaagaacctgctgcaaggaatacagctaacagtatcgattcacagactcttaagattcctgacatcatgtctccaccgatcatatcccgaagtgcattaacaaatgcaactccaggaaccaacagcatgatattaccgatgatgatctttccataatcctccgtcagtccgaattttgcactgatatatgcaaatgctgcaacaaaaaatgataatagaaagtttaataccatttcgttgggtgctaagatcttaatatatcttgcaagaaccgcgacaaatgcccctgcgatcattgctatgatcccttctgtaacaccacctccataaaatgaagtccatgctgctgcaatgaccgctgatgtaagaacttcctctgtaaaaacgacgaattttccctttttaatctctgcgatctttcgttttacttcctcttcttccggaagttctttgcacatatatcttgataactgatttaactcatccagtttggtaaagtctgtcttatatgacctgatacgctttgtctgcgttaagatttctcctttttcatcttcgatcgttgttacaatacttgatgtgatagaaaatacattggcttcttttgctccatacgccttgcagattcttgaaatcgtatcttctacccttgaaacacctgctcctgacactagcatgcattctccaatctccattgcgtattttaatacttttttcatttccataacatctatctcctgctatctattgtatcgaaattgactgtattgtaacacaaaagaaacccttgtgctatgatcacacaaggatttcatgtaaaattcatgttttgtttacatttcttcgagatgaaaagaagattaatgctattaatcatcaatcttatgtgtccaagcaaccgccaatgcacctgcaccgatatgacatgcaacacttaaagataatggatcttgctggaattccattcctggaaattctgccatcagttcttctttccatttgagcgctgcctcttcatcttttgtatatgcagactgaagatatgcgtgtttaccaaaatctccatctgggaaacgctcttctaactcttttcttactgctgcgatcatctttttctttgcctgtttgacacctcttgtcttcgcaaatgcatccagcttctcgccatggatctgtaaaactggtttgattccaagcactgtaccgatggctgctcctgctgctgtaacacgtccgcctttcttcagatactttaacgtatctaccataatatagattccagaatctaatttgtctgcttctaggatgtctttgatctctttggctgactttccttcttccgctaatttggccgcatctaagacagactgtctctgtgtgacagaaatcctctggttatctacaacctgaacttttccatcgtaatcatctgctaacattgccgctgtcgcacaggaactgcttaatccactagacatcgcgatatgcacgatctcatcatggtcttctaataacttctcccacagatccaacacatctccaggtgcaggctgagatgttttgatatcttcatcttcgtttaatttctgataaaattcatcctgtgttaatgtaatatcttcaaaatataattcttcgttaatataaaatggcattggaatcactgagattcctaattctttaccttctttttgagtaattccgctgttactatctgttacgatcgcaatcttgcccattcttctaatccctttctttaaatttcctatcaatatatctattttttgcctttacctcacatcataacagagattcatagatatcgtcaaaggttttcccctcatattttgaaaaaatacataactattttgtgatttcctgcaaaaatcttgcaattggaaatcctacaacattgtagtaatctccttcgatccctttgataaagacagctgcttttccttgaatcccataagatccagccttatccataggttctccagtcttgatataacgatcgatctgctcatcactgatctcataaaatgtaacttttgtttcttcataaaatgtttttgtttttccatcttcgatgacgcaaactcctgtatacacttcatgtgtctgtccgcttaacatcgtaagcattctttttgcgtccgcttcgtctgctggttttccaagaatctgcccctgataggctacaacagtatctgctcccacgaccatactttgtttctctgatttcttatatatgtctttcgctttgatcgatgctaattccataactacttcatttggtgctgtttttgttgtgatctcttgtgcatcacttggcataacatcaaatttcagatcggcaagttccaggatttcttttcttcttggggaagcagatgctaatataatatgtttcatttgttttatacctcttattttacttaagttatcaaattctcctgtgaattacccctcccatgcggtacagtagttcctatggaagtggcttctaacagtcgtgacagttaccc

SEQ ID NO: 625 - DNA, 250 bp, Unknown
  gut microbiota DNA sequence
agttctggaactttacaacggacttctgaaaggcaaagagcatcatctgcttcacaatgattcctattaaggaacatctgtgatgcctgacagtaacaatatgtcattactgttcactccgttcacagtaacgtagccaaaattcattccagattgcctgcggcaatagaattttggcttgtatgtctcgggattttggcatattcatgccaaaacacctcgcgggatagtggtgtgtgaacagtaacaa

SEQ ID NO: 626 - DNA, 29962 bp, Unknown
  gut microbiota DNA sequence
catctgaaaaattcattagaattttcaaggttgtcttattgttcagttgtcaaagatcttttttgtgatctgcttcgtataagaagctttatcattatatcacttcgttcttagcttgtcaagaacttttttgatttattttgttgacccgttcttcataagaaccgcagcaacttttacatcatatcatgttctttcttatttgtcaagccttttttcaaaaagttttcttggataaaatatccaacggagaaggagggatttgaaccctcgcgccgctattaacgacctactcactttccaggcgagccccttcagccacttgggtacttctccaagtgttgacatcatggattcatgatgaacggagagggtgggattcgaacccacgcgtccttgcggacaaacggttttcaagaccgcctcgttatgaccacttcgatacctctccataacgtattctgttgttgtcgttttgtgtgtctcacgcgacgacttgtttataataccaaaccagaatacatatgtcaacactttttttaaagtttttttattttttttgttttttctctctaaatcgctttttataggccttcatctgtagatatatcaacttatcatgtaacacatgaagcttgtgaaaaactttccttacacgtacaagattcgttgcaagtctaacatcctctggtgtcgtgaccttaatgttatcataaccaccttcaaacagttttaccggcacattcccatatgtttctactaccattgcatcatcggttacttttccatcatcattttccatcatcttttcatatgccttttttacaaggtcaaattcaaaacattgtggtgtctgaacctgccacaatgtttttctctcaggtgtacggatcgcgtaattctcctcatcaacaactttaatcgtatctttcgatggcattcccacgacacatgcacgatatttttttacatagtatatgcatttttgtattaattctgcactgatcatcggacgtgctccatcatgaatcagtacataatctgcatcctcaattgcttcaagcccaaaataaacggatgcataacgttcccatccgcctggcacaatctttttcaccttattaaaatgataacggtctacaatatactctttacagtaatctatctcgtcttctcctgtaacaagaataacctcatctacagcgctctcctcaaaagccttcagcgcatagtacaccaaaggccttgatttgatcagcatatattgttttgggattccgcttcccattctttttccttctcctgctgccaaaacgattgccgcaattttttctcccatgtatttacccctgtctggtaccaatctttaatccaggtaccgcattcagatctaagccgcttcttacaccattgatatagtcatagtatccacaaactccgatcattgctgcattatctgtacagaaaataggagatggatgataaaattcaattcctgcttccttacatctctcaatcatttttgcacgaaatgctccattggatgcaactccacctgcgattgcaagtttcttgtatcctaattctttcgccgcttctactccgtgagaactcaaaacatctacaaccgcttcctggaaagaagccgcgacatccgcacggtttacttcttcacctttcatctcgcacttatttaaataattcaatactgaagattttaatccactaaaactaaagtccatcttagaatcattcactttcgctcttggaaatgcaattgcattcttatccccttccttggcaagtgcttcaatctttggaccccctggatatcccagtcctatcgcacgtgctactttatcgaaggcttctcctgctgcatcatctcttgtacacccaatgatctcgtattttccataatccttgacatcaacaaggtgtgtatgcccccctgatacgaccagacataaaaatggaggttctaaatctggatgttcaatataattagcgcagatatgtccttcaatatgatgcactcctaccaatggtttcttctttgcaaacgcgagtgctttcgcttctgccacaccaactaatagtgcaccgactaatcctggtccataagtaaccgcgatcgcatcaatactgtctaatgtttctcctgcttcttttaatgcttctcttactacaaagttcactttctctacatgttttcttgaggcaatctcagggacaacaccgccatatagcttatgcagttcgatctgagatgaaatgatattggattttacacatcttccatcctctacaactgctgccgctgtctcatcgcaggaagattcgattgccagaatcttaatcttatcgctcatcgtattctcctattcttcctgaaaatctaaagttatcgtcttaccgtcttttccagcttttgctctagggaaaatcgacttcactttccccataaattcttctgcccggactaatgacggactataatgagttaaccacatctgttttacatctgcttcttttgcaagattcgcagcttcgtaaaatgtcatgtgtttatattctcttgctttcttttcttttccttcttctccatacattccttcacaaataaataaatctgcattctttgcgtgttcagaaattgtctggactggtcttgtatccgtacaatatgtcaatttaattccaggtctaggacttcctaagatcatatcacttgtaagtacacgaccatcttcacttgtcacagtttctcccttttgaagcctgttccagtatttcatcgggatgtcattttcctttgcctttacaggatcaaacttcccagctcttgggatgatcatattatagccataacaaggcacattatgttttacatagaaagcttcaattttatagccatccatctcaataacgtgctctttctcatttaattcataaaattcaatcggaaatggaagttctggtgcgatcacgcgcagtgaattcacaaccctttctacgccttttggtcctatgatcaaaagaggttctgttcgttctgcatttccaagtgttaaaagaagtcctggaagtccactgatatgatctgcatgaaaatgtgtaaaacagatcgcatctaatggtttaacactccagcccctctctttaattcctacctgtgttccctccccgcagtcgatcaacagactatgcccgttgaatcttgtcatacatgcggtcaactttctatatggaagcggcatcattccaccggttccaagtaaacatacatctaacataaatcaccttttatgataatatctcactcttctctgttacctttggagaaatctcaaattgttttacgatacgatcgtaacatctctcacaaatcttaaattcatgaatctgcgtatctttgtttgagaaatacccccattcttttttaacttctatataatctgttttattgtttaataactgtccacatacattacatttcatctcattctcctccttacgctcatcattataaacgggcgtttctgaagaatccagtggaaatgattggtcatctgttgaaatttcacaaaacattaagatcgcatcctcgatcggatccttataatactttgctctgcgtccatattcttcaaatccattctttaaataaaactgatacgctgcttcgtttgattctctgacctccaaatagatcgtgtctacccctatctcctgataccttcgtctgaactcatgaaacaacaatgtgccaattcccattttccttataaatggaatcattgcgatcctatgtaattctgcctgatctaacacatgctcagcgattatatatccactaatacgatttctgtctctccatacataaatatcactagttttacgataatagaaagactcaatactatcgaaactccatggtctgtgaaaagaaagtttttctatctctgcgatcatcggaaggtcttctggaagtgctttcctcacatgccattctctggctgttatactacttttgtccatgaagcctctcttctctctctcgttcagcctgagattttcttaaatattctggcacaaattcgtctgcactttcataaattccctgtgcaaaatatacttgtgctaacgttccgactgctgctgctctctggcggtttgcatgtgctggagcaaaaattgccagatcacccatcttctctaagatttcttctttatatactggtacgccatccccaaggaatacaactggttcattgtattccatcaactgtatcaaagtatcttctacactctgggcacattgttcctttaagactttcatttcactgccttcaaatcggtaaaatcctgtatacacttgttttcttctggcatccatcattggacaaatgatcatggacgttccaaataactgatatgcaagcccatctacagttggtacaggaataatcggtttatccagtgccagccctaatcctttggctgttgctgcaccaatgcgaagtcccgtaaaagaacctggtccttttgctaccgcaaccgcatcaatatcttctatctcaaaggatgttctcttgattacttcatctaacatcggaagtaacgtctgagaatgtgttaatttatttccagtcgtatactctgcgatcaactgatcatcttcgatcaatgccacagaagctaccagaccagagctgtccagtactaataatttcatctattgttcctccatttcaatctctcgatagtcaaatcctttttctaaatctttacggatcgtaatcttttgataatgatctggcagaatctcctcgatcagatttgcccattcgatcagacagactccttctccataaacataatcctcatatccgatctcgtccatctcttcaatatcaccaatacgataaacatcaaaatgatatagtggaagccttccctcttcatattctcttacgatcgtaaaagtcggactctgaattggttctgtgataccaagtccatctgccaacccttttgtaaatacagtcttaccaaccccaagatctccatataaacagatcacctgtccaggctgtgcctcctgtccgatcttctttccgatctcatacgtatcttctgcacaaaaactttgtacgatcattttctattcttctccttctgatttctcttgaacttctgatcctgatgcttcaacctgagtttccgtttctacttctgtctcttcctgctcagtttctgctgatgccttggaatattttgaaatatctcctccatctgtctgtgtctgaacagccttctttcttgcttctttgatgtgttctttcatataatctaacatcttttctctgtcatcaccaagttcataatctggaaatacaaatgcctgctgttttcctgtatacaataatgtcagtcccataaaatgtgtgatcttataaactctggcccactcgatcgttgcactttcttctcctagttccacaaaaataccatcatctcgtaaggtatagtatgttggattcttgtatactggattctcaattgcctgtttctttgcttttacatatatcatcagtggattaatgacaacaaataatgcaataacaactgcaccaaaaataatattcgtctgtccttctggctgaccgattccttggacgatcatatatgctccgactcccaacataaaaatcgtcaaaatcgcctgtactccggaatacgtgtatgctaatgaaaatttaaaaatatctttcgcttttaattgtgtatgaaatttcatcttaattctccttaccttttctctgttaatgaaatattataccataatccgggtataaaaccaatgattttacaaatactacaagcatacacgaaaaccaatgaatatggaggatcttaagaatgaaagctacaggtattatacgaagaattgatgaccttggccggatcgttataccaaaagaaatacgaaaaaccatgcacatcagagaaagcgatcctttggagatatttacagagagggacggcgatatcattttaaagaaatattccccgatcggtgaactaggaaacagtgcgaagctatatgcagaatcgatcgctgctcagattccacatacaatctgtatttgtgatcaagactgtgtgatcgctgctgccggaccaaatgccaaaaaactaatcggaaaattattagatgaaaaggctgaagaagctttgatagatcgaaaacatatattgatggaccgtgaaaaagaagatttctttcctctgattttggacttcccagaggtatttcgctatgtgtgtctttctacgataattgcagaaagtgaagccgttggatttgtatgtattctttctattgaagatgaattagatgatcaggagtttaaaattgccaaaattgcttctgattttctaggaaaacagctcgaagcataacgtaaaaaagtgaaatacagtcgcacaaaacggctgtacatttcacttttttcttcatgatacatatttattatgattcaataataatattttctaatccaccttcgactgcccagcttttaaattcctgcatctgttcttttgtgtacagtttgggattttcttcaaaacaatattctctatctaccaagtgatattttgcttctgccagtggattgtagtttaagatttcataggaaacatactgatagatcccatttaaatattttgcaattcccttgatgttatctttcgttgcagtcatttctggaatcatcggtgttcttatgatgaccttctctctgtttgatgtctctaataagtatctgatattatctttgatcttttgatttgaaaccccagtgtaatgcatatgctctttttctgttgctaatttaaagtctgcaaaaatccggtctaaatatggaaggagctctttgatcacttcctgatctgcatacaaggatgtctcgatcgcggtgtggattccttcttttttacatgcttttaacagctcttttgtaaacttccactgtaataacggttcccctcctgagatcgtaactcctccatttccataacgatagaatgatttatctttgcggatttcttccataaccatttctacgctcatctctctggaatccatggcgattgctcccgttggacaccagtcaatgatggtattccagttttcatttctgtttggatgaatgtgtatctggtcattttccatcgtaacgccctgattttttgatttcgcaatacacgtcttacaatgcatgcagcggttttcaaaataaattggtcttttgcgaatcgaaattccttctggattctgacaccagacacattttaacggacatccttttaaaaatactgtggtacggattccgtctccatcgtgcgttgaaaatctgcgaatatcaaatacttttcctgtcatcttaaatatctccataacttgttcttgcgatgatctcattttgcagttcatcggcaagttctgtaaagtaggctgtgtaacccgcaactctgacggtcaatccgcggtattgctctggattcttctttgctgcgagcaagtcttcttttcttactacgttaaactggatatgtggaatctcaagatctacaaatgttcttaagaaatttgcaaacttatcaattcctgtctctgtcttgaaaaattcaggaaggaatttcatatttaataatccgccattggttgtaagtgtcttatctagtttggatacggattttaatacggctgttggtcctttgatatctcttccgtaaacaggtgacattcctccatctgctaatggttccttcgcatatcttccatctggagttgcgcctacattttcacccattggcacatgggctgatacggtatacattcctgtatgatatggaccttttcgatagtttttaaatgttcttaatcgattcttgaagtaatctgcccattttgttccctgtttgtcaacttcatcgatgtcatttccgtacttcggaaccttattaacgcacattgctcttaagatttcatatccttcaaaattgttctttaatgcatcaagcatttctttttgtgtgcactttttttcatcatacaccagctgcttgattgcgacaagactgtctgcaagatttgcaacctgaatcatctgaattccggataaattgtattttgcaccgcctgctgtgacatccattccattttccatacagttttcaatggatgctgataagaatggagatggcaaaagatcaatatgagctttctctacttcttcgcatgcaagaagcatcttatccatgaaataatcaatttgtttcttgaatgctgcttccaactcttcaaatgtctcgtacgtttcaaggtttccataatctggtgcgatcttttctccggttaagagacagattcctcctgtcaatgccacttctaatgctttatttaagttaaacattgcagaatcactccatccaaggttatttccctgcgttgttaattccacgcatccaacgatcgcataatctcttgcatctttttcttcgattcctaattcctgaatggatggaatgactgccttgtcattgaagaactgtggcattccgcttcctttggctacgactctgactgcttcttttaataattcgtccgacgttccttcgtgaagtcttacggaaaggtttggttgtggaagtcctaaatgtttctgagcttctaagaacaagaatgataaatcattatatgtatcatttccattctcatcctgaccgccgatcgcgatattaaatccaatcgggaatcctgcaaaatattttgctccgtgagagtttctcatatatacgatctcattaaatttcaaccataaacattcgatgatctctaacgcctgctgtttatctaaggttccttctttgatatctttttcataataagcttctaaatgtctgtctaatcttcctggtgaaaatgaagatgcattggattccatctgtaaaattacaaacaagaaccatgtagactgtactgcttcatgaaatgtctgtactggacgttcggaaatattcttacagttttgggctactttgatcatggtttgttttcttgttttatctgattcattttctgccatgttcatgatcaagtcatgataacggaccataaagtgttttgctccttccatgacgatcttaacactttcatagaagtctttctgttcttctttacatatctttagtttttcttctgcctgatcaagcagtccctgcggtcccatctttaaccatttgacacaatctgggcagatatgtccttgtgcgtggtctttctggttgatctttacaactttggcaatcttgttgatctcttttccatatctctggttcaggacatcttctaaggattttccttcccagtatggtttgatgaccttacggaatgtctcaatatcttttttatgtacattgaagcggtcctgtggtcttgttgggagtgtttcaaattctttatctacccatgtgctaccactctctggaaatacaactccataacgaactccggctgtacgatttccaacgatcagttcttcaggttctacacggatctccatcttctctaaagctgcttttaatgattttgctctctgtatgatctttggatcatcttcattctcctgatatgtttttgtaatgatcagtgcctgttcaattgatgcgtatcttggctctgataacattttatcttttaaatctttgattcgctgtgtctgatataatccttccatagaatttgtcctttctaatttaattctttactcaataacttctacctgatattcttttagtttttcactaattttttttgacggcttttcttcacataaaataccgtcaacatcttcaaatgttgtatatacataattagctttaaagtcaaatttacagttttccattaccaaatatcgtcttctacttcttttcatcgcatgagatttcataattccatcttctggtacatatgtcattacttcatcattctctacatctgctcccacaactcccataaaacagatatcaaatctaaaattcttcatcatttgaaccgtcaattctccaagaaaaccattctgagattgattaaattctccgcctaacaaaataaattttactttctttgtttgggcgaaaatgtatgcaatatccatcatacagcttatcactgtaatctcaagttcctgtttctggatttctttcgccaattcaatgtttgttgtcgaggtatccaaaaagatcatatctccaggacgaatcaattttactgctttttttgcaattttttgtttctgctttatattcttatcttttcttgttgatacaagatttgtatgtcccggatgcaaagtatctggaagcactgctcctccataagttctttttaaaagattttttgcctccatacttgctaaatcttttcgaatacagtcttctgttacctcaaattgtttgcttagttctttgacttttactttttcattttcctgaagcaaatgtaagatttcctgatgccgttcttctacaaacatcttttattctccttttatgttttattatttcttattgttatttattattttatattattttcaccagttgtcaagtcaaaataagaaaaggcagccattgaaaaacgactgccttttcttattttttaattatttcttgtttactgctgtgggtttgctgggtttgccactggaagtttcacatccatggttgcatttccaccggaaactgtgatcgttcctgatgttgtctcgaagtatttaccatctttctgtcctgaaacaaccaatacatactgtccatctggaactccctggaacgaatatgttccgtcactagtataatctgatacagaataatatcttgtatcaaggtcattacttctatacatgcaaacatcaacactgttttcatatttcttgttattcacatcatagatcgttcctgtaatcttcgtagttggtaaggtaaattcaagattagtatctccacttacattcaatgatttattcagcatgatcttacgtccacacatacgataatatacggaatatgtaccgtgtggtaaatatcctgtggatgttaatgttgtatttcctacactaccactatatttactctctttttcgatacttcttaatgaaaattcctcatttgaattgtggttataaaaataaatcgttccatcagggctattattatttactttcgttacaattttcgctgatgtagtaacgataacttttaatgtaccctgacctgtttttccattattatctgtaattcgtactggtatatcataagttcctgctgcaagtttattagaatctgcaacagtaattcctactgaatcactgtatgtatcatcaatcttaaatattccatcatatgtgttcaaaatctctgcagtgatttttccatttccacctgcaaaataaagatttttatagaaagaatctttcgcatagatcattccacttacctgatccccaatagtttgattctcaaccacaatatgatcaccatccccaattaggaaattcacatctgttgttgtatctcttcctatttcatctgttgttgtaaatacaacatgctgattatctgctacagctgatggtattcctcgaacacgtgcagaatcatacggttcattaattaatttgtaacctgctggcaaagtacctgttttgatcactgatcttgaagttcccatagcatcattatccacagaaaaactttgttcgtcatcaccaacttttgctgtatgtacttgtctgactgtatctggatctaccagaaatcttacttctgctgttttctgtccattcaatgcattgactgtaactcttacatatcttccattataaatatcatcactcactaaatatacttcatatgtctgattgtctgttgtatatatatcatctacagaaactgttcccatataagaaccttctccataactctttgtctcaactttaaaatcatctgctgttaatgcctgaggtgaatctaatgttactttcaaagtactagaagaataagatttcaatggattataaacttccagactcttaattccattcactacctgcttctcacgaaccgttactgtacatgtactcttctttccagttccatcaagagatgcagccgtgatctttgctgttccttttccgattcctttgacaacacctttgcttgtaacggttgctactttcttattggatgttgtccattttaatgttttgtatgctttcttggaagctgttactttcacacttaattttcctgaatctccgacattcagtgctaaattgctcttattaagtttgactttcttaactgctccactgacaactttgatcttaatacttgctgtctttttcttattttttgcggaaattacttttaccgttgctgttccagctttctttcctttgacaaccccttttttggatacagaaatcactttcttgttgcttactttgtaagtaactttcttgtatgctttctttgttgcattcactgtgactgcaagtttgattgactttccttttgccacggttgcactcttctttgatccagatggagcaacaacttttacactcttcactgtgctttttgcctttgtctttttctttgcagcacttactggcattgtattcattgagaataccattgctcctgccattgtcaatgctatcaatgacttaactgttgacttaccgttcatatgactcctcctctgcctttgtttgcataccatcgtaaaaataaaacacgatcgatatgtgtgttttcatgcatctgatgtgttttattttatcatatatttataatatttacaacattatatattatttaattgtgcattttgtcggtatatttatgacattttattgtgatattatatattttttcatctatgagcagttttatttttatcatttttgaacatctcaatacatcggtgttgcagaagtccttttaacatctgttaataaatacaaaaattattagccaataccgtttaacatacacacaagcctatccacagattttatcgattaagtatccctttcaaatactgcccagtataagatttctcaacctcgcagatttcttctggtgtccctgctgcaacaactgttccaccgcctgatccaccttctggtcccatatcgataatataatccgcagtcttgatcacttccagattatgctcgatcacaatcacagtattgccaccttctgtcagtcttgcaaggatatccaccagtttgtgaacatctgcaaaatgaagtcctgtcgttggctcatccaggatatagatggtctttcctgtacttcgtttgcttaattctgctgccagtttgatcctctgtgcttctccccctgataattctgtggatggctgtcctaatcgaatgtatcctaatccaacatctcttaatgtctccatcttacggctgatcgatggaatattagagaagaaatcacaggcttcttccactgtcatattcagaacatcataaatactctttcccttgtatttaacttcaagtgtttctctattgtatcgttttccatgacatacttcacaagggacatacacatctggtaaaaagtgcatctcaatcttgatgatcccatctcctgcacaggcttcgcatcgcccgcctttcttgttgaaactgaatcttcctttattgtatccttttgcttttgcatcttttgtcatcgcaaacagatctctgatctgatcaaagactcctgtgtaagttgcaggattggatcttggtgttcttccgatcggtgactggtcgatcgctatgatcttatctaattggtcaaatccttcgatgtctttgtgtagtcctggtttcgtcttagctctgtttagttcttttgccagacgtttgtataaaatctgattgactaaagaactctttcctgatccagaaactcctgttacacaagtgaaaattccaagtgggatttctacatcaatattctttaaattattctcctgtgccccgactacttttaggaatcctgatggttttcttctgacttgtggtactggaatcttgatctttccgcttaaataagctcctgtgatggatttcttattcttcatgatctgttttgcagttcccgttgcaacaacttctccaccatattctcctgctttcggtccgatatctacaatataatctgctgccagcatcgtatcttcatcatgctctacaacgatcagtgtatttcctaaatcccttagattcttaagtgtacgaatcagtttgtcattatctctctggtgaagtccgatacttggctcatctaagatataagctactccaactaatccagaaccgatctgtgttgccagacggattcgctgcgcttctccaccagataatgttccagtagcccttgataacgtcagataatctagtcctacatcatttaagaatccgattcttgccttaatctcttttaaaacctgttctccgatcagtttctggcgttcactcaattccatcgtttctaaaaatgaaaccatttccccgactgacatatcacacatctcggtaatattcttatctgcaaccgttaccgccagtgattcccgctttaatcgctgtccatgacattcatcgcaaggtgtgatcgtcataaatgtctcatattctgctttcatattctgagatgcctcacgatatcttcttccaacattcttgatgatcccttcaaatgccacatcatagacaccttcgcctctctgccctttataatagactttgacttctcttccaccagttccatacaataaaacatctttgacttcctgtggataatctttaaatggtgtttccagatcaaaatgatattcccttgcgagtgcatctaagattgctcttgtataactcttcttatccgttgatgactgccatccaaagacctggatcgccccttctgcaatacttaacttctggtcagggatcattaaatccacatcaaattccatcttatatccaagtccatggcataccggacaagctccaaatggattattgaaagaaaagcttcttggctctacttcatcaatactgataccacagtcagggcaggaaaaactctggctgaaattcaaggtttctccacctatcacatcaaccatcatcaatccatcggctagatttaaggtggtctcgatagaatctgttaatcgtttttcaatcccaggtttgaccactaaacgatccaccacgatctcaatgttatgtttcttatttttctccattggaatgtcctctgacagatcataaacattgccatcgactctgacacgaacatatccacttttcttcgcattctggaaaaccttagcatgttctccttttcttccacgaacgatcggtgccagaagctgaatccttgtacgttcttctaactgcatcagacgatctaccatctgatctacggtctgcttactgatcggtttcccacactttggacaatgtgggattccgactcttgcgtacagtaatcgaaaataatcataaatctctgtcacagttcctactgtagatcttgggtttctgtttgttgacttctgatcaatagaaatcgctggagataatccctcaatgctgtctacatccggtttctccatctgccccaagaactgtcttgcataagaagataaagattccatatatcttctctgtccttctgcataaatcgtgtcaaatgccagagaagattttccagaaccactcagtcctgtaaatacaacaaactggtttctcggcacttccagatctatattctttaagttattttctctcgcacctttgatgcggatcatttctttcttcattgataagctcctaattctaatctatcatcagttttagtatttcttcttttaatcgtcatattcctgatatgcgatcttgaattcttttaattcatctctaagctgtgcagccaattcgaagtttaattctgctgctgcctgattcatcttcttacttaaccgctcgatcacttcttttaattctttcttagacatggattccatatctttttcatatccacctgtttcctcttcatgttcatcagatatcttgatcagatctctgatatctttcttgatcgtctgtggcgtaattccatgttctttgttatattcatcctgaatctcacgtcttcgttctgtctccgtgatcgctgcatgcatagaatctgtcatatgatctgcatacataataacatgtccttcactgttacgtgctgcacgcccgatcgtctgcacaagagatgtctcagaacgcaagaatccctctttatctgcatcaagaattgcaaccaatgtaatctctggaatatccaggccttctcttaacaggttgattccaaccaatacatcaaaaactcccattctcaaatctctcacgatctcaattcgctctaatgtatcaatatctgaatgtaaatattttacccggataccaacttcacgcatataatcggtcaattcttccgccattcgcttggtcagtgttgtgacaagtactttattgcctttgtctgtctctttatgaatctctcctaacagatcatcaatttgtccttccaccggacgtacatcgattgctgggtctagtaaacctgttggtctgatgatctgttctgcccttaataattcatgctcttcttcgtatttaccaggtgttgcagatacaaataacatctgatcgatcttctgttcaaattcaccaaattccaaaggacggttatctttcgcagaaggcaaacgaaatccaaaatctactaacgttgactttctggactgatctcctgcatacattccaccgatctgtggtacggtgatatgagactcatcaatgatcatcaaaaagtcatccccaaagaaatcaattaacgtacttggcggctgtcctggttctaatcctgctaaatgtctggagtagttctcaatcccagaacaaaatcctgtttctcttaacatttcaatatcaaaattcgttcgctctgcaattctctgtgcttcgatcagctgatcatgttctttaaaatatgtcacctgctcagcaagttcttccttaatccctttgatcgcacgttcaatctgttcctgtggtacaacataatgtgatgccgggaatattgccacgaaattcaagcttctctttacttcacctgtcaaaacatcaaattccacaatacgatcaatctcatctccaaaaaattcaactctgactgcatcttcaaatgtagaaaccggaaggatctccaacacatcccctttaactctgaaagtacctctcttaaagtcaagttcgcttcttacgtactgaatattgatcaggtcatcaatcacctcgtctctgtcctttatcatccctggtcttaaagagatcatcatctctgaatagctttctttgctaccaattccataaatgcaggaaacactagatacaacgatcacatcttttctctcgatcaatgctgctgtcgcgctatgtcgtaatttatcaatctcatcattgaccgatgaatccttctctatataagtatcggtagatggaacataggcctctggctgataataatcataataggagacaaaatattccacggcgttatgtggaaaaaacgccttaaactcactatataactgtgctgctaacgtcttattatgtgccaagatcaatgtcggtttattcaaattctgtataatattcgccattgtaaatgtcttacctgaaccagtcactccaagaagcgtctcaaactgattcccatcttgaaatcctttggtcagcttctcgatcgcctgtggctgatccccagttggctcatattctgatactaattcaaaatgatccatataacttctcccttatgaaatatctcttatcttttcatctatgcatgattctgactgctcccacgggcaagcccgtggggttctgattgccaagtgtagcttgtaatcgtacaccattttcaggctttggagttacaagtgtaaatctgtttgaatcaggacttttattaccaagcagtcctacgaccacattagcggtaaatttctgtcttacgacaaggaagtacagtcaatctccctaacatttagttgttaagctactttaattccactgtttagtattttgatatgattagccttaatccatgcaattagggctttttctttgtcatagcacctgccgaaatctgtaatacatttatctttgtctatatcctgcgttctgtagtcgtaacaatagagcaaaaatgatgaataccaatctctttgtaccaatgttccgtctcgaagtctgtagagcctatcagacagctttttcttaatgtagtcatctgccgtgtggtcgtattggcttgccctataattattcggaacttctatatatgcgccgcctgtgactttgaatttcttttcaatagtagtttgaaatccagacggacaacgattctttatagatttgccaaagcgctttttcttattaaatttgcctttgctattaacagtagtcttcttagcccgtttcatcagcttgcttgcatttttaggttctgtgacgaatgtatctccaagacttcgcagatagttagcatcttcgtttattgcaagctgtctatttactgcatttatacggcataattcagtgtgtttggctttcagcttcttgtagcgatcagaatatttccaagtctttttacctttcttgatagtgccgtcaggattgtaattctgtggattggttgcccgtctactcctgtccatagcacgataatataagcgttccttgcgttcagaagtctgtatgctgttgccacgctctgaaaggttcttcagtccgacttcagtatcagaagtataggcaactgtctgcgttcctatatcagcacctatcatgcctttaccgtatttatgtcttggattgccgaatctatcatatttagacttagctttgccttctattgtcagatgcagatatactctgtacttacctcttatcaaccttggaacaagagtagcatagcaaggtctataagtatctatacaacaggcttcttctataagcgtattgacagcatcagcatccatcttgtcaggattctcaagataagacaaaacggcgttaacttcatcagactgaaacctgtcgttgacttgaatcccgaattgcatctttctaagtttgaatcgaagtttcccatcctcaacaaacatcggaataccacgatttatctgttttgctctgatgcatggtaattctccgtattttgagaaatgtgtggtcttaccgttatcataaaggcatttttccatacctcgccatatatcttcggcttttgtgagagcaaacaccgcatctatactgtatttcttgcctataggaatcatagatgtcctgcaaaaatcccatgtaacatcataagatttctgcatatcattgagctgattagcgagagctttacgtttgtccttatcctcagtattgccgtacagttttagtagtttacgatatttcttggtacgcatgagttggtcgtaattctttctcataagacgaacaagctcgttgccagctttgcggattttatcagaaagagccacgactttcaggacatcaggataaggcatatcagtttctacaactaagatatgcctgtcagaaagtttatgatattgtttcagaagtttcttgtattcttcgtcactcatgatctttctgttcctcgatgtatttctttactgcagcttcacttatatgacctacggtagatacaaaatatcctcttgaccataatactccacaacgagagtagaactgttttaattgtggatatgccttgaacatttcaattgcactgatacttttcaatgttcttctgcattattacagatcttgtcaaatatattgatacagacctgtttttcttctgttaatccacttaaaacattttttgcaaactgtttttgtgcgttatgtcctgcttctatgatcagttctgccttatctaacaaaataatttcaatatgctttttattgtctttactttgtattttttcaacaagtcctttgttttccaatttctttaacgaagttgaaacatgggatattgttgattttctgatctttactatttctgctttgtcaaccatttatgacattatacccagtgaagtgaactacatcggtaattgaattaccgagcatcagatatatatggcttcgccatacagattctgggtgcgtccatgacacctttactgctacctttttgaggttacacagctacttttatgatcaggaatgaattaaattttccttcatacacatagtgtaccacatctccaagaaaagaacaagtgttctatttaaaaattcaaaaaagaggagacgttaaagtctccaatgtaacctgtggttacgcgctttcatctgcggcaattgaattaccgaggattcccgctttttatcctaaaaaatttagaaacattccccaccgggtgcacattaaataaagaaacgctagttttaacaactgtctaaactagcgtttctttatttaaaacttgttttaccgaaactatttaatcttctgacaaatttcaatcacttctccacaagcactttcaatcttgaagcagcgagatcctttttcccagaaattaaggcttgtctcaattccgtctgatacgatcttatatccgtttgctttgcaatattcataatctttttcaagatcagatgagcgatatgcgatatggtcgattcttgttgttgcacctcctggaagttggtctctctgagagatttcatacatttttccatcctgaggattctcaaggaaatatacatttcttccgcccattccagggaattttcctgcaactttaaatcctaattcttcctgataccattttgcatttaattctacatcagaacaatgaagtccgatatgatccataggtaaatttaacatttgtttgactcctttttaaggtgattttattgttttacatgttttgttttataatacagttctttctcctgtgacaatctcttttaagctgtcaacgatcttgtctgcgtcttccatcgttgttcctgctttcaatgagaatgaaatggattctgcactttcagctttacttcttccgattgctgcaagaatattagaatttgttccgattcctgcttcaattccttgttctttcaaaactttctgtacaactgctgcagatacatttttaattctgatatttaaatgattggtcaaatgatgatctttgtgtccattcaattctacatcttcaatctcagcaaaaatacgtttacacatatggtttctgactggacggatttcttccataaatgttgcagcattggctgctaaactttctgccatatctgacatcactgttaatgtttcttcgcttaatgcaatttctgacacatattctccagctcctgtgctctttcttacatataaaaatcctgcattttcaggacctccaaaataagatgcatctgctgtcagcatatcaatatgacttctttctacattgatcggcatttttccaaatgcaaatgctgcatctgtgtggaagatcacacctttctctgatgtcattgttccgattcctgtaaatggctcagaagttcctgtctggcagtttgctgctgtcactgaaatcagttctgtgttttctttcagttcattttcgatcattgctacttccacacgaccggttgtgatcggatctaaatatgtcacaacagcgtcttttcgttctagtctagaacattcatccaatacttctggatcttccatcgtcgtgatgatcacatgaggacgtgctttttttgatgctttcactacagcttttaaagcttttaagtggccatctgctcttccagatgtgaaataaatctcttctggtgttgctccgatggatgcagcgatctttttacgtgcttcgctctcgcaattttccttgctcatctttgttttcctccttttatttctgtttcggatataaaaatctttgataaacagattttatctttattatagatattatcttctgttatttcaagatttaatgcacaatccgtaaatttgcacaaaaaaagcatagaacttttggtaatatgttctatactttcttttttatatctatctttacaattcttatttcttctttaagatagaaatcgctttgtttaattgttcgtcagcttttgtcttcgtgttatcttttacttcgacatctggcttgattccttttttatgaatgttatgtcctgctggtgtgtaataagatgaataagtcagtttcacataagatccatcaccaacttcaaagaatccctgtacgatcccttttccaaatgttgtctctccaaccagcgttccggctttatcatctttgatcgcaccagaaaggatctctgctgcactcgcgctgttaccattaactaacacgcataacggcatatcaagctgttcattctttgtgtctttgtaatatttcttattgccattcttatcttcggtataaacaatcgttccttttggaagaatctgtcctgcaatatccactacacttgtcagtaaaccgccaggattatccctaagatctatgatcaatttctttgcaccttgtttcttaagacttttcagtccacttcgaaactggctgactgttacttcatcaaattcagtgatctgaagatatccaactttatcttgtaacatctttgtttcaactgttggattctcaatcgattgtcttgtaaatgtataagtctttgatgtctgatttcttgtaaatgttaatttaactttcgttccttctgcacctttgatcttcttaacaatatcatctagtgcatccgatgtttttaatttatagtttcctacttttgttaaaatatccccttttttcagtccacttccgtctgccgggcttcctttcactggtttcacaactgttatgatccctgtctttatatcctgtgtaaggtatattccaactccataataaacaccacttgtagattgttctaattccttaaaatcatcctctgaataatacgtggaatagacatctcccagtcctgcaactaaacctttgtaggtacaatcttccaactcactcttcttaacagaacctttataatatttatcaatgatctgttctatccgattgatctttcttgctgtctgtaaggtcgtacttgggatcacataagcacgataaaggaaaaatccttccacaatacatacaacaacaagtaatcctacaagtatttttgaaaacttcttcatgaaattagttcctttctatttatgtaatgacgttataagtaattttgaggatttacataatttccattctttttcacaacaaaatgcagatgtgcaccagataccataccagttgctccggattttgcgatcgtctgtcctcctgacactcttgcccctgaggatactagaagtttggagcaatgcagatacatcgtttccagtccatttccatggctgatctttaagtaattgccattgtatgcattgtatccagcatccactactgtaccagaagctgctgctacgatcgttgttccagttgaacatggaatatcaattccagcatgcagttttctgactcctgtaactggatgaattcggtagccgtaccctgatgaaatactatgacaagacggtaccggccaactcagatttcctgacgaaactgttgttgctggcgatgttgtcgttgtagtttctttcttgctttcggttgtagcctttgatgttgtattctttgatgccgtacttcctgtcatattcttttctgactgtgctttcgatgtcgtattgtctgcattaccgtctttcgccgatgcaagatccatctcttcttgtcgtttttcctctgcctcgaaccatgccagtaactctttatcagatgctaactgtttctggtaagaagctaacttagatttcttcttcgcagctgcctgatccagtttttctttttctgtctttgccttagcagtcaaagtctttgtattttgataatcctgtttcagactcttcgttgccattcggatcttatcttccgttgtctgtaattgcagaaacatgttactgtcatatttggagatctttgaaacataatcagctctttttaagaactcctgaaaattatttgcttcaaaaatgacttccatatatgccatatttccattttcatatagaaacttaatgcgcttactcatgatccttgactgatcttctttggatgcctttgcctcttttaattcctgttgtgtcttctttaactgtttctgtacagaaataagcttctcttgacatgcctcatacgcatcattgctctttatcattttctcatcaagatctttgatctcctgctgcatcttgcggctttgttcttctaatttctttgtttcctgctttacctgttgtttttttgctgcagcaaacactgtcgtcataggcagattcgaagcgatcatggctgatattaacatcataatgatccccgcctgatatcttcttttcatgagttccccttcctagacttttaaatacttacggatcgtgatagaacttccaagcaatccgatcacgattcctaccaataatgctaacggaagtaagtataacataatctgctggatcggtacaaatttcataaagactgtaacaacatgaaacttatcattcatccagttgataatcccttcatatcctgcaaaaataattgctgttggaatcaatgaccccaaaattcctatgatcattccttctgcctgaaatggtgctttaataaatccattcgccgcaccgatcagcttcataattgaaatttcctcttctctgactgcaactccaatagacactgtgttgctcacgaggaaaatagaaactgccattaagatcagaatgatcccacctgcaagatacgttcccattgtattgatcttcgtcattccttccgccgctccttcagaataacggactttcctaacaccatcaatcgtctctaaatgtgatactacctgttggtatgattttacttcttttaatgtgatctcataggaatctgattcttttagcggattgtttccttcaaatccttccagaagctcttcattcccttgaaatacatccttcttatagctttcccatgcttcttcagcagatacataccgcatcgtggcaatatcttcttttttctttatttcttccccaatctgatcttttctttctgcagagatacctggttcaaaaaaaacagaaattcctacagactgttccatctgctgcatcgttgaccttacattcaatgctacagataaaaatgttcctaacaaaaagacacaagcaatgatcgttcccagtgatgctaatgaaaacatcttattcctgaaaatattccttgtgccctctttgattccatacaaaaatcttctaaatatcataggacccccttatctcatcctgttctatatgtccatcttcgatcaagatcactcgtttgcccatctcattgaccaactctttgttgtgcgtaacaactaaaactgttgtcccactcttattgatctctgagagaagctccatgatctctttggctgtcacagggtccagattcccagttggctcatcagccagtaataatactggatggtttaccaaagctcttgcgatagcaactctctgctgttctcctcctgacaattcattcggaaaagcattcatgcggtctttcagccccaccatctcaagcatattctcaacctgacgcttaatatatctgtgtggtacttccacaacttgctgtgcaaatgctacattctcaaagatcgtccggtctttcagcagacggaaatcctgaaataccattcccatctgcctgcggaacttcggcagattcctctgtgtcagtttcttataatcctgaccgtttactatgatctgtccacttgtcacatcaagttctttctgtaaaagcttcatcagggttgtcttccctgatccgctcttacctacgatgaaaacaaattcgcctttcgcaatgtctaatgagacatcctcaagtcctatattccctttattatattctttcgttacattttttaatgtgatcatcatattctagtccattgtatccatatgtttcatgtattttactaccatcagtgcaattttaaatgcgattgcatcttcaaaattcctcagatccagattcgtattcttctgaatcttatccagacggtatacgagtgtatttctatgaataaacaactgtctggatgtttctgacacattcagattattctcaaagaatttatcaatcgttgccagtgtttcttcatcaatggagtctggagaataatctccaaacacttcacggataaacatcttacataatggaagtggaagttgatagatcagtcgtccaattcctaactgattgtatgcgatcacactcgcatcctcatagaagatcttgctgacttccaatgcgatctgtgcctctttataagatcttgatacatctttgatcgtctctgcaacattaccgatcgcaatcttggcatctttgatcccatattcattcagcccttctttaatctcttttgcatgctgaataaactgtgcctgtccttcattcccattcactggtgttacataaacgatactcttctcgtccactgccgtaataaaatctgaatctgctccgctttcaacctctttcgtagcttctaacagattctgatccttctcgtattctgcctgaatcaaaaatgcaactcttctctgttccacttcaatatgcagcttctttgagcggttataaatgtcaaccaataataagttatctctcaacaggttctttacaaagttctctttatccagtctctccttatatgcagtcaaaagattctgtatctgcatcactgcaagctttccgaccgtatatgcattctcgctcattccagtagccagaagtatatattccagtctctgatcatcaaaaatcttaaaatattgaaaaccatcgatcacctggctctctgccatagaatctgcaaattcttccgcatgttgtgctaatgcatcggttatctccattgttgttacaactatacgccctgacagatctaaaatacacagatcgatcccggttacttccttcattccattaattgtctcttgtaatatctgatttgaaatcatcctttatcaacctttcatatttgccgttcaaccttttcttttactatacagcattttaaacaaaaaaaaaagaaaaatttagtgatttttttatatcattgtctattttatacaaatatctagcagaaaatctttatttcattgaccataaatatctctttttagccgtaaccccttcatataacaaagaaaaacatctcaatcgttcctgagatgtttttcgtgatattttatgataatatttatgaatgtattttaaatctcgtcttctgatccaacaattatacaaattcttgcaccgctgtcaacacttccaacttcatattctggattcttaaaataacttttcagatcctgtcctaaatctttactttctactatgatctttgtatgtgttaaaacaccctgtctgtttgttcttacagatcctacactgtatccgtcacttgccagtttatctttccatcttcctgcaagtcctgagattcttgttgaattctgaatctcgatcgttatattctttgaagaagatgctgaactatcagatttggttgttgttgactttgcttctgttgtgctcaatgccgaacttaagtctccttcttctgataacatctcatcaaagactctcttggcttcttctgtatctaattcaaactttccattggattctgttccatctaacactttgaaatttaagttcttatccttaattccatgcattctctcaagacttgtcgctgcttcttcataagaagcatctgtcttcaccgcatcaaaataattctgtgcatattcacgatattcggataatgtcttatcattcaatgcagatgcaactgccacgcagatctctcctgtaatttctgcctgcttgttcttatctgtaaaaatatcactctcacttaataatgaatagattgctgttccattcaggctgttctccccagcacttaatgttacatatttatctgtagaatctgtataagccattgcttcatcaaattctattttgacatctcctgcctgattcatcagtttcacaaacttcttatgtgatatcagttcataggaattaatagaaattcccagtgtcttctcaacctgctgtcttaacaactttccattctttcttgttgctttgatcacatctgcaaccgtcgctttgctaacgctagttcccagtgtctgttcgactgcctgttttcccttcttcgtcaatgtaagattcatatcttgtctaagtggtacaaaaatcatctcctgattcttgttatgatatattcggatcacaatggaatttcctgtctggatcattccaacgtctactctttctttgctttcttcttttaactgctttgcgatttctgctttcttgtctttctttaatttatctgaaaaatatgtcttaaatccaaaaaagcttgcaactccaccgatggctgtcaccagtatcactgcaagaatcctggcaaatatggctttggcacctaatttatttttcttcttctctgccatgttcctgctccttccgtttctaaactttgtttagtataacaaattattcgatttatttcaacaatcctctatgttataattctgtataatcgccttaatattttcttaatctgcaacatttctcatcgttgatcagatcgatcatatcaagtgctaagaaattttataagatttacgaggtattttctatgaaaacagtactcataactggcagttccagaggaatcggacgtgaaactgccatatattttgcacaacaaggatggaacgtgatcatccatggcttccgccatcctgaaaaactagaatccctaaaaaatgaaattcttgaagagaacgtgtcttgcttatctttttgtggagatatcagtgatccttcttttgtagacgaaatgatcaaacagtccctccttactttttctaagatcgactgtcttgtaaataatgccggaatctctctggtgggattatttacagatgcaacggtagatgattggaatctgatgatcaacacaaatttaacttctgtttttacaacctgtaagaatatcgttccccatatgcttcatcaccatgagggaaagatcatcaatatttcttccatctggggagatgccggcgcttcctgtgaggttttatattctacaacaaaaggtggtatcaatgcttttacaaaggctctggcgaaagaggttgctgcaagcaatattcaggtaaatgcgatcgcttttgggatgatcgatacggagatgaatgcggagtttgatgaagaagatcttgccttgatcaaagaagaaatccctgcggactatattgccagtccaaaagaagcggcacagatggtttatcatgtggcaacgtcccctgcttatatgacaggacaggttattacattctctgggggatggtattaaatttaaatttgtagttggtcaactgtagtctttcagtatatgataaaaaataaataagcaaccgaaagcgatgcggtggaattttgctc
